United States Patent Application Publication US 2008/0113342 A1 - sequence listing, part 6

SEQ ID NO: 19255 - DNA, 587 bp, Arabidopsis thaliana
ggattacgtaaccggtgagttatctaggaaaccacactctgttgttttactcgaaaacgtggaaaaagctgagttcccggatcagatgagattgtctgaagctgtgagtacggggaaaatccgtgatttgcatggaagagtgattagtatgaaaaatgtgattgttgttgtgacgtctgggattgccaaggataatgccactgaccatgttattaaacctgtgaagtttcctgaggagcaagttctcagcgcgagaagctggaaactgcagataaagctaggagatgctactaaatttggggtaaataagagaaaatatgagctagaaacagcgcaacgtgcagtgaaggtgcaacgttcatatctggatctgaatcttccagtgaatgaaacagaatttagccctgatcatgaggcagaggacagggacgcttggttcgatgaattcattgaaaaagtagatggaaaagtgacgttcaaaccggttgatttcgatgagttagccaagaacattcaagagaagattggttcacattttgagcggtgctttggatccgaaacacatctagaacttgataaagaagtga

SEQ ID NO: 19256 - DNA, 2181 bp, Arabidopsis thaliana
tttagtagaatgctaaaggtaagtcccaagctatgcatatagagataagatcccatctacccagagtacatcaaatgaagctctaatggtaatcccatcaaaatgcttacaaggctatctcatcatcatcccctatgcatatgcaacaatcctaaatgaaacactctagactcgatcctaaatgtaatgcaactacatgaacactcttttttttttttgtgaaatcattttctgaaatttttcaaatctttttggtttttctatgccttagatgaatgcagactcaagaatatatacaatgcaacacacacttcctgagccctcccccaaacttaaatcacacagtccactgtgcgaataaacttgaaagagagtactcaggacaaatccaatcatagaaacaaaatgaaataaaaacaaatcacaacagatgatataatacattggtgaagtgtggcacttacctcagtcgaagaatgaacgtagttgctcgtcaatggctgcatgtgattgctcccaggccatagatgaaccaccttgttctgtatcagctccagcaggtgggtactcgacctcatcagctctgtggcggccagcaccgctctgaggatactcgacctctctccttctgctgcggccagcaccgcggtcgagtgatctcctcgagtgaatgaggcatgatctgctgctagatcgagtgagtgtagccttccttcttctcttgtgctcccgggactcgaatgactaatgcctagccgggacatgtgagactctctactcgctaagctcaggcctgtgcgcaggctcatcaaatctcctcgatggcatctccagaggaggctgtttctgtggaatagcagtggtgcaggaggaacaactcagcttatctgtcagaagcttgatagccttgaaacacttggcgagcagcttgtcctgcttcttgcaccacttctgcaatttactgttgttcttatgagcttcagtcaagctcttgctctgcctcgctggaggtacatattcaccaaagtgatacatgctagtgtcgaactccactcctctatcttcatccatcccatccgaagcaacttcttctcgaagatcatcatcatccaatggcggacgttctcatagtagaggcgtccaacctcaggccgaaaatcaatgttatcaccctctattatccgtgtaacctcagggctagggagaaggatgctagctctcctgtctgtagagtgctcaaacctgaacctttggaagtcgtcaaccattgcaaactccaggaattcgtagtgacgtaggggctcgatatccattgctcgcggctcgagtccagcagaaatgattgggactccacaagctatcagaatcggtgtcacaacaccacctatgcacagagcgcctcgtgctctcttgtggttattgttgacagcccagctcttgtatccacatagatggaaagtacagagagaggtgtgtcattgacttcacattggagagacataccattcttagtttggcgaagagttcccttgagggccattgcaatcatctccatatcagagttagtaacagtccctgtaatctctcgggagtagagtacattggctatagaacgctggaagtacctgatgacagggctgcgtatctaattgctctttgacctggaagaattcagcggtacagagctgccaatggtgatccacaagtctttcaactcttctctgtcatacttgggcttagatcccgttccactggggaagccaaacaatccttccaagcgcttgattgataacctatacgcatgaccatacacagagaatcgcaagaatcccaatccttcacaatctaactcatcagaggtcataccttggtagagctctacttgcagcgtggagaggaattgtactgtctcatcttcatacgctgcatacggataagccatcagagtgtccagatgacaactctggtacaggtgttgaacatcttccaacaatccgagttgtgcaagtgaggtcgagcaaggatacctcgtgctacataactcattcagcttgaaaagcctaccatattcctcagcaggcaatacatcgagcttgtgcagaagtttggtagatctgcgagtctgttcaggcatgtactcgtctcccagatcttcgtctataagctcatacctctctgtca

SEQ ID NO: 19257 - DNA, 524 bp, Arabidopsis thaliana
tgagcaaatgcttcgacgtcctcaatacatacggaatgaagctaaatccaaccaagtgcaccttcggagtaacatcgggagagtttcttgggtatgtcgtcactaaaagaggaatagaagcaaacccaaaacaaattcgcgctatcctcgaactaccatcaccgcggaacgcccgagaagtgcaaaggctcacaggacgaattgccgccctcaatcgattcatctcacgatcaacggacaagtgcctaccattctacaacctgctcaagcgccgggcccaattcgattgggataaggatagcgaggaagctttcgaaaagctaaaggactacctttccacaccaccgatcctggtaaagcccgaagtcggcgaaactttgtatctctatatcgcagtatcggatcacgcagtaagtagcgtactagtacgagaagaccgaggcgagcaaaggccgatcttctatacgagcaaatcactagtcgaagccgaaacacgatacccggtaatagaaaaagccgcgctg

SEQ ID NO: 19258 - DNA, 1677 bp, Arabidopsis thaliana
gaggatcccctctaaccccttaatcaaacaagctttacaattctgatacacccaaagacaacaaacggtaaattagagattctaacccagttcctccgttgcctttgtcgcagagcgttttctccgcggggaaactcttaatacccgcttctccttccctggaccatgctgcttcctcgggacttcgtcgttagctttattcccagccatagctaaagatgctatctcgccggaggttcaaatttcgccggaataaacagtaactttctcttggcttcgccgagaaaaacagtaactttcacttccccggatgtgggagttcagtggctcaattcaactatccaacaattcgaagttatgtcgaattttgaagcaatggatactgaatttcgtttcgctttctgattctctctcaaatctctccgttactctcttctctttttcgttttctcgggtttcttcgtatcagttttttttgttgtctttttcaaaactgaaccgcatcaactaaaccgaaaccaactgctgtagggtttggtttacgccgtcaacttaaccgatacgaactgctgcacggtttggtttatgccattattaagttttcccagggtaatttggtccgaaattgaatgaaaagacaaaacgtgaaaaccagttctcactttgacaaacaatgagagcaaatcttttttcgtctacttttgtaaaaatttctttagaaaatatacttagtaaattattctaatttatttgtgtgaaatttctaatggacaaaagtcacaaaacttagaatatactaaaaactttgttgaaataaagtccaagtcagtaaatagctttgactttcttgaccagctccgagtcatgtccgaataaatgagtgttccaaaaaaaaaaaaaaaaccatggccatgaggaaatttcagaacaggcagacgaaacttcgacgaagctcacttagtgcgagacgacgcgtcaaagcatcgtcttcatcttgacccatataaaggtaaataacaataagttaaaagcacccattaccagtgagaggacttcttgttatatatcatatcttcttcgttctcgatttacgagatccttgattctctctttctctaatcttatctcatctgaagtatagttacgaattcactcgttgttcgagagtagtaagctgaagaaatggagagctacttgaacgaaaacttcggcgatgtgaagccgaagaactcgtccgatgaggcgttgcagcgttggaggaagctctgctggatcgtcaagaatcctaaaaggagatttagattcactgctaatctgtctaagcgttccgaggccgaggcgattcggcgttccaatcaggtgcttctttcttctcactttgattactgaaacatttctttctatttctgcttgtatactgttggagatctaataagtgatctttctgcattccgagttttttgtttggttgactcactgtacttactggatgggatctaagtgagctcgtttttagtatttttctagttacctatcctcaggttagggattgttatcactagacatgattacattaggttctgtttctaatttaagatgtagatttttaggttcttcgtggtgtttgctagtaagaatgttcaagcaaatatgactcattagtagcaacaacccatt

SEQ ID NO: 19259 - DNA, 1742 bp, Arabidopsis thaliana
tcattcttgcatactttgcatgattaggatagttttgcatacatattgcatttctaagttgttttcaggtgatttggagctgtttgcgagcaaattggaagaaacgagccagaaccagaagacatactcgaccaccaggtcgtgtgcatccagcaccatactcgaccccctggtcgagtgactttggagccattcttcccatctactcgaccccctagtcgagtatcctcagctcaggctactcgatgacgccatcgaccccctggtcgagtatcacttcgccacaccacctgaccacactcggccattcactctaccaagttagtcgaccccctggtcgagtatcatcactcaccaccatcaccatcactcgaccggacactcgatcacgtcttcacagtctactcaaatccgcactcaaccagacaagctgagcacaaggaagagaagaggagaagacaaagtgtttggaagcggcctggacctccatcggatcacaaagcccatctcggcccattatcactctattggtcgggcgattaggttattggcccgtctactatcattttgttttgtataaatagatgtcttagggttctttcctgagacatctagtcgacattgagtttttgtttcagttttattttctattttactcttctgcgccgcttttgcttctacaacctataattcgagatttttccaagttattcagattctgcatttgattttatctatcatcctgtttctctactctttatctctttacttatgcaatattatcatttatctgcgtttatgtctttgagcatgttgtctgagtagtgacatagaattcttagggatgggatagagtagttgtggaatccgtagtctgtagaatggttaagttttagaattgattgaatcccttcaggactagttgcgtttactgcttatttctttctgatcaactggaattcgatcccaagcattctcgcacccagaaggtgttcgatggaatgcttgatccactagttcctgagatattcgtctctatcccaagggattgggcgtttagagcgtttattgactttatcagtctgttcttattgcctgcatagttagattgcgttaatgggaattagtctgggctagctttgcttgaggatttctatcacagaagtgaattgatttgttgttgaacctattgtctagggatagcttgattgcgcttgttaaccattcgaatatgctaggatatgataaggtctgaccctatcgaagacaagaaaaagactaagagtgataaaataacaagataataggaaatgcaccttgaacggcggagagtgtagatgagagagagaatttcaagattaatgttgttgattgtttattttgataacaaaaccctaaaagggaaggttccttaaatagcatctactgagactcaatacaaaacgcagcatttcgataacccaaaagtaaaacgacacagttggcgagctgtctttctgtgccgagctggcgagctgtctttctgtgccttagccacttttaaatagaagcttcctcaggaacttctcacgagctctgcctttccttccatttgatttcgcccttcttctcacaccagccaacgtcacctgtaacctatcaatgctcccgcgcagaagactgaccttgtcctcaaggtcgaagtccgggtactgctgcaccaaagtgaggagcggctcccaagttgattccaaggttgataa

SEQ ID NO: 19260 - DNA, 2148 bp, Arabidopsis thaliana
aattccttagtactaaaattttgattcattctgagttactgttctattattgttagatgctaatggagtcatataatacccgtctctctcaaccttgagacggcgtactttcatctttttccattcatttattcaacttcttcaaattaaatcttgcaataatatatcataatttcgggaaactttcttttattaagaatcaaaaataaattgtcttaaaatagtagtataaataaactaaaatctttggataaaaatgtataaagaaaccgtgtttagaaatacaaaaaataacgaaaaatcaaataaaaccccaaagttcccgaaataacaccaagcgagcagctactcaacattctcttcctcacctgagggaaaagaaaaggggatgagtaattaattactcagtgatggcagtcaaaactgtccactgaatcacaatacacgattatactttcacacaatatccatctttcttcttcacaaaaagaacaggcgctcccaacggtgaactacttggcctcacaaatcctttgtctgtaagctcctctaattgcttcttcagttcagtcatttctgttggagctggccggtaaggtgccttagatactggagcagtccctggctctaactcaatggtgaaagcatctcctctacttggtggcggtccttggagcggtttaaaaacatctgagtactctgctgctatatgaatatcctctaattttgttcatgtatctccttcgtcatgagattgttgccaagtaagcttcagggccagtccactgtaaattatctgcttgaatcatcgaaaggatcggcccgctacgagtttcgactccctgaaacatcaagttaccctcttctcgagtaaaattaacccgcaaccttgggcagtccaaattagcattatgtctcttcaaccaacccatcccgaggattatctcataacggttcaactccatctctaggaaatttccaaacaactccacaccttcaatctctacagggacatcccgataggtccgtgatgacttcaccaatcctggccctgtggtttcaactttactccgcttttacgaatactcaattctggaatcccaacacttggccaactcaggactcacaaaacagtgtgtagctccactatcaaacatagtgtaggctttgactcctccaacaagaaccgatcctacacaggttcttaaactaagcaagacaagaacagcaaaacaagcacaagcagtcctcatccagaaatggaaagaaaatcacttaataaatttttaagaagacttaccaacaatcgggtctgcgccatcctcattaacatcctcctcgcctgctatggcatacactcgaggtcccactgcttgcctcttttgcggtggtggcataacccctctgttctgatttcctggttgtcccccagtcaaattcactttacattcccttgcaaaatgacctggctttccacacctcctacaattattgtcttttcctggacaattcgaccatacatgaccagcttgtccacaactgaagcaattcccactcttactccaacaagctccgctgtgcctcttaccacatgtggcttaatgttgacaattttggactggtactgctccacgattatcccaagtgcgcttctgagattcagctccttttgttacatttgcttgagccctcttgagagccatagcttcctccacaagttctatctccaacctagcaacctcctcaactaactcaaccaggctagtgcaccctcgaatggaggtacgagtacgaatatcagcccttagtcccctcatgaatctttgaatcatatcctgctctccaaaattcttcatagtgaacatccttagacagctgaactcctcatcatactcacgaacggtcctcgtgccctgacgaagctccatgaactcatgatctaactgttccatagcttcccgcggaaagtacttattattgaactcccttaagaaatccttccaggtaggcacatatccagcagcaagcccctctcaaaaattttccaccaatgatctgcttctcccctcaggtaatgcactgaaaaatccttcttaaattcttcgggcacctcgctgtcctgaaatttcactggcgacgtcgttacta

SEQ ID NO: 19261 - DNA, 1221 bp, Arabidopsis thaliana
tcagaaagaaataagcagtaaacgcaactagtcctaaagggattcaatcaattctaaaacttaaccattctacagactacggattccacaactactctatcccatccctaagaattctaagtcactactcagacagcatgctcaaagacataaacgcaggtaaacgataatattgcataagtaaagagataaagagtagagaaacaagatgactaatgaaatcaaacgcggaatctcaataacttggaaaaatcgcgaactacaggttgcagaagcaaaagcggcgtagcagagtaaaactgaaaataaaactgaagcaaaaacgcaatgtcgactagatgtctcaggacagaaccctaaaacatctatttataccaaacgaaataaaatgatagtagacgggccaataacctaatcgcccggcccatagagtgataatgggccgagatgggcttcgtgatccgatggaggtccaggccgcttccaaacactttgtcttctcttcttttcttccttgtgctcagcttgtctggttgagtgcggatttgagtggactgtgaagacgtgatcgagtgtccggtcgagtgatggtaatggtggtgagtgatgatactcgaccagggggtcgagtaacgtggtagagtgaatggtcgagtgtggtcaggtggtgtggcgaagcggtactcgaccgggggtcgagtaatgtcgtcgagtggcctgagctgaggttactcgacctggtggtcgagtatgtgggaagaatggctccaaagtcactcggcctgggggtcgagtatgtcttctggttctggctcgtttcttccaatttgctcgcaaacagctccaaatcacctgaaaacaactcagaaatgcaatatgtatgcaaagctatcctaatcatgcaaagtgtgcaagaatgatgagaaatgatataaaacagtgatgaatgatacgaaactagactcaaagtgatgatgaatagacactataaacatgcaaattatagacatatcaggatacactacttaggcttttaagatcgagttgcggtttaagttcttatactcaatcatacacatgacaacaagtcatatacgactacaaaacactaaccaaccttcttctagcttctcaaagctttcatggtgtagccaaagtccgtatgagtctttggatttgtatcttctaacaaggaaacactacttaggcttataagatcga

SEQ ID NO: 19262 - DNA, 2348 bp, Arabidopsis thaliana
aagacttccaccatctcctcgattaaatctaaaaatatagaggtcatacacctctgaaatgttgcagggacattgcataaaccaaataaaattctctaataagcaaaagttccataaggacatgtgaaagtggttttctcttgatcattagggtgaattggtatttgaaagaaaccactatatccatcaaaaaagcaatagtatgagtgattagctaagcgttctagcatttgatcaatgaatggtaaagaaaaatgatctttcctagatgcagcatttagctttctataatcaatatacattctatgcccaattatagttctagtagagatcaattcatctttttcatttttaacaacagtcattccgccctttttagggacgctatgcactggagaagcctaagtactattagagatagggtaaatgacaccagcatcaagcagtttcaatttattttttcactacttatttcaagttagggtttaaccaggtgatagggtaaatgacacaagcatcaagtggttcaatactagaataggattcgttttcaaggtggatcctatgattgcataaactaggtgaaattcccttaatgtcaaataatgaataaccaattgctctcctatactttctaagttcagataatagcaagttcacttcatcatcatttaactcagcattaatgatcacggggtaagtagagtttggaccaaggaatgcgtaccttaaacttttaagaagtggtttgagatcaaccttaggcgccttgagttcagaccagttatgtgaagttgggatgatcagttcctagagtcgctgacagtcaaggtcgagtgattggtcgagtatgttctcgagtgtggaggttgaacttgtgttgacccttcttcgctcattaccattacctctgttgctggtccaatcaattcctcaaagggttctgattcttccatcgctttatgggagtataacagcttatggtatcccaaagttttcaaatgcataaacccatcttcaccacttctggttaaagcaccgttaagatgatcttcttttgcaagctcttccagtaactcatcagctaactgatcaatttcttcaatccaaaagagttgcccttctatggtaggcttcttcatttcgtctttgacgtcaaaggtcatcctaaagtctttgccaaggtttagatcaatcatccctttcttgacatcaatcatagctcctacaattgctaagaaaggtctcccagaatcaaaggattcttgggctcttcatccatctccaggactataaagtcacttggtatctctacagctccaatcctgacaggtaggttttcgagtaaaccatgcaggatccttactgacatgtcagctatgataagggatatgttgcaggatttgtattgagtgaaccccaatcttttggcaacagagagtggcatgagactgaccgacgctcctaaatcacataagcatctgttgaaagccaatggacctaaagagcatggtagagtgaatgaaccaggatcactaagcttcttaggaatgatcttcttctgtatgacagcactgcattcatgactcaatactaccatcccttgcacttcttgaattctttctacgatcaagtctttcagaaacttgtgagaatctgggattagtgctagagcgttaacaagaggtatccgcaactcaaccttcttgatattctttgcaaacatagctctatacttatctgtcaatgcttttttgtgacagcccgaaaatggaagctggggtttgtaaggaggaggaacaaagaccttttcttggttcttgacagcaacatgtttcagagcaattggtgatgtttctgggaatggtggtcgagtaacatggtcgggtgactgctcgagttgtttgtcagcttgatctttactgagactgaattcctccctatcttgatatacactatcctaagtgactgtcttaggttcctcttttgttggaagtgcttttctactgcgcatggtgatagctgtaagaatatggagctttaggttgcgagaatgggactcttgattaagagggttgagagtgagaaatgaacataaggaagagatagtattgcggaaatagaagagagattgtgagaaaagatattttctctatttcttgattaaaaacatacatacgatacaagctatatatggacattaggtaagtaaagatctcctaagaatatgctaaacacgtcgcactctatacaagtccacatcgtgtagacaagtcactatcgtactaaagaaagagacatgacctaacattcggtttgctttaaacacatgtgatcttcttttgact

SEQ ID NO: 19263 - DNA, 579 bp, Arabidopsis thaliana
catccctgtatgctttataagagattttgagtttactctgtattcaaaaccggtatcagtgggttgttctatcttttgtaaacaggttgacatttattcgttatctagaaaatggaaagaattggttgataaggctcgagccaagcagctgcagcctcaggagtacaacactggtaatcctactactagaatattgaagtgatttgagtttgagtaatccttcaactagattgtttgagtcttgttgtttttatttcccttccgggtaattgcaggtaccttcactctctctaacctaggaatgtttggcgttgatcggtttgatgctattctaccccctggaacagttagtgcttttacctttatgcgtgtattttagtttgtatcttggttatgtcttttagcctaataattatgctaaggataacagctcattggttttcttgtctttgatcaatgaagggagcgattatggctgtcggagcatctcaaccttcagtggttgcaactaaagacggccgcattggcatgaaaaaccagatgcaggtaaatgttattatcaccatcgttagaacttgt

SEQ ID NO: 19264 - DNA, 2121 bp, Arabidopsis thaliana
tatgtttgcttgcttaccgatttttactcgattccatatcacacctaattctatcatcaacaaggaactctataaataaccttacgacagaagactaaaagtgcaccaactcataagaaactttttatgataatgggatgaatgttagtttaagcaataacgtttagcattcatacatattttctatttgtcaaagtctcttattaaaattgaactaatttatgtttgcatgtgtatttttttttacagggttcaacaagtcatgcttaactcaaaaaatcacacatatgtatcgagtttgatgaaagttgtttctctttttctctccatcaattcaacaaaccaagtaagtctatcactcttcttatacattcatttgaataatttctaatatttttcattttaatctttattcttaagcattgtttcttagtataagaatctaatgtcactattgtcaatctatgaaacaggatggcgaaggtgaagctggacagatattaaaataagaattaccacaaccacaatttgcctctgtccaaatgatccttcagaattttcatataccaaggtatttcttatgcatagctctagagatgttttgctatatagaatatttatcagtgtttgtgcgacgaatttaatggattgattttgtgattttgttgtttgtagagctttatgtagcaagctattgagtatgagaaaggttcgttaatcactacttaattttgaactttatgatagtaacttaataacattagtcttattcatataaatatttagctatatagtaaatgccgaataatactataatataactataagaccctcgaatggtttgctagcctcgaagagaactccattgataccttcgaccagctcgccgccgctttcttaaaacagtattcagtacttatcgagcacaggacgtctgaaaccaacctctagagtctcactcaacttcagaacgaatccctgcgatcttacgtcgaaaaattcaaagccatcaaatcgaaaattgcaaacctaaacgaagaggtagccatagcagcccttcgtaacgacctttggttctcctctaggttccgtgagaactcactgttaggcaaccagtctctttagacgatgcccttcacaaagctctccacttctccaaagccgaagaggagctcattgtgctggccttacgattcaaagaatctaaaacgtaaaacgctccccttgcaattaagaaacccttcaaaaaggagaaccaaacgcaggggcagcataccttattcgcaattaagagaatgcttcaaaatcctaaacaaattcgaaatgaagctaaaccccgagaaatgctctttcggagttccctcaggagaattcctcggatacctagtaaccgaaagaggcatcgaggccaatcctaagcagattgcagccttcatcgacatgtcatcgccaaaaacggcacgggaggtccaacgactaaccggctgtatcgccgccctcaacaagttatccaggtccaccgataaatgcgtccctttctatcagctcctccgaaaggataaaaagttcgattggaacgaggactacaagcaagccttcaaacatttgaaagcgtacctgtccgaaccacccatacttgcaaaacccgaagaaggagaaccgttgtacctgtacacggcagtctcccgaaccgcgataagcggcgtcctggtgagagaagatcacgaaggacagaaaccgatctattacgttagtaaaacgttgatagacgctgaaactcgttatccagcaatggaaaaactagcactggccgtagccatgtcagctcgaaaactgagaccatattttcaatcacatcccatcgtagtgatgacgtctcaaccaatcagaaccattctgcacagtccaactcaatcaggttgacttgcaaaattggctatataactaagtgagtacgatatagaatatcgcaccagaaccagcctgaaagcacaggtcctagccgactttgtaatcgagctcccgttagcggacctggatggaaccaactccaataagaaatggctcctctacgtcgatggctcctccaaccgacagggatccggagtaggaatacaactc

SEQ ID NO: 19265 - DNA, 521 bp, Arabidopsis thaliana columbia
gtgttcgaacttaacacattattggttatttccctgacatgaggaaatccatctagatgtgaccagagacgctagttggttgtatagttcaagcctaatataaaagattaccggagaactccagcttgaagtgcaagttcagccgcagcaagtgctgttaggggcgtaagttcagatggtttaacaaccaccgtgcatccagaagcaagagcagggccgacctacaataccatttaccatctacatcaaatttaatgaaaaaagttctacatactcactgggtactaggcagctatttacagaaagaagaaggtaaattggaatggtaaaaaaagcaagaccttccgagtaatcatggctaaggggaagtccaaggggtaattgcccaacaacaccgacaggctgcaaagaaaatcaagagagtcaagcaattgagatgtatagtaaacacttgcgattacaaatacagccacattgcatggaaaaaaaagtacacgaggaatatccacatataaaatgga

SEQ ID NO: 19266 - DNA, 1668 bp, Arabidopsis thaliana
cttgagaggcgttcacggtgaacagctctctcgtcctcctttggttgaagcaatagcttttgatccacttcttgcggagaccaaactaatagctgattgctgggatccacttgaaatgatgccaaaagaagtacggttcccacattggaagcgatgggcagaactcaacacaagatattgtcgaaatgtaagaaattttttaaggggaagaggcgttcttagtgatctggctacaagaatttgtggaagtggtgacgtatttaccgatggaagaggtccggccttctccttcaactacatttcaagaaactcaggactctcgcttgttgacatagtcagtttcagtggccctgagctagcttcagagctaagttggaattgtggggaagaaggagcaacgaataaatcagctgttcttcaaagaaggctaaaacaaatccgcaatttcttgtttatacagtacatatcacttggagttccagtgcttaatatgggagatgaatgtggaatctcgacaaggggctcgcctttgttggaatcacggaaaccttttgattggaacttgctagcttcggctttcggtacacagatcacgcaatttatctccttcatgacttcagtaagagcaagaagaagtgatgtgtttcaaaggagagactttttgaaacctgaaaatattgtttggtatgcaaatgaccaaacaactccaaagtgggaagatcctgcttctaagtttttggcattggagatcaaatcagagtcagaggaagaggaaactgcgtcattggctgagccaaatgagccaaagagcaatgatctgttcatcggattcaatgcgagtgatcatcctgagagtgtagtcttaccttcacttcccgatggaagcaaatggagaagattggtcgacacagctcttcctttcccggggtttttctctgtcgaaggagaaaccgttgtagcagaagaaccgttgcagcaactggttgtgtatgagatgaagccgtacagttgtaccctttttgaaaccatcaatactaccgcttagaactcaagttatgatctttgtatatgttactgttttgttacatttccagtaagaatatattcagttaaatcaatgatttccacaatatcttatatatatataacatcacttaagccttttgcttgtatccaaagcttgatactgtatctcctcaaatcagtgattattattcgttctgatacgcgtatgccttttatggattcaaacgagtatgtatatggaaagatgattttcttcaagattgatataatctttattcattttgtatagataggataagatatggattgcttagggtttataatcttaagcaaattctataagtaaaacccaaaaaagttcttcaagttattctctgtagctatattttttctttgaaagcagcaggaacgtgatctgaaaaatgaacgatggttgctgctcaaagtgtcaggttaaagcaacgaagaagaagaaatcgaagaaaaacgaaggtgagttgtttaacctatttgaagatttcttacttttatcttcacaaatcttaaagtttttgcctttatgatgcacagatgagcctgatgaagaggatgtgaaacaaaaacagaaagtttcaaagaatgagaatccgaaaaaagattcca

SEQ ID NO: 19267 - DNA, 1262 bp, Arabidopsis thaliana
taagagtcgggggaaaccgtctgatatcgcagtgtcgagtcgaaaacggcgaccaactctctacgggaatcttcttagattccttggtcaaatatgttttgcttacatatgctacaattgaatagatcatattttttatttttaatatctttttgcaatattataatgtcgtcattcatattttgggttaaatttgcttccatcagcttgcttagattgctaaaagaagcatgtgataagggaatttaaactccctctctctctttttttataataagaaactattgcgtttgataccaaataaaaagtacatgccaatcactaaatttccaaaaccgtataagattctcgtatattgcaagtagtttataagatttgttagattccatctctaataatttaataatgaatatctctccacttaactacgaatttgattggtcaagccagaatcagaaactcctcctctttttctttttatagctgcacaagagacaatctttcttattcgtgtggttcctctctcaagtctctaaaacatgtcaggagctattacttgctctgcggctgatctctcagccctactcggcccaaatgccacggcagcggctgactacatttgcggccagttgggttccgttaacaacaagtttaccgatgcagcctacgctatagacaacacgtacctcctcttctctgcctatcttgtctttgcgatgcagctcgcgttcgctatgctttgtgctggctccgttagagctaagaacacgatgaacatcatgctcactaatgtccttgatgctgcagccggaggactcttctactacctctttggttatgcatttgcctttggtgaatcctccgatggattcattggaagacacaactttggtcttcaaaactttccgactctcacctcggattactccttcttcctctaccaatgggcgtttgcaatcgcagccgctggaatcaccagcggctccattgccgagaggactaagttcgtggcgtatttgatatactcttcttttttgaccgggtttgtttacccagttgtctctcactggttctggtctccggatggatgggctagtcccttccgttcagaagaccgtttgtttggcactggagccatcgactttgctgggtcaggtgttgttcacatggttggtggtatcgcaggattatggggtgcccttattgaaggccctcggattggtcggtttcatgatgggggtcatgctattgctctgcgaggc

SEQ ID NO: 19268 - DNA, 556 bp, Arabidopsis thaliana columbia
acttcttctggttccttttatcaacattttttctctctcttaaaacttcgaagcgatttttgatttacagactatggaaatggaatcattcatggacgaccttttgaacttctctgtaccggaagaggaagaagacgacgacgaacatacgcaaccaccgaggaatattactcgccggaaaactggattacggccaacagactccttcggtctctttaataccgacgaccttgtaagtcttcccaaaaaaaaataaaaaaaatcgcctacacatgtttgttattaaatggtccggtgtatagtagactcggccgagttgactcgccggttcacggcggttggggattgttgactcagccgggtcaaaagtttcgggtttcggaaaacgcgttttactttattgtgttattaaacgtgcacgtcataagtgggaacgtttcgccggttccttttttgtgttgttgttaaaagcgaagctccctttgatttttaacctttgggagatttgttcgggagtttttggagggtatattcggaattaaccattttttagtga

SEQ ID NO: 19269 - DNA, 357 bp, Arabidopsis thaliana columbia
tgtgaaagcttacgttggggcgagtttaccaagactatctagctcttcaccggtatcttcgtctatgactctacctgagatgtaaacagtgtaggatcgatctctatcccgtggaagacctctggcagtgagcaagcgcaggtctttctggtgaagctctcttccgttcacaaagactcttgtggttccgccagcgcaattctctggcattgggtaattgagctcttcaatgaaaggctgtaagaaaggaaggagtcacctttcgccagttttagtacacatactgacaaaaacgaaaagagattgacacatatgatttgttagctgatgttgaccggtaatattcccaggcagtga

SEQ ID NO: 19270 - DNA, 550 bp, Arabidopsis thaliana columbia
ctttatcttcttcacctttcgtaataaccatctccccatccgagcacggaggcgccggagaaatcatacgacggttgccagaatatagcgtaggtccaaccttcgtgtgttccttcaatcaaagcttgtaaacgttgctgaagagtctcttgattaaatcccgcctgtgccggaatctccatcgccggcgtcggagttgtttcagtcgtcgccgtcgtggttgtcgtcgacgccggacgcataaagttgagatatcggaagagctcatgaaagcttccatcatagaagcgttgtcgtcggtggtccaaagattcatcgttggttgtagccggtaatcagtcattccataaaccggtgaccggtaaaaaaaaacacgtttttaatgagagagagagagataggagaaagtcttcgtagtggagaaaaatggagagcgtctgcgattattatatgtgtaactgatcttgagggtgaatgtgtaaatttgttgttagggatattacgtggcgagatttcattgggaaacgtggatggttgtaagagagagaga

SEQ ID NO: 19271 - DNA, 574 bp, Arabidopsis thaliana columbia
gtcggctcttcctatcattgagaatcagaattcctctggtatttgtttgactactctccagaatcatgcgactagtctccagaattatgtgttcacgaatgggtgagatgattgatttgtttctactcgctctcatggccggattcattgcagtggcgtatgttttccgatcaaagcagaagaagaatttaccgccaaatcctgtaggttttccggtgatcggacacctccaccttctcaaagaacctgttcaccgttcccttcgtgacctctctcgaaacctcggcatcgacgtgtttattctccggctaggctctcgtcgagcggtggttgtaacgtcagcttcagctgcggaggagttcttatctcagcaaaacgatgttgttttcgccaacaggcctctcgctactttaactgaatacatgggttacaacaacacgctggttagcacagctccgtacggggagcattggcgcagactccgccgtttctgcgccgtagatatcttgtccacgctcgtctcagagacttttcggatatacggagagacgaagtgagagctatgattcggaag

SEQ ID NO: 19272 - DNA, 520 bp, Arabidopsis thaliana columbia
atgtgtaggtcgaaaagagggacactcatgtcaattctagacaaagacttgaatctgtattttgtgttgtagaaacttgaaatactttatacacaaatctagctttgtttcttgaaccaaatttgtattttgaagctacatttcaatgaatatatgtaaagagattactcatcaatctttcttgctaaagagttaacaacactagacataaacgtctcaaattatagatgtgaagcaacattgtttatggctcagagaaaggtaaaaagaaatagcctcaaaaaagtggagaaacagagatgttcgagaaaattgctaaccgaatcagaaatgaagcaacaaagacgaaccatcacaagtcttttgcaactcactaaaacctatgtagtgagttccataatggcggaaacaatatctccgttactctctttaagagccttaacagccttggcgctcgagacaccggcttgagtcatcacaagatcaatgtccttggcttcaacaccagtctcatcaacat

SEQ ID NO: 19273 - DNA, 545 bp, Arabidopsis thaliana columbia
ccagcacaaggtcatgtaactccgattatgcaactcgggaaggctctttactccaagggcttctccatcactgttgttctcacacagtataatcgagttagctcatccaaggacttctctgattttcatttcctcaccatcccaggcagcttgaccgagtctgatctcaaaaaccttggaccattcaagtttctcttcaagctcaatcaaatttgcgaggcaagcttcaagcaatgtattggtcaactattgcaggagcaaggtaatgatatcgcttgtgtcgtctacgatgagtacatgtacttctcccaagctgcagttaaagagtttcaacttcctagcgtcctcttcagcacgacaagtgctactgcctttgtctgtcgctctgttttgtctagagtcaacgcagagtcattcttgcttgacatgaaaggtactcaagattttttagcttgttaactcaaactttaaaagtgcatttaggtatataaaccaatccaaatgctgttgtctgctttgcagatcccaaagtgtcagacaaggaa

SEQ ID NO: 19274 - DNA, 1039 bp, Arabidopsis thaliana
attcatacaacagttttaacagaactttatatatacacgtcacttgtaagctgcgaaaaaaactaaataggagaatttaaaatggaggacagtgtaaaaagattcatgtaacgatccaacatttcttcataaaattctaacgtaaaaaacaatcatattgtgagatggttttagagaaagaaacaaagttccaaaagacacattcgttctcaaatcaaaggtactatgtaaccttaaataagaccaaaaagaaacaagaaagtccttttcaaggaagatcagatccagcagcaccaccaccgaaaccaccagctccacgaccaaacccttgcctagctccaccagctccaccctgtacataaccaaaacatttaattacacaccaacataattgcattgcattctagcaatcatgaaaccaccattactcatgatagaaagacctagtggcagagcatcgaatatttagggaagccaagtgcacaacagattaaagcaaagcaatttacacaaggtgcttatcagacagagttcataaaatgatttagggaacctaagaacacaacatgttgttgaaagatagtggcttcagaagtttcctcaaaattaagcatgatactaatgcgtaacaaataaaagtgttcacaagagtttgacaagaaaggagagatttggtaccctgaagccaggctggtaatcagcaggtgctccagccttgtcaccatactctccacctgatttaggacctccacggtatccatctctgtcaccaaacctcctctctccatcaccacgaggagggccactgtataaaaccaaatcaacaccgtcacatatcaacacttaacaagtaaccatgatacaataacaagactgagaattgaagattcaaattgattacgggggacggtcaccaccacctccaaaaggtcgaccaagaggcttctgttgcttcttcaaagtagcaggaacaatctcagatgggagattaaggtaagtcctgagaaagtcaataccttcatttgtgaggaacagtagt

SEQ ID NO: 19275 - DNA, 535 bp, Arabidopsis thaliana columbia
caggctagaggatccccgatccccctcagttaaaaccctgaaatacccaaaacatatattacttcttctgatttccgatctaaagactaatctcaagtaataacgagtgtaaaataaatggatagagctaggaaaaaaaaagctatacctgctcaactttgtgtatgtggttatcgtgatcacacctgtttcaaaggaaaggtctaagtttaaatgggacaaaaacaaatattaaaaagcgagtcaaatttaatacctctcctctgcttgtattgtagcaatatccgctcgcatcttttcaatatcggctcgcatttttcgaaactcttctgcaacacgagttgatttatactcctatacacaaaaaaagacaatgaagaacactaattaggttgaaaaaagaaacagatcttctagcattccttaagtgagaaaactaaatgagtatttatcacgtacgccatggagatacaacacaagatattaacaaagacatctatacttctggacacttgtcatcaacacaagatacctt

SEQ ID NO: 19276 - DNA, 613 bp, Arabidopsis thaliana
gaatccccgatttccgagcatctgcttcagggtcaatagtggaacaaagcagaatattctccggcttgatatcagtatgaataatagaaagttcacgatgaagataatccaaaccaactaagatatgaaaacagatctctttaaccatatgaagaggaacccctcggtaatcactgtacttgataaccgacaagaggttatctcccaaatactcaaaaaccatacaaacatgttgcccattaggaccagcatgcttgaaatgatcaagaagcttcacaacacacttcttatcttccgcatcgccttctgcaatctgtttcaatatctttatctcatccatggccgcttcagtgtagtgctgagcatcttctggattttcaaagctacgtatcgctacaaacaaatgaattcaaaggcaagattcaattctctaactacaagaacttcctcattctctaacaaagctagttcaatcacaacaatgcaattcaatatatactgcctaaaccctagctcaagccagttccttttccctactatctaaaaaccctaaaattgattctctgagaaacgaagcatagaagtgaaagtagtgacttacagagttgagagt

SEQ ID NO: 19277 - DNA, 584 bp, Arabidopsis thaliana columbia
gctggtgttcttgagtctaaagagagtgcaggtggacaaaaagctttgctcactgatactgcgttggagaatttcaaggagaaatgggaactgttccgtgtggcttgtgatcaagcagaggagtttgtggagtcagttaagcagagaattggatctgagtgtttagttgatgaggctactggtttaactactactgcagcaggtggccaagcaccagcagcggtgactggtgctgcgactagtctccctcccattagtgcagtaaggcttgaacagatgagtagagcggttcgatggcttgttcttgagctgcaacgtggctctggtgtagctcctggttctgttcattcatcctctaccgggtttgattctagattctctgaagactcgactcaatagcgtgcctagttagtgttaagttcgacaaccgcagctccataactctcgagtcagtcgttgtgatgggaagagtggcctaatcagtgttatgttctgttatttcatgggattgagccaagctagaagcaacactgggggtatcatttaggacttatgactcttactaaatattgggctttttattc

SEQ ID NO: 19278 - DNA, 558 bp, Arabidopsis thaliana columbia
tgtcacaaaagtatgaaaagactattttgtaattttattgaaactagattgatttcatatattacattattacaaagatccattcgtgtgaactacatacttaaattttgattgaggaaagagttgactttgacatttgagcaattgtgcacactcttggtctctagtagtaaacataagattcttcaaatgttttgaagattcaaatgagcgactaaattgcatacaagtagaaacacattaattgccatcacactagagaaatgtcactgtctcatttccaagcacacgaggcaaccaaatctcgatgcatccaaccaagatacaaagctccatctctttcttctagcctgtacttgtctgagtagttcctaagcagacttttaatggttgaattcaccaagggactcaacgggtaaggagtgaaaccgccatcccaaaccgtgacctccattttcctaggagctcgtgtcgcgtccaccgatcagctccttcacatgcgatgatgtcacgacatctcttgctagacaatgttgctcacattaatctctgtttgtg

SEQ ID NO: 19279 - DNA, 1588 bp, Arabidopsis thaliana
gatcttgttaagttcttcactttgtctataatcttgttaggttatttattgtgttctgtggtgaatcatgaacataattgtggaacatttgttgattgttgaacttagcatgttttcggctttgacattgaggatctgtctttgttctatacttgtctataatcttgttaagttctttattgtgttctgttgtgaatcatgaacttaattgtggaacatttgttgattgttgaacttagcatgttttcggcagactaccaatgaggatctgtctttgttctatacttgtttatacttgttctttactgtctatgatcttgttatgttgattattgtgttctgtgtgtgatcttgtcggcttatacttgtctagaatcttgtagaatctgcctttgttcaattatatagtctgttgtagttgtagtgttttggattttaaacatgtttactttctgtctgtgttgcatgtgtttggaggtttactcgcgacagaggatctaaattggttagaaagatcacacggatttttactcaaaagttcaatgctccctactataattggtcctgtgtgccattggataaaagagaaagattgtttttagagtttgcggtaagcttcttgtatttcttcaactttcattagactgtactatttaatctgtcatttgttcactaacttcacactttttttgtagaaaactcaccactgggatcccttaataacagggacagtccaatactacttcaatgagatcgttaagaggcgcttgaaggacatggttagcaccgcaaggagaactcgagagcagcctccatggattggagaaactctgtggggaaccatgtgcgactactgggacactgaagaggcacagaaaaggagtaagacatattccaaagctcgtctctctgaccgtaacggtctcggtcctcacgtccactactctgggccaaagtctttccaagaaatccaagatgaattggtaagtgtttctgcaatcttcccatgtgttttagtgatgttcgtttaactgtgtgtgatgtttagtctgttgatagtaatgaagcttgtgatctgtgtttgcaggaagaaaaaatgggaagacttgtccctcttggtgaggtgttcatccagacacacactaagtcggatgggacttatgttgatcagaaggcagagaagattgctctggcgtatgagcagaatgtgagagagaagctgtctgaactagaggcggctgcttctgttgtgtctgatggctcttcacgtcctcgggatctcacactagatgagtatgcagccatatttctcgaggtaagatgttctttgtctttttcagagtcttagagacatttaggatctgtcactaattatcttcctctttatttcttgcagtccacagaaaaggatgcaagaggcaatccttattgacttggctgtcttaaagaaactctaggcagtgcaaccgccaactccccggagactcaacctttaaagccttagaagaacggctgcaggaagctcagcggcaaattgaagaacaggctgcatataacgagaagcgagatgctgagattgctgcccgag

SEQ ID NO: 19280 - DNA, 2684 bp, Arabidopsis thaliana
gggtgattagaaatatattatagtgtccgttacattgataacataaacaatcatatcccatgagcaagattctcacaagcctttgcaatttacttaacatgaaacaatttagtaactagaaagatagttaccgaagaaaagttattagagagatatgtaagtggatagggacaaacaactaactaagagagatgaataaggaagcaaatgaaagcagctggtcttgtgactcgtcaaatcttgaaaaggaatcatatgaccaatcaattgaaactggttcttaaagggtagaattcaaaaatagaaaagatttttatttcatattgctcgaaagacaaagagaggcatgaccatttcaaacaaaaaactgaaatacagatgaaattaacaattatgaggatttagttttaattataattttagacatattatttacagaactcaataatccagcagtgataagcttggcaaacaaactggcaatgggagaagccagaagctgcagccaaagcttcaaactcagctcttgatctctcttttcctccggaacattgtgtgaacattaacatgtccatgtcaaaggcaatgtttgcgttgatgtctccattctctgcctcatcaggagtgactaattctataacaactactttaccgctttgtggtagtgatttccaacaattcttaagaatcttgacacaatcttcatcggtccaatcatgaagtatacgctataaaaacataataaaattagtataaagttctagctagcatgtatacacttccaaaacatataagtgataagttctattgagcttactttcaagatcatagcatctccggttgggacatccacaaacatatctccggcaacatgctccacaccgggatacgagggtgcttgtgccaaggcgcaagttagatcaaagttgatacccttaatattgggatatttagaagtaacaacaccaagagtgttaccaactccacctcccacatcaaccaacacattcacacctttgaagccttggtaaacttcaagagccttcttcaccaccgcgattgtgaatccagtctggttaaaaagcttgctgaatctctcatctgtacccatatagtcaaagagtttcatgccaccatgtgcacgcccaaacgcatctcctccttctagcaccacgtctttcagttgtgccctgaaattttcgtatagataaagtaagatttaataataaggattctaacattgacgacaaacagatttgttataaagatgatttgtgaaaattaccaggtattaaggaagacactgtcgaaattgacaatgacttgagaggcaagggatccaatatcctgaatgttattcttcaagaaaaacctgcaaattggctcagctcgatagaccctctccccctttcctacggagaccttctcacacttgaccatggaatagctagcgagtaaacgaagcatgcggtccaacaagaccggagccccagggttacggggtgtagttggtagcttacttgctatctcagagggtgaaaggaacgagtcagtgcgagaggcttccgcgtagagagtgtcaaagacaccgagctcgagggaagctttaagaaccattggaaaggcggcggcattggcaagtctcacggccatcaaacccaactcgttatcatcatcaacaacaattggggttttagggttagagcttaaggtttcttcgaaaaggtatcccatttctctttcttttttgttactttcttctccttcaaggcactctacgtgatcaaactgatcaaagtgaggaaatatgtatcgagagagagtatttgtttcttgtttgtagtgttgagatgatgagttagtatatttttgatgcatccttgtttctccttttatagttaaaggctttgatatttctctttattttataatattttcatataaattattgttggcttgccggtccacctcgggggctgactgagttagtagtctctgtgtagaaaaagggtaagagctatttttgacggctgaaatagctcaaacttgcctcacgttagtggatataccaaaagtcaatgttcaaaggagagattcactaatatttcatcactattactctattagtctgaccaagtgtctaaattagtatatctttttgtcgcagcttgaagagcatttatatttattacttaattaaccaataaaatcttctaagggtgccattcacagggacgtggatccgccactggccactcagagtcacgcataggtatcacttgatacgacgatcacgtcgaccaggactgggccaaggaaattgattctctcaattgttgttgctttgtcactttccttcaaattttacaaacaatttcttttatggaagaccgaagactaacaatagttgatttgttagatagttgagattttaagatttacatgtaaaataattttaatgacaaaactgtacgccgacgtatcataaaaagaaaatgattgggtgaaataacatgttacggttttgtcatatacgtttgagattaatattttttttgttaaagggtttctgtttgagattaatattgggtaatattagaggatgaccaaatttgacagcattattaagaaaatagcgttcgtgcagaaaagttgggtaaaagactttttgagcctgcaaaata

SEQ ID NO: 19281 - DNA, 1726 bp, Arabidopsis thaliana
tagcttgtccttgaatgatctgttgaataagttgtttaatttcaggatcttgagctgctagggcttgttgtggttgttgagtgaacgctggtggtggattctgctgttggtagcctccattaaactgttgtttagggacataaccttggttgtactgaacaaaaagcttagactgattttcttgtggtggatacacttgatcttgggggttagctacattagtgcttatgtaggagaagtttgggttgggcttgtagttgttgtagcccttgttgagccctccttggttctggatgtagcacaactgttcagtttgatcattccccacttcttgcatttggaagtgctcttcatcagtgatgtagtgtacctacttctgtcgagtcagcaacaacttgtctagcttttcattcagagccttgatatctttcctctatttatcctcactacctctagttcctctctctgagcgatcatagtcttcattgtagcacccattagattgtgctagatttttgactaactcccatccttctgcgacatccttgttcaggaagtttccatttgaggcaatgtcgagtagcattctgatttttggtaaagctcctctgtagatgctcagtaatgaagccttcttgaaaccgtgatggggacattgagtggtgtaggttttaaacctctcgcatgcttcacagaacgtttcattgatcgtcggaggaccatcgtcccggattctctgcgtttacgagatctaattcaagggttgcgggctgacctttcctctacccgaagcccttgtccgatatctagccgcccttgaaattgcgctgccccaactaacccccaactttctccgaaccattttagggctcatcaccgtagcggcggaggctgggtacattattggagttcccgaattgaacgagcttcttagtgttagtgttcatcaaagaaagtttgttatttctcggcatacccaaatgccaacaggaacctcacacaactcccgaacaaagacgaacactagcatcatacctggttcttcataaagaagacccctgcttcgattgggagcctttccgaagtgcttccatcgaaatggtccacgaaacctggtagaaattagggcagaaatatatttgccttttgtttgcttactcatttttccttaacccgaactgtttgttttaccttttgcagctttcattgctcttacccttccgaccgaagaatttatcgagctcttcaaagttgttatcgaaggcgaaaccctttggaattcgtttaccctcaaccggtttatcaaagctaactggaatctcagaatgagtccccctggacaactcaatcatcttccaccgcctcctcccatactccacgggacttcggcccgggctatcgcttcccggtgcaaaactttggctaagccgatggccaaggcttgtaaagcaaacaaatcgttcctcacgtccgtgattgacaagaaggaatacagcaggactctgctggttgatgatggcagtgccgaaggggccaaatctgtcggtgctttcagacctactcctcaccgtgaggtcgtcgcggtcgcttacctcgaagagatcgatctccctgtcgtaattctcctcggcctttctcccgaggtgggttgagcagcgaaccaattgctgacttgattcaaaagaagagagagagccagctcgtggtagtcttctctcggagggat

SEQ ID NO: 19282 - DNA, 1418 bp, Arabidopsis thaliana
aaacctcggtgttggtgcgattcccgcaccaggactaccagtaccaaccaaagattgccacgtggacaagagaggccctatagaagtaaggcccataggcttctttaggcgaggagaagaacacaagcgaagtggtcggtccgcgagatggatgtgatgacgggatcaaaggtgtctggattaaagagcctttaggccggaagcgaagcccatggagctcgaagtcaattcaaattcgaacgtttgaacaataaattcaaagaccgaaacagatacatttaagatagaataattgtgtgtaaatgagaattaagtgtaattcttaggtataaattatagggtcaaaggccatggaagacacacacatttttgtgcaaacttaccatacacattttcttacaaatctcatagttttcttcataatcaatagttctctacacttattttttgtcctcaagaataatctttctcactaaataaataaatacttgagtgtgtgaatccgacatccacattttagcgccgtctgtgggaacggaggattcttgagtcgtcagacttgtctatacactacatttccgaggtaagcaacaatggccggagaagacgctttcaacgcttcattagtcgaaactctcaaaaccatgcagcaaactatgacggacatgtcgcagaagttcacgaaaatgtggaaaaggctgttgaaacattgcaaacaaccctggtatcacttagtcaaaatgttagcactataacatcttacagtagtccagccggaagatggagaaaaacagctcgaagacgaatatcagttagtaaaccagcacgagcaggaaaatttcaaccagctcaaaaccatgaggaaagtgagccgggaattgaaagaaatgaggtcaaaattccatcaggccacaagttcggagccggatatcaaccgagtcatcgaagaagctaggcgaacacttttcatcccgcaaatcgcaagcttgagaatcaggaattctcgtaagctgaacctagaaccatacaacggtttggaggatccaaaaggttatcttgcagcctttctaatcgctgcaggttgggttgacttggatgaggctgaggaagatgcacggtactacaaactcttttctgaaattctgtgcggacaagcactaatgtggtttacccagctggaaccagggtcgatcagtaacttcaacgaattgtcagccgtattattgaaacaatattccatccttctggataaaagcatttcagataccgatctttgaaattttttacaagggccgaacgactcacttcgggcttttatcccaagttcaagaatgtactttcaaagctccaagaatctcgcagcaatcgggtttatcagccttcgaaaaggattgtgggatgatcaagattaaagagga

SEQ ID NO: 19283 - DNA, 1633 bp, Arabidopsis thaliana columbia
aacaaatataaagaatggtcgatttatcaaggtatagtacgggaaagagtctagaaggatcttgaatgttagcttgtttgatgagacccagcgatgaaagcctggtagatatagttgtggaacttaggtatggaatccagaatattgtgtaagcttgcagagaagtacatgttggttaggatttgattagaattgctagacatatggatttggttagaatgatcatggcaatagactagagaatgttgggagttcctttgttttcaaacctcttccacgggttcggcttttgtgttttgcttgagggcaagcaaaagctaagtctaggggagttgatataaccctatttttatcggcttttagctatgatttaggtataggttttagagtccttttgttatttctagagtcttttctagtctttttcaggtctttacatgtttgggatttatttggagataatgaagcagtttggagaaaaatagagaatttttactgctgaagaaatccggaaactaaaatatacgtaggtgtcgaacgacaccacctctggtgtcgagcgacaccaatacctgatggcagttcgaagacgcaacttattgatgttttaaagatttccaaatgcggcccagaagtttttcttatttctaaagaaggcacatcacgtattttaggtcatatatatagttttaaaggtcattgtttagacctaagctttgcagaggctattctcctcatctcttttgtactttgggagcaaaaacctgtggagactccctttggacaagatcttctttactctttcctgctattattgatttcttattcagactatgatttgtgtttctttggtcatgtctgagtcattcacttgttaggtttagggtttctcattagggattcatattgtttactagatcgtccttttgttaggttatatgtagaattcttcatctttaattattcttaatgctagatctagattgatcacctagaacttgaatccagacaatagatatgccaccataggtatctgtagttggatctattatttgatgagcctggtttataggtatgtaataagaatcggcctatctactaaggtgaacagttgaacttgtttagaatgcatgtctaggtataagatctcttgacactttgcggtcggttcgttcgattgcaggcaggcccgtctgccatctctatcgacaaactaggattatgatctcttaagtttctattgttttgttctagttaataactacgaaggcagaataaacaaattaatctaggttataggactaaccgataatctttctatactccgtttctcaacttacgcatgcaacaacgcagttcaatgcattaggatcggattcgctaagtactttatgtcttgtcactcaacttatgaagacaacaacacgaaggattggtaacactatgttcgagattaggtttactaggtcagagctctaaacctcttggatcagcgtttggtgatcaatctaaacccatgcattaagtaaaagatctccaaaataatctaagtgagaaagaaatacggacctaacaacctaatatgatttgaccataaatccgtttaaatcactcataaaacccacaaagagac

SEQ ID NO: 19284 - DNA, 999 bp, Arabidopsis thaliana
tccacaactactttatcccatccctaagaattctaagtcactactcagacaacatgctcaaagatataaacgcagataaacgataatattgcataagtaaagagataaagagtagagaaacaagatgacagatgaaatcaaatgcggaatctgaataacttggaaaaatctcgaattacaggttgcagaagcaaaaacggcgcagtagagtaaaatagaaaataaaactgaagcaaaaattcaatgtcgactggatgtcccaggacagaaccctaagacatctatttgtacaaaacgaaataaaatgatagtagacgggccaataacctaatcgctcggcccatagagagataatgggccgagatgggcttcgtgatccgatggaggtccaggccgcttccaaacactttgtcttctcctcttccctcccttgtgctcagcttttctggttgagtgcggatttgagtagactgtgaagatgtgatcgagtgtccggtcgagtgatgctgatggtggtgagtgatgatactcgaccagggggtcgagtaacttggtagagtgattggtcgagtgttatcaggtggtgtggcgaagtgatactcgaccagggggtcgagtagtgtcatcgagtggcctgagctgaggttactcgacctgggggtcgagtatgtgggaagaatggctccaaagtcactcgacctgggggtcgagtatgtcttctggttctggctcgtttcttccaatttgcttgcaaacagctccaaatcacctgaaaacaactcagaaatgcaatatgtatgcaaagctatcctaatcatgcaaagtatgcaagcatgatgagaaatgatataaaacagtgatgaatgatacgaaactggactcaaaacgatgatgaatggacactgaaaatatgcaaattatagacatatcaactcccccaaacttagtctttgtttgccctcaagcaaataagaagacatagttgaaggagaggagtga

SEQ ID NO: 19285 - DNA, 1918 bp, Arabidopsis thaliana
atcttctcctcccaaagtcacattcttgtgctgtactacaagcgagttctctatcagctgggaacgtgtattgagttaccattgctcgctgcatctagagccatctggtattttgataacaggtttttaagtcagttatcctaaaacaccaatcatgtcgttgtagtattttagcttgtcaatccaaatgggtgtgatgctaacaatcaagatgtgatcagaagtcactaagtcaagccaagcaataacaggttgtggtgtgttctagcagttctaagtgaacatgcagaaaagagaatttcaagcagaaacagtaaaacactcgaccaacacagctctttgcagagcactgggtgaggtcgagtgacaggtcgagtaacagacagaaaaataaaacacagatactcgactgcacagtctgttgccagacaactgagtggtcgagtatgaggtcgagtaacaagaaagaactgctgaaattaaacgacagataacaagatgcagtaaacaacagtagagtaaacaaagaattcaatcagataaagaattcccgaggatggggtaattgagtagttttgtttcctcagtttacaggtgattgacatgctcaataaattaaccctagacaacaagttcattaaccaaatctaagtgccacctcaacagagaccctccagttaacgtagtcccagactcaatcaccattgacgagagctaacctaacaggcattacgaatcaacaagttaaagccaaaacgctccctacaaccaataccttggtacagggccacgaatctctggaattagtggttcagacatttcatcgaacaccttttgggcgcgaaaatatatgggctcaaattcaagttgatcagaaagcaataggcattaagaacaactaatccagaagggatttataaatcaaactcaaccacctcgcatactgagaattctaaactactcttacccatcctcagaaacttattcactactcagacatcattgcagaaagcataaacgttgaatagaatgaaaacatgataacaaaagagtaatagcaaggtgataacaggatgaacaacagtaaacgaaatcaagaacaaaatactgaatactgaatagattaagagaaaaatccggattacaaaaggtcaagaacacagtgtctacagaataaaacttagatttacgaaaattgtaaagtacatgctacttatagcaaaatattctaaaaccctaatactcaaaacgacgcagtattgggacggattaagaactgtactcgacccatgtggtcgagtgaggggtcgagtgataagatggagtcttcttttcttccttgtactcgaatgtctgattgagtgcggaatggagaagactttgaagctggcactcgagtatgtagtcgagtgatagagatggtggtactcggcttggtgttagagcgaacgagtgaaggtgatggaggtactcgaccaggtggtcaagttgggtgatcgagtgatggtcaagtggtggagatgatgatactcgaccatgggattgagtggatgtgatcgagtgactctcatggtggtactcgaccagggggtcgagtggtgacgtgaagtgatgaggtcttctactcgaccagggggttgagtggtttgttaaagtcgtggaaccatctactcgcaagggggtcgagtgttttgttgtgatcaggtccgcttcttccaattagcttgccaacagctccaaatcacctgaaaacaacacaaatatgcaacatgcatgcaaaactatcctaaacatgcaaagtgatgacaaatgatgagaaatgatataaaacagtgttgatatgatgctaaagtgatgacaaatggatgctcaaaacatgtaaaatgtacacttatcagctgtaactagtatttcgaca

SEQ ID NO: 19286 - DNA, 1731 bp, Arabidopsis thaliana
tctcatcattatcccctatgcatatgcaacagtcctaaatgaacactctagactcgatcctaaaatgtaatgcaactacatgaacagtctggttttgtgaaattattttctgaaatttttcaaattttgtttggtgtttctatgcattagatgaatgcagactcaagagtatatacaatgtaatacacacttcctgagccctcccccaaacttaaatcacacagtccattgtgtgactaaacttggaagagagtactcaggacaaaacaaaacacagaaacaaccattgcgaactccaggaattcgcaatgatatagatgctcgatatccattgcccaaggctcaagtccatcagatgtgattgggactccacaagcgatcagaatcggtgtcacaacaccgcctatgcaaagaacgccttgtgctctcttgtggttattgctgacagcccaaatcttgtatccacataggtggatcagaagaagtacaaagagaggtgtgtcattggtttcaccttgaagagacataccattcttggtttggcggagagtgcctttgggagccatagcaatcatttccatatcagaattagtaacagtccctgttatctctagggagtagagaacattggctatagaacgctggaagtacctgatgaccagactgcgtatctgagtgctcttggatctagaagaatttagcggtacagagctgccaatggtgatccataagtctttcaactcttctctgtcatacttgggcttagtacccgttccacttgggaaccaaacaatccttccaagcgtttgattgatagcctataatccttaccatacacagagaatcgcaagaatctcaatccttcgcattccaaatcatcagaggtcataccttggtaaagctccacttgcagtgtggagaggaactgaatcgtttcttcttcatagggtacatatgggtaagccatcagagtgtcctggtgacaactctggtacaggtgttgaacatcctccagtaatccatgttgtgccagtgtggtcgagcacggataccttgtgctacagaactcattcagcttgaagagcttgatatactcctcagcaggcaatatatcaggtttgtgcagaagtttggtggctatgcgagtatgctcaggcatatactcttcttctagatcctcatctatcagctcatacctctctatcattgctctcttccctcgagctatctcaacttttctcctgaagttatcatattctctctgttctctttctggccttgaagacgattactccgtctcatccatgttatagtctggatcaattgaagaactgccactatagttactcatgattcttctgcaaaagatttagaactcaaaactcaaatgtcaataggttagtttcaaagaaaacaatgaaaccaaaatcgttatcaacagaaaatgaaatagaccaagttggtcgagtacagtctagtactcgagtaaacagaggcgttcccgagttcttcgtttacgttttaacctagtagagcagaacagggtcgtgtacagccggtgaaatcggtcgagtagagtcgttggaatcgagtagctcttcccgacgaatgctccaagggtcgagtagatcctcaggaaaccagaattaacgtcttgagtcttgaatcgttggtcgagtctcaggacgaagtcgagtggttggctgcaggaggtcgagtgctttacggtga

SEQ ID NO: 19287 - DNA, 2369 bp, Arabidopsis thaliana
cgggtaaaccttgaataccacttagacacaataacctcatgcagtactaaatataaatagtttaccacaccccaaacaagtataacacaatcaagtaccaaatcacgtatttatatatatatatatatacataatatagcaaggacttattcacaacctcatcgcatatctcatataagtataacaatctaacaaggcaagtaagccctcgaatcaaatttcaattcatcaagtaaacttagttaagtccaaattcacttagcctagtcatgcaccagtctactccattccttaatgatattaactatcaagttcttcaaatacccatcattttaagattcaagttctaacttagactgaattctgattagttaagtctaagtgagtaagcatgcatatgattgataagtgtgtattttgcatgttttgagcatccatttgtcatcattttagcatcatatcatcactgttttataccatttcacatcatctgtcatcactttgcatgtttaggatagttttgcatgcatgttgcatatttgtgttgttttcaggtgattttgagctgtcgatgagctaactgaaagaagcggacctgatcatgacaaaccactcgacctagaggtcaagtaggagcttcaagatctcaagagaccactcgacccccaggtcgagtagaagacaccaccactctatcacatcactcgacccccaagtcgagtttcttcatctccatctcttgaccaccactcgatcacctcactcgacccccagggtcgagtgacttcatctccatcttctgaccatcactcgatcacatcacttgacccccaggtcgagtgacgtcatcccattgccagacatctacacgacctcgtcactctacctggaactcgagtatcaccatcaccaccactcgactgcatactcgatgaaaagcttcagagccttcttcattccgcactcaaccagacactcgagcacaaggaagagaaaaagactccagctattcactcgacctcccactcgaccacatgggtcgagtacagttcttaatccgtcccaatacttcgtcgttttaagtattagggtttcgtaatatttggctataagtagcatgtacttcacattttcgcagagaagttttttatctagttttatttccgcagaccttgtgttctagaccttttgtaatccagatttctctttatctattcagtattcagtattcagcttttgttcttgatttcggttactgttgttcattctgttatcatcctgtacactgttgttatcatgttttcaacttgttcaacgtttatgctttcgtttatgatgtctgagtagtgaatagatttctgaggatgggttagagtagtgtagaattctcagtatgctaggtgattgagtattgattgatagatcccttctggattagttgttcttaatgcctattgctttctgatcaactggaatttgagcccagacatttctgcgcccaaaaagtgttcgatgaaatgtctgaaccaataattccagagattcgtgaccatgtaccaaggtattggttgcagggagcgttttggctttaacttgttgattcgtaatgcctgttaggttagctctcgtcaatggtgattgagtctgggactaggttaacttgagagtctctgttgcggtggcacttagatttggttaatgaacttgttgtctagggttaatttattgagcatgtcaatcacctgtaaactgaggaaacgaaactactcaattaaaccatcctcgggaattctttatctgattgaattctttgtttactctactgttgtttactgcatcttgtcatctgttgcttagtttctgcaattctttactgttactcgacctgatactcgaccacccagttgtctggcaacagactgtgcagtcgatcccatgtctatctttgtacaaatctttatttttccttgatttttttgatgcatttggttagtaccttcaggagataagtataaaaagctgagtgaagtggattttggctttgagagtacatcactatactcgaccacagagcaatgaaaaatactcaaccatgttttagcttatccacgcgaggagatcactcaaccgcggtgctggccgcagcaaaagaagggaggtcgagtatccttagagcggtgctggccgcagcaaaagaagggaggtcgagtatccttagagcggtgctggccaccacagagctgatgaggtcgagtatccacctgctggagcttatacagaacagggcggcttgtctatggcctgggagcaatcacagcagccattgacgaccaactccattcattcttcgactgaggtaagcgcctcgg

SEQ ID NO: 19288 - DNA, 549 bp, Arabidopsis thaliana columbia
tcgactctagaagtttttgcacgttgaaactttagtagaccgtcatttagagtagaaattttttggtaatgattaagtagaggtaggagggttctagttatgtgttttatgatatcttaaagtttttgttttgtgattcgccaaccattggtgcagattaaccattgttgaggatctaactaaggcaacgatgaagaaattaactcagggaatgactgagcacaacaaagccatgtcggctgctaagacagatgaagagaaagcgagtattgtaagtacattaacctgtgctattttctatttttcctagtgctatttgctttcagtactaatgctcctatgtgaattttttatttcagaaaacaaagaggcagaatactacaactggacttaggacctgtaataacatattggcgatgacaaaggtgaacattccaacatcttgttttccccctttttgtcctttctttggtcgaagcatatagttatgatgatataaactaaacttggagttaattttgatatgaaacagccattgcatgcaaaagt

SEQ ID NO: 19289 - DNA, 445 bp, Arabidopsis thaliana columbia
ggggatcctctagtaacggttcaagaacaagcgtgtgcttatggagagcatccacaagatgaaggctgagaaggctagagagaagactctcgctgaccagtttgaggccaagcgtattaagaacaaggctagcagggagagaaagtttgccagaagagaggagagattagctcaggtgagaagaaatttacaggccatttatggctctctgtcattttagttttggcgttccctcattaataatactgttggcaattctagggacctggaggtggagagacaacgactcctgctggcgcacctcagcaaccagagtaagaaactttgttctacgtctctttcgctttgtccggttttggggattgaagtttcctagatttatgttgggatattgtagtgtgctcaggcgtaccaagaagaagtcgaagaagtgatgtggtgttga

SEQ ID NO: 19290 - DNA, 515 bp, Arabidopsis thaliana columbia
cgctagtgctagcaccggagttacctaacggctcttccacagaaactgcagctacaaatttctgtttcccatgtacttccttaacaactacatcatcttcctctaaatccggaacacccaattcatctcttaactctctcgtatcacgactaggagtatacggagtataatacgtatcaaaagggtctaagaaatcccaaaccttttccctcggcggcgacggtggcggcggaggcaatttcgatccgtagttcgaattcagatatggattatactcagaggttgatgatgatgatgattcaccgaaatgaactctctgaggactcgaaggtctctgctcataaaccaaagaaggaggcatataactattcttcatataattcatatgcaaatacgatttcggattcgagtcatcatcttctagatgatgatggagaggagatgaatgcaacgagtcaatatcatcatcgtcgtcagagtcagaatccgaatcgaaatcgagatgaccgacccag

SEQ ID NO: 19291 - DNA, 576 bp, Arabidopsis thaliana
caccaacagttggtgaggcttgcagaagtatgggagcattttcaggaagccacagggtctctacatcagtttgaacgagaagtgtgttttaaaatctctttaaccaggtcggttccattttgtttctttaaactaatgtgaatggatgttctttaggggcaagattcttgaagttttgaagaactggccccagagaggaatccaagttattgttgttactgatggtgagcggattctcggtctgggagatcttggttgccaggtaataaataagttcttgagttacacttgaaacttaaacattttgtgttgaaagttcacatctatcatctgtttgaacgatttcaatattttccagggaatgggaattccagtggggaaactttctctttacaccgctttgggaggaatccgtccatcagctgtaagcactagaacaaaagctgctctagaaattggttctacttgattgataactcaataactgttttgatctaaatgaaaatcggctttcaaatgcagtgtcttccaatcaccattgatgtgggtcaaacaatgagaagttgctaaatgatg

SEQ ID NO: 19292 - DNA, 515 bp, Arabidopsis thaliana columbia
  unsure (1)..(515): unsure at all n locations
nnnnnnnnnnnnnnnnnnnnnnnctaaagtgaattgtcagcactgtgtttgcgaagaggatgcgaaataaatgaacccggttgatcgtccactattagatattggcttaacgcgattagaattcttgcgtatatcaggaaaaggccttgctggtctaacaattgcccctgcgttactgtcacttttgggttgcaaacaggaagatattgatagcggcacagtagggttgataaatacccccaaaggggtgctggtgacccagcgagcgcgatgcacgggttgccaccgctgtgaaatctcttgtaccaacttcaacgatggctcagtagggacattcttctcccgtatcaaaatccatcgcaattatttctttggcgacaacggggttggctctggcggcggcctgtatggcgatctcaactataccgcggacacctgccgtcaatgcaaagagccgcaatgcatgaacgtctgcccgattggtgcgattacctggcagcagaaagaaggctgta

SEQ ID NO: 19293 - DNA, 566 bp, Arabidopsis thaliana columbia
agtaacgtccgccagtgtgctttaaagctgatgcggatgttggcgggattactgaaacccgacagcggcagtgccacggtgattggctttgatccgatcaaaaacgacggcgcgctgcacgccgtgctcggttatatgccgcagaaatttggtctgtatgaagatctcacggtgatggagaacctcaatctgtacgcggatttgcgcacgtcaccggcgaggcacgtaagcaaacttttgctcgcctgctggagtttacgtcttcttgggccgtttaccggacgcctggcgggcaagctctccggtgggatgaaacaaaaactcggtctggcctgtaccctggtgggcgaaccgaaagtgttgctgctcgatgaacccggcgtcggcgttgaccctatctcacggcgcgaactgtggcagatggtgcatgagctggcgggcgaagggatgttaatcctctggagtacctcgtatctcgacgaagccgagcagtgccgtgacgtgttactgatgaacgaaggcgagttgctgtatcagggagaccaaaagccctgacacaaaccatg

SEQ ID NO: 19294 - DNA, 524 bp, Arabidopsis thaliana columbia
gaggatcacgatcccctacctaaacccaaatcttggagagattgtaacaataaagtttatacctttaagagctcgttcttctccagcgtctctacgaaggacaagacgactgaatccgtaacgccagacttgcctacaagttgagatttcagtttgtcacccaaatgatgtgcgtaagaagcaagctttctcttctctttcgcagacaactccaaagccgagcttcttcggttttctctcatggacaccattgtaagttccgacccatcttcttggccatcatcgttaatctcgttaagagaggctactaaggacacgttgtcttcgtcttgttctgattcatcaacagaagagaaggatttaggtacgaggagaggagagaagctgatataaggacgtggaagaggtaaagaagaggagatcacgcatgatgactggatttacggcctaatagagacacggaaaagggtctgaggaacagacagacaggagatgttggtttgcgatgtcggagaagatggtgg

SEQ ID NO: 19295 - DNA, 408 bp, Arabidopsis thaliana columbia
ccccatgaccaaatatcaacaactcacctccaagagaatgtactctttcccagttactactttcaaaattcatcttgaagatgtaaaacaagcgtgagttttgtaaccgtttaatgctcacagcgatcaaaacatccattgagttcgtaatcgcaatcctcgtcttcccaccgtattccccaagttggttatcaaagcaaaacggatggtcacggtacgggtttccttggacgatttcttttgggaaagctccagagaaatcaagtcttgatgtagctatcaattgtatacacataaagcttatcgtctttataagtcatgtgtgtacaatatatgtcttcaacattccaccagtaatcatcttcattcatgtatgtgacaaacagttttcatcggtaatacaagcta

SEQ ID NO: 19296 - DNA, 490 bp, Arabidopsis thaliana columbia
tgatcctgcaaattggaaaaaacaaaacaaacctgtgctcaaggaattcaatgcagcgtgtgcaagatattttctcccttctaagttcaaatttttcctttgaggaccatcatttcccaacattgcttttacaagtgatgcatccttggcttctactgctaaatacaagggagatattccgtctttacatgcaagaaaggaagcttgtcggtttgcattcaccaaacagagagcaacctccgtatagtgtcctttcaaggccaagttcagagcagtatctccatttatgtccttcagaagatatggattcagtatctccctatcttcttcagccagtctagctgagaaaaatgtaaccgacgcaacaagatcctcaacaacagctaagtgacccattcgagctgccacatgaagtggaagctggtccttagagtttgactccattagaaaggcagacattcagagacaatggtcttaactagttctagat

SEQ ID NO: 19297 - DNA, 564 bp, Arabidopsis thaliana columbia
  unsure (1)..(564): unsure at all n locations
nnnnnnnnnnnnnnnnnnnnnnntaaaggagagcgaactgttcggttatgttaaaggtgcatttactggcgcttctgccaacggtaaaacagggttgattcaggcggcgaatacgggcacgctgtttctcgatgaaataggtgatatgccattaatgttgcaggctaaattactgcgcgctattgaggcacgtgaaattctgccgattggtgccagtagcccaatacaagtcgacattcgcatcatttctgcaactaatcagaatttggcccagttcattgccgaagtaaattccgcgaagatctcttctaccgacttaatgttatcccgataactctgccaccgctgcgtgaacgtcaggaagatattgaactattggtgcattactttttacatctgcatacccgtcgtctgggatcggtttatcctggcattgctcccgatgtcgtcgaaatattgcgtacgatcngttggcccggaaacctgcgcgagttaagcaatttgatggaatatctggttaacgtggtccttcaggtgaagttatcgcagcacgctattctttag

SEQ ID NO: 19298 - DNA, 573 bp, Arabidopsis thaliana columbia
atatccctaacatgtttttcattatatttaggacaccacaatttatacgtagggaatatctagcaatcaaagattgcatcgaagtgctaggcaatagcgtggaccggttagctcaatcggttaaggaacttgctcgagctggtcatgctgtcgctagtgaggacttcatgtggaaaatgagtaacgttcaaacatgggtcagtgccgctttgacggacgagacaacgtgtctagatggattctcagaacgagccatgggaggcaaagtcaaaagactgattcggtataaggtggttcacgtggctcaagtcactagcaatgctcttgctttggttaatcagtttgcagagaagcgaagtgtgaagtttccttaaatggacttaaatgtgaaaattttggcttgtaagtgagagtttgaatctaaacttcaattagttgtgtaaattgttatctttttttttcgtcggtcggaaagtaaactcaagattgtgtacaatctttgttgtgcctgtataatattgtattttaagataatgatatatagtcaccttttttgggtgtaaattatagata

SEQ ID NO: 19299 - DNA, 801 bp, Arabidopsis thaliana
agaggatttttttggatgagattcacttgcttggagccgacagaggaccgattcttgaggtagaagcttaataactattatatcccattttctaagtacttacgctaagctccatctattggttagaagtttccagttatatcatgacacatgcaatgtatctatggtcttggtgaagagcttatatcttttcggctcaggttttttcaaagttatgtgttccaccagatttatttttgatctacatttggtttccaggttattgtatctaggatgagatatatatcatcacagacagagcgctccgtccggtttgttgggctttctacagctctggcaaatgcagggttcgtattttaacttctcagactctttgaatatgctcttttctatgtattatcattaaacacgcaactgaatgttcgagctggtagactgttattcgtgtcttttctgtgctgatgacattgtgcttatagtgtgatttgtgagtgaaagactttcaactttagtcttatttactagaaaatgttaatgtggaagatggcttaagatataccttactcccaatttttctggtagccagttttacttattctctcaagtctcccttttcagtgatttggctgactggttgggtgttggggagatcggacttttcaattttaaaccaagcgtcatgcctgtacccattgaagttcatattcaggtaagtcaatatcttttctctagtttgcaaacaattaatacctttcttaaactaaaaattgatgtatgtctcctacactgtacttgactacg

SEQ ID NO: 19300 - DNA, 764 bp, Arabidopsis thaliana
cctttataaatacgtattgataatttgttacactagttgtgaattgagtttcttggttctttcattaattttgatttggttttgtagcctacgaattcgaatcatcagcatcatcttcaacaccagcttaacgaaaatggaagtataataagtggccacggactagtactctctcaccaacttccacctctccaagcaaaccctaaccctaaccaccaccatgtcgctacctctgctggtcttccgtcaaggatgggtggatcgatggcggagagagcaaggcaggccaacattcctccactagcgggacccctaaagtgtcctcgatgcgactccagcaacactaagttctgttactacaacaactataacctcactcagcctcgtcacttctgcaaaggttgccgtcgctactggacacaagggggcgccctgagaaacgtccctgtaggtggaggctgccggaggaataacaagaagggcaaaaatggaaatttaaaatcttcttcttcttcgtccaaacagtcttcctcggtcaacgctcaaagtcctagctcaggacagctaaggacaaatcatcagttccctttttcaccaactctttacaatctcactcaactcggaggtattggtttgaacttagccgctactaatggcaacaaccaagctcaccagatcggttccagtttgatgatgagcgatctagggtttctcgattcagccctttcttcaactccgatgccctcccctaaatctcctctaga

SEQ ID NO: 19301 - DNA, 964 bp, Arabidopsis thaliana
actaagaattctaaactcttttttcatcgagtcaaattcacagtataaattggaaaagcaaatataatactcacagtcccgtgccaatctccccgatacacttctccataagatcctgtatcaaaagaagtaaagtagttaattatttgaagatgtagttacaccaaagcagataacagatgatgataagtcaggtaccaagtccaatacgttctcccacagtaatttcttcccacaaaatctcacagtcagatacatcatcacagtctgacttagaactttcattgccaatagatttgtcagatattctttcccctcctgaatttggcccatgattagagtccccactaccttgaggctcatgcccaccagaaccatcatccccgtcgctattcgagcctaattcaagttgcctggacacggctgcagctgttgccacaactgcagcagcagtggccgtggcagcagctgcagcaggaagttctatgggggaggagtctgagtttgcagacttggcagcagcagcagcaaccatggaagatgcaacaacagcagctgcagctacagcagcagggacggttctggcatattctgtcgaagatgcttcagaatgtgaagaatcagactgacttacaactttgccattatcacgttgatcatgtgcatttgttttagattgcactcttggtaatggaggcaaaaacctcactggaccaaaaccgttttggtgtcttccttcctgagttgtctctaaatcttttcctctctctttcttggcttcagtcgagtttttgctttcaacagttgcctccaattgctggggatagacttcggaaaataaattgggaggagctacaactccgctttcaagtaatacatcatgaagcttctgagctaaccgtggattctctttagcagcatcaatcatatattgtgaaacatctttgactttcatcctttgtgc

SEQ ID NO: 19302 - DNA, 581 bp, Arabidopsis thaliana columbia
ccaaggttgcggtgaaacacaataacttcgaagatcgaatcgacccaatgccttgcggtgtttcacctacggagaacatgatcatctaatgacggcatgcccgcaaaagaacacacgtggtttattaattgaagaagtaaaatggcatgacagtggtgatggtgtcgacgagtttgaggaaagtgcagagcttcaagaagatcgtaatgaaggggataccgggaatttgttagtagcgcggatgtgtttggctcccatggctagtgaagatccttggttacgtactaacatctttcaatctacatgtacaataaaatgaaaagtctgtcgttatgtgatcgatgcgggaagccgccgtaatgttgtgtcggaggaagcttgtcgcaaattgggactatcacgggaaaaccatccagcaccttgcacattgacttggttgaaagaaaggacagagatacgcattagtcaacgtggcttggttcctttttctattggtcaatattacaaatataaaatcttttgcgatgttgttcctatggatgtcagtcaccttcttttggggcgccttggcaatacgacca

SEQ ID NO: 19303 - DNA, 705 bp, Arabidopsis thaliana
tcggttcaataatcaaagaaacaataaaaacataaaataaatctcgatctaaaattctcaatatcctgaagggaaccctccttttcgaggatcactaactgccacaagctcacttcttccaccggagttctcaccggattcttgaactatgaactgagcaatcgtccctccggcaataggagataggacatgacctttcttctccaacacaactcttgttgctttaggaatctcgaaatgatcattgaatactgttgtccagttctcgtacgaagctctgtttggtatcagctgaaaatgacattaccaatcgcaaattttagttacgaaacaaaaaggtaagcttttttattgtgtacaagtaataataacgtaacaaacctgatggtagattcttggagctaagacggaagaaagaggatccatcttgaggaaaaaatgattcaagtaaacttccgttgtcccggcaataatgttggctcctccgctcgcacccacagcggctttcactttaccgtcctaagtaaacaaaagaggagataactatcttttatatccctaattaagagtttcgtgtatcacaagtaatagggtttttccccttaccttgagtacaatggtgggtgacatagaggacaaaggtcgttttccaggacggatgaagttagctggtgctggtggtggaacatctaagttaccgttaga

SEQ ID NO: 19304 - DNA, 587 bp, Arabidopsis thaliana columbia
tctctggcatttgcgttaggcagcattatcattatctatttagtaattatttcaatcaggtggcttcttcaataatggataatgtcttctaatatcatgtttttttcccttcgatttacaggtttgttggggtaggagctcgccgtgtgagatccttgtttcaggcagccaagaagaaggtatgactcaacttgtcactgcttatcagctattttaaaagagtttggttgattaggctaccatgaatgaacttttatatttaatgacgatcatgtgttacaggcaccttgtattattttcattgacgaaattgatgctgttggatccacaagaaaacaatgggaagggcatacaaagaagacattgcatcaactacttgttgaaatggatggttttgagcagaatgaggtacttgttgattaggagtagtgtatcttgtgattacttccgctagtttgcaggaatataatagtactttgctttctattttggttatgcagggaataatagttatggctgcaacaaacttgcctgatatacttgatccagctctgacaagaccgggtagatttgatagacatgtaagt

SEQ ID NO: 19305 - DNA, 1370 bp, Arabidopsis thaliana
gcataaaacttgaaaatttggaaataacatgattcattattatatgaaagaaatcatcaactgttagtacaaaccaagaactgagagaatgattgatccaaagaagagagaactttgcttctaacaagccttcgtgtatatttgatagaagacaaaaatctgtttctatctctaaagaaaagagctgctgatgactttccatcacatcttacatttgtaataaacactaggaaggactactcagcagaagcttcatttgttcttgctcatgctccattttaataacacctgcaatgtcaaaacctaaagcttaagcatatgaagcaaacacgaatcatacagatgctagaatacctactaaaagtgtttatagaccaagcaatttcacatgtttcccaatagactacaaaagctattctaattgctcttgctctgtacatttcgacaagaaacttcaaaggcccttcatgaaactcaacgtcaagctcagaactttactccccttacaaaaacaaagcaagcaactttatgcaattccagaatcaaattaatgttcatttccaattctcaaacctaataagcactaacaattcaacaccaagctcacacaatctcaaagcttgtttattcccataatcaaacaaactaaagctagctaatccatctgcttaggagcaatcgaaagtatagaggtacctaaaaatggtcactccatagcaactttagctccaacagccttcaacttctcaatgatcttctctgcttctccttactaactccttcttcaacaatgttggagctttctccaccaaatctttcgcttccttcaaccccaatgccgtaatcgttctcacttctttaatcacctttatcttcgacactgcatcgtacgcttgaagcatcacatcaaacgcagtctttgcttccttcttcttctctttcccttctccgccggcggatttactagctccagatcccggtaatgacatccctggcatcatcgccgccatcacaggcaattcactgatgtttagcttctgcctaaggatctcagtaagatccattgtttccaaaagagtgagattcgatagctcattgacgattttggacacgttctccgattgcgtcgccggagatgagtagctccgagattggatcgtgaataattgaacggaacttgagcgtgtctcggtggattttcaaaactcgtgagaagtgagaggagatgattcgcagattcctcatagttttcactctctatcgaattgatcttagcttcgttgagaattcatgtcagtgcatctgaagctgaaatgtgagaagaaagcataaaccctaactagtgggatgtgaaatgggcctttatgggc

SEQ ID NO: 19306 - DNA, 701 bp, Arabidopsis thaliana
aaagccggaagatccatgtcccacaggtcgtggtgaacggtctggtagctccacgccagtttcccggtagtggcattcagcgccagaatcgagctggcataacgttcctgttccggtgtgcggttaccgccccagatatccggcgtggtcacgcccatcggcagatagaccagatccagcttcgcgtcataggccgctggtgcccaggagtttggcgagttaaaggtaaaggtgtgttcgtcagacgggattgcgttcggatctttcgcgccgggatcaaaagcccacagcagctccccggtgttgacatcaaaaccacggatcacgccagacgtttcgcgggttgagaagttatcggtaactgaaccggccatcacgatggttttatcggtgataatcggtggcgaagtcggttcatacagacccggtttggtgtctggcatattgctttgcagattgagcacgcctttattggcgaaggtttcgcacagtttgccgttttcagcgttaatcgcaatcagtcgaccatcattgaccggaagaatgatacgacgcgggcaatccgccatcacttccggcgaacgggtttctgctttggcttcatgataagagacccacggcaggttacgtgctggaaagactcgttggtttcagctcaggatcgtaatgccatttctctttgccgctggggatcaaagcgc

SEQ ID NO: 19307 - DNA, 996 bp, Arabidopsis thaliana
catcctttgtaaggttcgactagctgcgttccatctactacaactaccttcctcatatatatcagacctttgatagaagccccaagagagacaaagacatacttgaagcgctgcttaccatcatcttctggtgtatagtgtaggtgtgttattgtacccggattagctaattggagaagatacagataggtcggcaaaaacctgtaatttgctatctcatccccccttacattttccactgcaacctcttttgctctccaagcggtagaatatgaaatccgcacattcagatcatttaggagcagctgtggtaaatcgacagctcgcggcccaccctacgtagaactgtatctgctcctcacaacttccccgaggagcttataattagcatgtttaatgtagttcttccgagagtcgatgttacacgtatgtgtcgtagcatacgaagtgattttgaaactttctgaatccttcacgatgcaagcagtcaattgccatggacaagtctcatcaacgcacaccatctttaatgttttaggacatgacttaggttgcttgaagcaaaagcattgctttatcgcttgaagagacattgtttgttgcaggacttttctattcttaaaaacacttccaacaaacaaagtttcgcctgtggtgctgatttcaacctgtgtctcatcagctcgaaaattgagtaagtcatcgaacacaggagcagcatcgttaccgagattcgccaactcgccaccatgtaacttaggaaattcattatacacttggtaagcctcagctgcggtaactaccccattatcattctgtgtcccagttgaggaagctccaataccgtcgatcacttcatccccggtaacttcgtctatacaaataagattggaatccttttgcccttcgcagcgtgtaccgtaacccaatggaaaaattgtttcttcgccaggtacactaagatcagtgtacgtacacgtttccaagagacgactg

SEQ ID NO: 19308 - DNA, 1215 bp, Arabidopsis thaliana
gcgctctaggctttgagttttctggtctcccacttgtgaaggaggtgtgatccctcgttcgatgtaatcgatgattgggattctccagtcattgcacggttcaggttcgtacgaggcaggttgttcgggggatccgagctccggctcttcctccgctgctcctgcctccgcggctgctgcaagggctctagccgcggtggtggtacttcgggttactcgcgtaaagttgcaagttgccgaggtttctgtcccagcgtgtttgaccgttaggtcgatgctcgggtgttctattcattcgatcgggataatctttttgacgaaaggatctgacgtggaggcgagagtgccaaggcgtctgtagaggtgttttctcctctggggatcctggtcagttcgaatgattcgaactgttgggtcaaggttttgactagttcgaggtacgcttccatgcgctcgtctttagcttcatattccccgtggaactggctggtgacgagttgggagtcgctatgggcgtgtatatcgcggatccgcattccttgagctagcttaatgccatcaatgagggcttcatactcagactcgttgtttgatgcgttgaatccgagtcggaacgattgttcgatgacttccccagtgggggaggtgagttgtattccttctccagatccctgtcggttggaggagccatcgacgtggaggagccatttcttattggagttggttcatccaggtccgctaacgggagctcaattacaaagtcggctaggacttgtgctttcaaactggttctggtgcgatattctatatcgtactcacttagttctatagcccattttgcaagtcgacctgattgagttggactgtgcagaatggttctgattggttgagacgtcatcactacgatgggatgtgattgaaaatatggtctcagttttcgaacagacatgactacagccagtgccagtttttccattgctgaataacgagtttcagcgtctatcaacgttttgctaacgtaatagatcggtttctgtccttcgtgatcttctctcaccaggacacgcttatcgcggttcgggagactgccgtgtacaggtacaacggttctccttcttcgggttttgcgagtatgggtggttcggacaggtacactttcaattgtttgaaggctttctcgcactcctcattccaatcgaactttttatcctttcg

SEQ ID NO: 19309 - DNA, 1424 bp, Arabidopsis thaliana
  unsure (1)..(1424): unsure at all n locations
attcctaattctgatatggagatgatcgctttggctctcaaaggcactctccgccaaaccaagaacaatatgtctctccaagagtgaaaccggaatgatacacctctctctatacttcttctgatctacctgtgtggatacaagagctgggctgtcagcaataaccacaagagagcacgaggcgctctttgcataggaggtgttgtgacaccgattctgatcgcttgtggagtcccaatcacatttgatggacttgagccatgggcaattaatattgagcatctacatcactacaaaatcctggagtttgcaatggttggcgacatgcatcgtttcaagtttgagcactctacagataagaaagccaacatccttctccccagtccttaggttacacgcataatagagggagataacattgatttcaggcctgagcttgagaacctctactacgagaacgctcagccaacaaatgaggatgttcatacagaagaagctactaaggatgggatggatgaagctagagaagtggagtatgacacgagcatgtatcattttagtgagcatgtacctccagcgagggggagcaagagtttgagtgaagctcacatgaacaacagcaagttgtagaagttgtgcaagaaacaagataagttactcaccaagtgcttcaacactatcaagtttctcacggacaagctaagctgctcctctcccactacagctattccacatggacaacctcctcaggacatgccatcgaggagatttgatgagcctaagccaagtcagcacaagcctaagcctagtgaacagagagtctcacatgtctctgctagacattcgtcaatcgagtctcgggaacacaagagaaggaagaagggtacgctcgttcgctctagcagcagatcacgccttatccactcgaggagatcactcgacnccggcgctggccgcaacagaaggagagaggtcgagtatccttagagcaatactggccgccaaagagccgatgaggtcgagtacccacacgccggagcttatacagaacgaggacgactcgtcaatggcctaggagcaatcacaggcagccattgacgaccaacttcgttcattcttcgactaaggtaaacgcctcacttcaccattgtactataccatctcatgtttttattttgtttttgtgatttgttttgtcttaagtactcttttttaaatttggtcacacagtggactgtgtgatttaagtttgggggaggactcaggaaatgtgttttgcattgtatgtactcttgagtctgcattcatctaaggcatagaaaaacaaaaaaaaattcaatactttcagaaaaagatttctcaaaaacagagtgttcatgtagttgtattacatttaggatcgagtctagagtgtttcagtagag

SEQ ID NO: 19310 - DNA, 1585 bp, Arabidopsis thaliana
taacggaattaaccagacaaatcgccctcctcgttctccgtcgaattctcagggttcaagatttcactcgacctcgagttttaactcgacctctacaactgcaactcgacttcttgaaatcaacagagccctgaagcactgtaatagaggttactcgacctgaagacttcaccggcagaactcgacatccacaactcactcgacctccaggaacagctcaggttactcgagtacagaattgtactcgatcaattcaatctatttcattgcctattgataacaattttggtttcattgctatctttgagactaacctattgacatttgagctttgagttctaaatttctaccggagaatcatgaggaattacagtggcagttcttctggttatcctgactacaacatggatgagacagagtcgtcatcttcaaggccagagagagaacagagagaatatgaaagcttcagaaggaaagctgagatagcccgagggaagagagcgatgacatagaggtatgagcttatagacgaagatctggaagacgagtacatgcctgaacagactagcagagctaccaaacttctgcacaagccaaacgtattgcctgctgaggaatatgttaggcttttctagctgaatgagttatgtagcacgaggtatccttgctcgacctcacttgcacaactcggtttattggaagatgtttagcacctgtaccaaagttgtcatctggacactctaatggcttattcgtatgtagcgtatgaagatgagacaatacaattcctctccatgctgcaagtagagctctaccaaggtatgacctctgaagagttggattgtgaaggattgggattcttgcgattctctgagtatggtcatgagtataggttatcaatcaagcgcttggaaggattgtttggcttccccagtggaacgggatctaagcccaagtatgatagagaagagttgaaagacttgtggatcaccattggcagctctgtaccgctgaattcttccaggtcaaagagcaatcagatacgcagccctgtcatcaggtacttccagcgttctatagccaatgtcctctactcccgagagatcatagggattgttaccaattctgatatggagatgatcgatatggctctcaaaggcactctccgccaaaccaagaacaaaatgtctctccaaggtgaaatcaatgacacacctctctctatacttcttctgatccacatgtgtggatacaagagaagggctgtcagcaataaccacaagagagcacgaggcgctctttgcataggcggtgttgtgacaccgattctgatcgcttgtggagtcccaatcacatctgatggactcgagccacgggtaatggatattaagcatctacatcacttcgaattcctagagttcgcaatgcttggcgaaatgcaccgtttcaagtttgagcactctacggataagagagccaacatccttctccccagcccaaggttacacgcataatagagggagaaacattaattttaggcctgagcttgggaacctatacaatgaggacgctccgcgattgggtg

SEQ ID NO: 19311 - DNA, 1291 bp, Arabidopsis thaliana
ttttgggtgcggaaatgtctgggctcaaattccagttgatcagaaagcaataggcattaagaaaaactaatccagaagggatctatcaaccaatactcaatcacctcgtatactgagaattctacactactctaacccatcctcagaaacatattcactactcagacatcataacagaaagcataaacgttgaacaaattgaaaacatgataacaacaatgtaacagcaggatgataacagaatgaacaacagtaaacgaaatcaagaacagaaattgaatactgaatactgaatagataaagagaaatccggattacaaaaagtctagaacacattgtctccaaaaatgtgaagtacatgctacttatagccaaatatcccgaaaccctaatactcaaaacgacgaagtattgggacggattaagaactgtgctcgacccaggtggtcgagtgagaggtcgagtgaatagctggagtcttcttttcttccttgtgctcgagtgtctggttgagtgcagaatgaagaaggctctgaagcttgtcatcgagtaagcagtcgagtggtgtgatggtgatactcgacctctaggtagagtgatgaggtcgagtagtggtctggcggtgaaggtgaaggcactcgacctcgaggtcgagtgacgtgatcgagtgttggtctggtgatggagacgagggcactcgacctcggggtcgagtggtgaagtgaagtggtgatgccctctactcgacctggtggtcgagtggtgtcttgagatcttgaagctcatactcgatctctgggtcgagtggtttgtcatgatcagctccgtttcttccagatagctcgtcaacagctccaaatcacctgaaatcaacgcaaatatgcaacatgcatgcaaaactatcctaaacatgcaaagtgatgacaaatgatgtgaaatggtataaaatagtgatgatatgatgctaaagtgatgacaaatggatgctcaaaacatgcaaaatacacacttatcaggctttgtgtcttctaacaaggaaacactacttaggcttataagatcgtgttgcggtttaagttgttatactcaatcatacacatgacatcaagtcatattcgactccaaaacactaaccaaccttcttctagcttctctaagctttcatggtgtagccaaagtgcgtatgagtctttggctttgtatcttctaacaaggaaacactacttaggcttataagatcatgttgcggtttaagttcttatactcaataatacacatgacatgaagtcag

SEQ ID NO: 19312 - DNA, 1225 bp, Arabidopsis thaliana columbia
cctgaaacaattatctcaaatcaagaaagacgcaagagtaacttattgtggttttatttcaaaattatgaggcttttaaaacttaccggcccaatctaaaccagactcgctcaaaggaggtgagtcggtaaagaattcctcgaactgttgagggttgaatgatgaagaaggaagagcgaccaaaagacttcgcttctctgctaaatcggcttccaactcggacctttcttgcttctcggaagagtctttatcatgggtttgatccagaaggaggaggttgctctcgtattccttgatgtccgattccagctccgtccttgctttctcggtttggatgaaaacgatcgccccttgaatcaattccatcccgtgacctttcacttcctttctggctttcgatgccgacctcgctaactcagcatccagtagtttggcgattgccttgtacttgagctgcaattcagatagctggttggacaagtcgtaggcactggattcagattccgagagtctgtcccgagcgtttgagagttcctcctggatcttgtcatacctctggtattgatcctgcagctcgtcgttcgacttcatgagttcagaggaaagattgtccaattgatcttctagtttttgccttgcatcagttgaggagcggactcggactcgagggaagaaaacatgtctttccaggccaatacctcttgttccctgtcgagcaacaacctctcatagtattcaatcatgtcgttgagttcgctgtttgcctgaaccaagggttacaaaggtaagttagcatatgagcgaaaaaatggagttaaaagattacaaaaaaaactaacccgagatgagtgataagcgtgaagaaggaatcgctcgcgaattgcagggcgccacctgtcgaaggttggcaggattgtgtcctgccgagtcttgaagcatcggaagacgtttcctctgtttccatcgctgtcaaagtaatacagaagatttgaaactcatgtatgggaagttaggccagtgaatcgaacaatatagtaagtaagagagtaaatggtaattactaacgtgtgagtgacttggtttgaggaccagtacggccttaggattgacatctcggggttcaacttcttctcgccgaggatttcactctgaccggtcttttcgctccaaatttggaagaagatgcgatgactggaggagggggacaattgagcgaggtggggga

SEQ ID NO: 19313 - DNA, 1298 bp, Arabidopsis thaliana
  unsure (1)..(1298): unsure at all n locations
tcaataaagtatatcccattgtttggttactctattcgtctcatatattgatcacagaatcatatggaacagattagactacgaaagacctcataaacggtagggctgaatcacttagtggcttgggtcgagagaactcgtccggacttaggcagtccggatcgggcctttcacttctcggcttctaaagacccaccctcctcaagcaccttgatcacgtgcgcattggctcgagcttgagacaaatacatgaactgatcgttggcgtcctcgagaagagccattttctcctcgaccaccttaaacttggcgaggaagacctctgaagcttctcgccttgctttctgcgcagcccgagccacctcgttgtctctgagccccctcgcctcggcaagcatttgtttacagcggacgacctcagagtctatcctcagattgctctcagctaatttgagagcattctccttgttcacataggcttccctcttagcctcctcccttgccagtttcgcctcggtggcctcagagactgccgcatctctcccgttcggctttctcttctctggcctcagtcgccgccagcttgttgactgcatccagattactccgcatagccgagtcgtaagctggaccattcggttcattgaacccacaacctgaaatttacatatgcaatcatactcaaaaacggctcgtaaaataactattttcagaaacggctcgaaaaatacttacccggagaaaatgagatgccgtctcggcatattttctggactcaagtagagtgtccggagcggaacgaggcgacccgcgcactttccgacgaggttcgccgaagcagctctgtcctcaaaaataggaggtttatcctccttcgccagcttctttttcttcttcttcctcctcttctcctgggaggtgtcgatctgaggactcttccccgaggccttatcgcgcgcaggaagcgannttaccgcctgtgtggcagtttcgatcggaggatcagccgggacttggtcgacaacatccggcgcggcgggtgcagcaacctctggaacaacctcccgagccccagaaggttcagcagggccgctctcttccacgacgcgtctctcctcggccgcacgtttcttctcagcggcaagtctcttcttctcgtaaacttctcggatggtgggattagaagtttgcatattgacgaaaaactgcgttcggtgatcggaggattctgaactggatgggcaggaaacaccgtgaaatagcttgagtgctcttttgactcaatctcgggagaagtg

SEQ ID NO: 19314 - DNA, 1220 bp, Arabidopsis thaliana
cttgaaagaagcattttccccagtgagtaagtatctttcaccaagcctacctttttccattgcagcaacatgaccctccacaacatcatcaacatggctgaaggagtatctatccgtcccagagccaatatatccaggcaacctcccgttaaagcgctcgatcaactagaagaacaacatcatgtgataatcaaccacatactgtcaatgtaccactacatcatcccaccaatgcaactctaatcagcaaaaggaagaatcataccattctagcaaccatattggctgaagtgagcttgcctggaccaaaaataacaccaggatacagcaaaattatcggcacaccttcagaagcagcattcaaagccatcttatcagcaacagccttggatctctcatactcagtgcagaagaacctctcattatgaaccttatctcaagaccagatcaaaatcagaatcaaacattacaaaacaaaattttgaaatttaaaagtatcatacttgattctcattagcaacagatccatcggtagatccaagagcgaagaaggaagaagtgtagataatcttctgcacggtcttcgtctcctttacagcttccaagacattcttcagtccaccaacgttgacctgagcttcaaatatcaccataacacatgatctctccaattttgaccttaaaactaaagatgtggaaccaaaagaaagcttactgagatgaatcgagatgggtcaggaagccaaggctcaactaaagctgcggcgtggaaaacgatatcgcaaccggagcaagcatccgttagagaacggtaatccgttacgtctccataggcgagctcaacttctggaggtaagtcagagagatcgctggtgcggcggaccaatgcacgtacggagtggccacgacggaggagaacgtggcagagtcgtgcgcctaagtaaccagtagagccggtgactaatattttcatattttctgtttctgtgttgggcatctttgggcccatcgttgcttttctaagccaagaaacctctaattggttgagagggtttaattaattaatatttaatacaaacatcattgtctgaaaggtggatcaaccaatagcaagattcttttgtgttttgttttgtcacatctacagataacaaagaactagtaagtttctcatttgagtgaacaaaatttcaaattacagcagatcacgaaaatcaaga

SEQ ID NO: 19315 - DNA, 1248 bp, Arabidopsis thaliana
ttttcttgtggtacttgcaatattttccgagatcaagttctggactctcctcctcagctgcctcgtctattgcgaataaggtatgctgcccctgcgtttgttttcctttttgaagggtttcttaattgcaaggggagcgttttggttttagattctttgaatcgtaaggccagcatggcgagctcctcttcggctttggcgaagtggagagctttgtgaagggcatcgtctaaagagactggttgcctaacagtgagttcctcgcggaacctagaggagaaccaaaggccgttacgaagggcttctatagctacctcttcgtttaggtttgcaattttcgatttgattgctttgaattttttgacgtaagatcgcagggattcgttctgaagttgtgtgagactccataggttggcttcagacgtcctgtgttcgataagtaccgaatactgttttaagaaagcggcggcgagctggtcgaaggtatcaatggagttcccttcgaggctagcaaaccattcgagggcgtgacctacgaggttttctgcgaagaaacggcagtgacctgcttcgttttcttcgtctatcaggtacgctcgtgttatagcaaaacggaaggatctcagatgagcctttgggtcgttcattccgtcgtactccgagaaacgaagtctcccgacgtctcggaggcgaaagaagcgatcctatccgtgaacggggtgcgcctggtttctttaatcacgcgatctatgtcgggagcatcgctcactgctaagtgcattcgcgaatgcatttgagccatgttcgcatttgtttgagctgcgtaattgcagaatatttccatatctacgacgttacgcgtatcgaccggtgcttagggatcggttggactgttaaggaggtcacttcctggtatccggggaatggatggcggattagcgatagaggttcgttgttgcgttgagttcccgggaaagcgggaactggacgcggttgtttggtttctcgtccacctgtacctaggaggcgaatagcccagcggtagtaaaggtggggctggtagccttgggaaggcaggcgttgtgcttgtctcgtttcctgttgcctggttttcgacgagagtgttcgcaggtgcctgtaaaaaggtgactcccggttgataggaggtgagacgtctatcgaggcgaagtctagaggagtcctcggagtaggatcaaccggggagacggtacttgtcagatctatggg

SEQ ID NO: 19316 - DNA, 1779 bp, Arabidopsis thaliana
ttctaacactgctcgtatcgacgtccatacgctttgcaatccgctacaattaggcccagaaataaccgtactttttgactttaaaagccaaagaacgacctccggaatgattcccacaagttctatcgtggattccttttataactgtccgggtctattctccaaagatacaaatagcatccggagccgaaataactcttctgtacagaatgccactccctacgcaaaaacgcgcacaagtggccttcaactttcgagcctcccatttatcggcgggaagtactccgttgaggatatagttccgaattggttctctccagtctgcccctaagtcgtgaggtatctgattgtcaggaacctcgggattgttgagaccagctaaatcttcgtcagctgcaggccgggcagcttctggaattttttcctcgtcgtcgagttgctgcagctcgagattgtttcttgcgcctcgagttgcttacgcattgcccgagtagtaacaaagtttatttcctcaagtcgaaaattgggctgagctatcgtttcaacagggattatccttgtgacagttacttcggatgtagaagccaaagcagctaaggcatcagcagctgaaatttctgcacgaggaactttgattagttcgaacttgatataactcgattttcaccgattttatctatgttttagatataggattttgagtatttctgttatttctcgagtctttttagtgtcttttcaggtattctatgcactgggacaacaatggagataaggagtcattttggagcaagatctaaggaaaaggaagctaaggacgattttggactcaagaatcagcgaggagtgtcgaccgacacacttttggtgtcgattgacaccagtttcggcccagcaaaaaccctagatgctttcaagtttacagaagatcaaatttccccagatccctatttgcattattagtcgctggacgtttttagggtctatatatattgtttttagacctaagtttcttttatcaagttttctacaaaccctattactgagagacataagccattcgttgattgcttttcagagttttattcagatcttaatacagtgaagagatccattatttcccttctctatttactgtgtttatgctttctatctcaaatatgttgtttgcttcatccaatatgtctgagtaatctgcttgttaggaatagggtttctcattagggattcatatggtttagtagattgccccttttgctaggttttctgtagaattcttcatctttaattatgcttaatgctagatctagagtaattaactagatcttgaatctagacaatagatatgcccgccataggtatctgtagttgaatctattatttgatgagcttggtatttaggtgcgtaataagaatcggcctagctactaaggtgaacaatcgaactcgttaagaatgcatattgatatgtctataatttgcatgatttaggcattcattcttcaccactttgtcattgtttcatccacaaatcatctcattaggagtcgtttcagtgtgttttacatacttaggacgattttgcatcaggattgcatgtgcatggcatatttggttgttttcaggtactttggatgcttttggagttcaaacagaggaaaaacagaacatgaagtcggaatgcccaatgacgccttcagcaaaagtactctatcgcagcctcggagccctgccaggcgaaatcactctatcgcaccccggagaagcaagcagctcagt

SEQ ID NO: 19317 - DNA, 790 bp, Arabidopsis thaliana
caaagtctcgtgataagtacctccaccaatgcatcgccaacactctctttccaaattagactaccggatttgttggtgaaggagagctatgcattatcgatcaagctttagtcttcattctgagagagaccaaggatggaacgaagatggcgggtgacagagcagacacttagctgactgttgttcttttagaccacctaatgagctatagagagtatgctacaaccatccatcgatcggggattcggggaagtttttgtgttggtggtctctgaacaccaatcctagtagctggcggggatacacttgggaacccctgatgtgcaccctaagtacctcgacctcgattatctcaggggaaaggattatcttgacaagaagactccgtcggatcactacatcttcaagttcaaccatccggagtttggaccttctttgttacccttaccttgcgagaaccgaacatcagttaggacaaggcgcaacagtaacttcatgccatctccctcagccctgaacattgacattggaggagctagagaagaggaacaagagtatactcaagctgactatgagcaccaagagtattatcctactgagtttgagcaacaagtcaaattcgagcaacatagcgaacaacctgagaaagagaccaacgagtttgagcaagctcactctgaagaaggtgctgatcaaggtagagatgagatagaggaagttacaagaagctcggtgtgcttgaagagcttgggaatcttcacagcaaaacaatgaagggtttacaaagaag

SEQ ID NO: 19318 - DNA, 703 bp, Arabidopsis thaliana
tggctctataatacatccatagaatctttccacccccaacatctctactctttctagagaacgctgctacaactggtgaaggtttgataccaattcttgttccaagaatctctaaactcgctgtcgcttttttactcgtcatcgcgtactgtttgattagtttaccttctttctctccaactgcaacagctggaagcatatgagaatctgcaacaagctcttcaccatttgttgcagtgttagttaaaaccatcccaattccaccagctcttttcacaacctgacccttttgcacacgtggagtaacaccgcggtcgcatatcacgatctttcccgctacatggcgccgatccaaagctccatctagacagaacgaggttggatcaggactacttgcattccttcctaagtaaaccagaggatactgtttattcttaggcaaaactgttctgcctttgtaaagtgacactcctttgaatgttctcatagttcctatcttcactgttgctggaaaatctctatccatagtacttgcaccaactgttgtgatccatggagaaacattagtgagactaatcggatcaggacctccattaccggcagaacacgaaacgaaaactcccatctccattgctccaaatgttgctatagacaaactgtcactagaataagtagagacaccaccacctaatgatatagagag

SEQ ID NO: 19319 - DNA, 2709 bp, Arabidopsis thaliana
tcccctgatctatcagctagtatcagttggatgctgcagggcttgtatttactgaaacccagtcttctggctacagataggggcatgagactgattgaggcgcccaagtcacataggcatttactgaaagataaaggtcctactaagcaaggtagggtgaaggatccaggatctcccaacttccttggtattatatttttctggatgataacgctgcattcatggcctattactaccatcccctgcacttccttggttctttccataatgaggacactgagtggtgtagcttttaaacctctcccaagcttcatagaaagtttcattgtgttttttgtgtgaagcctgagatctcttgttcctcaatctagctgtgcgagcattagagaagaacttggcaagaaaagctttcttacaatcatcccaggaggtgatggagtctgggggcagaatcttctcccagtggtgtgccttgtctcccaaagagaagggaaatagtctgtgcttaaacatatcttcagtgacaccattgatcttggtaaggccacagagcttatcaaagctgtcaagatggtccaggggatcttccataggcaaaccatgaaatttgtttccttggatcatggagatgagactactcttgatctcaaagttgttgttctgaactggtggaggcactatcccttgtctttggtgatcattctttggggcatcaccagcaccaatgtttctttgttgatcaacattaggtggatcttgaacatcaactggtctgttctgttgatccatagcagctggtctttgctgatcacgggctgctttagtagcggtttcgcgtaactcacgagttattctgtctatcctgtctttgaatggtagtaggtgtgcagaaactttggatcgagtttgcatgcacaaagattagtacctatatcacaaaaacaaacagacgaaaataagagttagtaacttgataaatgtaaaagaacttgatcttaactttttctgatatcttgaatgtaacaatgcaacaatgaaattagcaacagcgtcaaattgataagtaggttttttaggcctacttatttgctgaagtgaggttcagttcagttcaattccctttaaacactaacatgtcgatgcatctatagggggtgtcaatccagtctactgttattgctagcaatcaagatgtgtacaaaagcaactaagtcaagccagattatagagatggttggtttctagtaacaatcctaggtcaggatttaaacaacaaaaataagaacttaaaagccctactcgatcattgggtcgagtagaccaacatgcaacaaatttaagaagtgaaatgcagtcaacaggtgacacaaatgacaggtaaataaaagtgcaatcaaggagtgaagacaggtaaatctaagaagaatagaagtcctaaggatggattcattgataagggcaactctagggttcatcaggtggctaacaggcgaaaggcagataccctagacgatagattcaaaaaccgggtcaatccactctcgtgacagagactcccataactctaccacttcctaatctcaactctcgttgatgaaacataggagaggagggtttaagcaacaatctaccaaagtcaataagcagtctagccaatctcttggtctagagtctacaaatctctggaattcgtagatcagtcatccatttgaacatcttttggacgctggatacctaaggtcgaattgccacattagccagcgaaaaccgcataggggccaacgaatccaaaagggatctaacctaatcataaccacctgactaacctagagattaccctaatctaatccatcctcaagaaccctaatcactactcaagcaacattctcaagaacacaaacccagaaattactaaaatcataccaaaatgtaaatctaaacaacctaaacaattttacttaaacaatcaaatgcaaaaaggaaatagattaagagtaattaaggtttcaagattcataaacacaaagaaaaactgaaagataaagcatagatcccttggataaatcccaaagtgatctatttatactaaaatgttgaaaccctagattcactagaagacaagagacttaagacggtttgggcgaatactcgaccttggggatcgagtaaagagggtgctgcaaagtctgcgcctttgtgtctattctccgagtgatcaattggtcgagtagatgcttcatcctctcctatccgtatgctcacatgtatggttgagtggggaatgaggaggatccgaagacgctttgatagctcaacaagtcttgtagagatggtcacccttggtcgagtgaatggatcgaggtggaggggcgagtagatgaatctgctgcttcatctgaggttgccttgatcgagtacgagggtcgagtaaactgcagcctcctttttagtatcctggatcgagtaaagaggtcgagtagaatgatgcctcttctgtagctgcttggatcgagtggatgaatcgagtagagtccttttaagctctttttgcacctgaaaacacaccaaaatatgcaatgcgaatcatatatgatcctagatgcctaagtatacaaaacaagttaaaatggttcaaaatgatatgatacaatgagcaaatgcaaagctaaatgatgataaacatacacctaaaatgagtagaatactgtg

SEQ ID NO: 19320 - DNA, 1035 bp, Arabidopsis thaliana columbia
aatcgattagaaaaggcacataaccttctcaaattagaaacaggtctgtgacggagaggctgaggagtagcgagcgtctatgagagagattgaacagagtcagtgagcaagaacacgaacacaaagagagatagagagaagaagaatcaattagagcagaagacgagaatagggaagaacacgaataggaagagaaagagtcgaggaagagaaagagtcgagaaagaacaaagagtaggaatagttttttcagtacttaggattattttgaggctaatttttttgtttcggcgggcaacaaaattaatccgcgctattacattaggtagcgtttaattaatggtaacgctatagaacaataaccctaaatccaaaaacatggcccgcgtcattttttatttcccgggtacgagattatagcgttttgaaattaccaaacgctataaaagtttagccgggtgataaattatagcagaacatggttaactgctatattatagtgctataaatactccatattcttgtagtaatttatttacttagtctttctcttttctttttcttgtgtgtttcatgtgtttgtctaatcgcagaagcgaaaacaaccaaagaacatgaacgagagtaagattgttggattcatggctaagcttgacgtagtccacaatctatttgtggaagatgtcaattatgttggtggaagaggttatcagaatcagagactagaacaccaacgaggcaatataggtgtctatgggaatggtcaacctaactacactcacaagtctcagttccagcaaccttttcagtatagcagtagtttcagcttcacaagaaactacgatcttgcttcttaccaagccccccctccacccgcacaaagaagcaagatagaatcattgcccgaacagattctggaaggccagaagaagatattagagagatatatccctagatggactgagagaagactcacgccttcttggcatgttgctttgatggaaagtgaagatgagttcctgaaagttgaggaga

SEQ ID NO: 19321 - DNA, 492 bp, Arabidopsis thaliana columbia
tatatcaatggaggttataataacagggatgggatgtcccgacttgccgagagaatgaaacagattgaggttcctaagtacctttttttctttctttcaatgattacattttgtcccagaagtagtcctctttctgagtttacaacattttgaacagacaagcaagatagaataagacattaacagcttttcttcttcagggagaatcagaagcaaatagaatcttttacctctcagtacctcaagaagctctggtggatgtggcatgcaccattggagataacgctcaggcaccacgaggctggactcgaataatagttgagaaaccttttggttttaactcacattcgtctcatcagttaacaaagtcacttctctcgtaagtttgaagagaagcaaatctacaggtccttcttttaaatctagttgctttctgcatgcacagctctcaagttcatatttcttcacacttctgtgcccgttacaggatag

SEQ ID NO: 19322 - DNA, 1332 bp, Arabidopsis thaliana columbia
ccaaaagacaaaaaggaggcgtacgatttcatggacaaggtcgggattcactcttccttcctttattaaacttcttcctcttcctctttttatgctaaacaattttccgggctacgttgtcgacaaacatcaccgcttgtgcgatgagaggcagcgtttaggcctcaagagtttgcctcttgaggcccgcatcgctcgagtggagaggaaggtgagggccatggagagtgatcatttccaatcgaattggaggaaggtgcgtggccaggatcccgactatgcttcgcgatttacctccatgcccgtggtcaagtccaaggtcccgtaaacgctcccgtcgaggtggtcccgtccgacagcgaggaggacgacgaggaagaggatagcaaccactggaagcgtgtcaagaatgaacccgaggtggatgataaaaatgaagcatccacttcgaacgctgatccggcgatgaagtagcctattcttgagtctcttccataaatgttcccgaactcgttacttattattttattttattttatttgaacctgctatgggctccggccatattattttatggaaactttgctactttccttaatctcgaaatattcgttttggagatatgttttaaatgcagggctgactggaaggcttaagtctttccgtgaaacactctggtctcaaatggaattgcaatcctcaagggatacaaagtccctataaattacaacccctctttccgtgaatcactccggtctcaaatggaattgcgatcctcaagggatacaaagtccctataaattatgactccaaatttaccttatttttcatcacaactttcttttccttttgcaactatggagtttaaccttcgatgctcggagtacatgccagacttttgcatggtcagaatgatggacgaagacatcccaaacgtgctggggagagggccttctccacctcgtggcttcttccggtcctaaatccgagctccatgtgcactgatcaaaggcctttcagattgaaatcaagaaatcgcgatggctttcatcaaagctcttgcagttcagcaccaaaagcgttcgttggaaaaaaggaagcttcgaaaaaagattaatcgaatgttacgtagggtcaccgcgatatcaagggagcttcacaccctcaactctcaccccagtgactggatcgagctcgaaatctccgaattcgctcgcatcccgaattgtatgatgttgatcattgacctcgctggtcaaggagtccaagtgttctctacgtcgagaaaggtttcgtatctcgaaatgcgggcgtggtgaacttgtctttttt

SEQ ID NO: 19323 - DNA, 2564 bp, Arabidopsis thaliana columbia
ctgagtagttcaaatagttcagatagttcaacactaggattagtcggttcgacttattagttcaaatggttcaatttggttcgactgattagttcaaatggttcaaatgtgttcgactgattagttcaaacggttcgacctatatagttcatccggttcgagtgattagttcaaatagttcagatagttcaacactaggattatctggttcgactaattagttcaaatggttcaaatgtgttcgactggttagttcaaacggttcgaccaatatagttcatccggttcgactgattagttcaaatgtgttcaatttggttcgactgattagttcaaatggtttaaatgtgtttgactggttagttcaaacggttcgacctatatagttcatccggttcgactgattagttcaaatagttcagatagttcaacactaggattagtcggttcgacttattagttcaaatggttcaatttggttcgactgattagttcaaatggttcaaatgtgttcgactgattagttcaaacggttcgacctatatagttcatccggttcgacttattagttcaaatgtgttcaatttggttcgactgattagttcaaatggttcaaatgtgttcgactgattagttcaaacggttcgacctatatagttcatccggttcgactgattagttcaaatgtgttcaatttggttcgactgattagttcaaatggttcaaatgtgttcgactggttagttcaaacggtttgacctatatagttcatccggctcgactgattagttcaaatagttcagatagttcaacactaggattatccggttcgactaagtagttcaaatggttcaaatgtgttcgactgattagttcaaacggttcgacctatatagttcatccggttcgactaattagttcaaatggttcaatttggttcgactgattagttcaaatagttcagatagtttgactgattagttcaaatagttcagatagttcgactaaagtccaaatggctcgactacgaagtccaaatggttcgaccaaacatccgttcgactgattatataattgttagcaaaatttactttcaaaacacagatagttatattcaaacatttagattcatacattgtattcaaaacatagatagttagcaaaataaagatttaaaaccacaatttagatttagatttatcttacaaacttaagcaaaacaaaggcataatgtttattgaaagagagagtcaggaggatactcgcgtggaggctcatccactctcatgtaggaggaggtcgcgtcatctggttcatcgtcctcctcaatgggatctggctccgtgaaaaacgaccaattcggtgacgatccatcgtgctcaacacaccatttccttagtggcagtggaatgtcagcaactttgtcgaaaccgtatctcacccagtctttcggatgagcctccaaccgcctcatacctctctccaggtcttacaatttaatgagtagttggcggtgacgcttctataagcttggtgttgattatccacctgtccaacaatagaaatgttaatttctcgcaaaatatccatcaatacaactatacgaccactatatgattcacctaatataaccaacaatcaacacaactaaaccctaaacctgaaatttcattaaaccctaaacctaaccaaacgagcaacaacgaaacactatttttacatttaccttttgaatgaaccttagacatgtgtcatgcatctcattggatagattcgtttgaccaaaaaactttccgggatgaataacttgacctgggacgaaatctcttggggctggaacaaaatccggccccatatctcctggtaaaggagacctcatccacggtaccgtcggctccacttctccaagggggattacacggtgaagcggaacccccaaatgtcggcggataaacccgatgtcaactaaccactcaggtggtggtggagaagaacaatccggtgatgttggagtcgcagacgccagagaggaaggcgccgacgttcttaccctctgaatggtctgtcgatgatcaggactctccatgatgaacttcaccagtgaatagtttcaatttcttgaattctctggtttcgtgtaaaattaaaagcagacgagtaaattgaatagacgtgactcttcgcctgtcccatctgaactttcacgccgaacgattaagaaaatgggctgggcttgagcctttttttactaggggttttagcatccctaaaataagtattccttttgggccttttgccatttttaatgggcttataaattaccaaaaacaaaatccaataaatttcaaaaaatagagtccgctttatgcaaaattcataattcaaaatttgaaaagacaaaaacgatttcaatcaatccctaaatcgaaacattcgaattccaaaattgatttagggtttcgtgagtgccttctctaactactccgatgagttcaagttcagtgtcagtgtcatctggggttgacgaacccgtggtttccggtgaattgtgcgtgtagagatag

SEQ ID NO: 19324 - DNA, 441 bp, Arabidopsis thaliana columbia
ccccctaaatggagcagatctgagaggagaagagagtgatttggggtccaattgggtagaattagagtggctcaaagccaaaggtgattatagcatggaagccttcgttgcaaataggttagaggtaagcatgagattagcttggctgaacacaaatagtggcaagagaagaggaatcaaattgaaagagaaattgaatgctgctgctgcggctgccaattcgtattggaggaagaagagcctgtgttgattggtggcagaatttggatgctgcaacacacaagaaaatctggacttgtttgtctgggaagtcggctaaatctgtggtacgtgttatggaaggatgtagttgatattacatggagcttcatagatttgaccatggcggatgatgtagatgttatgacatggaacttcatagaaatgactatagcagatgat

SEQ ID NO: 19325 - DNA, 559 bp, Arabidopsis thaliana columbia
ttattatttcaagtcacatcagtcatattgactattattttccatttctaaagagatccaggatactaagacataacgaagatgatcttcgatcacacgatcgtggccaacctaaatactatctgacaaatccaccatcaatgccttgaaccatatatagattctgtctctaaggatgtgatattgaaccaaaaacttcctaatatcacaaacttaataatgcaatgcattacacttttcttgaattaaacaacattccagttccagatgcatagaagcagaaaggtatcaaaaaaaattcaaatacgaaaatgtaaacctgggagaaatagtcgtcttgtggccatctttctcggatacaaagtgaccagacccaccggaaaactcagctgatcttggagaatccattctatggcacgcgccgttatcttccggataagaaacccggccacaagcttccagctcgttgcttggctcaatcaacgttgttgtgacctgtagatatcagaacaaacaaggcaacttagatttcactttttcaatctgtgagtttaacgag

SEQ ID NO: 19326 - DNA, 148 bp, Arabidopsis thaliana columbia
cagctgataatggttgaaacatcttttcccagttacagaatagtcacaccatgtaccgtatgagggtccgaacccgacatttctgtagagtactagggcataagtcccggagaaatgctcccatccgtaaaatatatatatgtagaca

SEQ ID NO: 19327 - DNA, 481 bp, Arabidopsis thaliana columbia
tgggtttcaagctccggtgatgtggatggagcaatgaggttgtgggaggagatgagagataatgggtgcgaacctaccgttgtgtcgtacactgcttacatgaagatgcttttcgctgatgggagggtggaagaagccacggaggtgtataaggagatgttacggtcgcgggtttctccgaattgtcacacttatactgtattgatggagtatcttgtcgccacaggtcaacttcattctcttgcacactaagtgtttgttaaaatgcttagctgaaaatccaaaacttttgctttatgtagatgattctggtatctgaatgttttgtagccttgttgatgatgatgtgttagtttcttcgtttgattttgcaggaaaatgtgaggaagccttggacatattctttaaaatgcaagaaattggtgtgcagccagataaagcagcttgcaatattctgatagcgaaacgcttgaaatttggg

SEQ ID NO: 19328 - DNA, 577 bp, Arabidopsis thaliana columbia
gacatcgaggctgaacgtcttccaaaagtttccccagggcaggagaaggtatcaaatttgcgttttacttggttttctggccttatattatctcctttccttcctgagggtattcgattttggaaatgaacaggggtatagcaaaacaagggatttagatggtgaaaaactcttggaacagttgccagctttacaacagcttctgcatcgtctcattggttgtaaggtgcttctttgatgtcatttcccgagtcgtgcactatgttttgtaaatcccgtattattttctattaagttggagaagcttttcctgacgtatgaactgactttgctctttcgactttttcagccagaaggtgctgctaacacaatcatatcattcaatatgcactctccctggtacattaaactaaactcgggggcataatttacatatatccgctagttcttagtgttgtgcagatatatactatctggaaagaacagcttgagttaagctctgagatcttattgtaaattgtgtatgcaggtaatgaaggagagtttaaagtggattgtgcatcaatgaaggaattac

SEQ ID NO: 19329 - DNA, 588 bp, Arabidopsis thaliana columbia
tcctgcaataccaaagacgataacagagggaagagacattaaaattctagaaaagttgaacgtcacaacatttaagaatacattcataccataaagattttgattgggttcgtacctggtggcccacaggttttgtgttgtgaactaagaaagagagaaggaaaaacatatctctcttctctttcagactcggtaagctgtcaaggtcgattatccctccatagttctttctgcgtgtcgtataatcctcggtgtttgagtggggttggttgaagagcctactctctctcaaatgtggtggagaattttctttatgtgcattcacgccataactagaagttacaaaaccaagacatcaaaaagcagcataactagatacgaagtgcactacgaaaacatgataaacagtgacatcacaaaagaaatcttaaatttctagagtgatcaagaaagaattgtgatcatcttgtttatctagatttctcagttcatattttctattcaacctaaaccagcatagcacatacagaagaaagaatggtatcatgactattgttacacgaaatggacattaagatagaatagata

SEQ ID NO: 19330 - DNA, 470 bp, Arabidopsis thaliana columbia
gccagtgtgctctaaagtatgtagcaacttcaaccttacgcgcccttgtaaaaacgacaatttcgataacacaacgacggataaatcctagccatacaatagcttaaaggcgcatcaatgtatccttttagacattccttatctttcgcttctatctcagatatttctgctcacatatcatgtatatacaaataaattagttttggcaaataaaattcacatataaagaaacttgcagcaatcaccaacagaaataattaaatcctctatggatcgtatgaatcacaaattttaataagtatgtgagaagtacggagttaaaatttaccagaggtgaccataaagaggattacaaagattgcgaagttagaaactgacttcattgccatgcccatcttctctgtctctgtagtctctaatcttcttgttatgaattgctacttaactttatagttgttgtggtgctatat

SEQ ID NO: 19331 - DNA, 436 bp, Arabidopsis thaliana columbia
atatcagccactaatctttaccttagagtcaatcacatatatgtgaactcagatgacataaaggttagaatccaattcactttgtcaattaagtaaaagcctttcaggtgtcgaccttaaacactgtctgttggtgtcacaggaagccgggtacacctacatcatgccaaagagcattttgaagaagttcatatgcgtggcggatcttcgtactcaaattgctgggtatttatatggtactagtcccccggataatccccaggtgaaggagatccgttgtatggtgatggtgccacagtggggaaatcatcagctagttcacctgccgacatctctatcctgagcatgatttcctaaatgatctcgagcccttgtgatggttgcacacacagccgaaggagctgcctcagctatcaccacaggtatatatagatat

SEQ ID NO: 19332 - DNA, 486 bp, Arabidopsis thaliana columbia
  unsure (1)..(486): unsure at all n locations
nnnnnnnnnnnnctaaagtctgatgatgatggggaaattgaccttgtatgaggaattcagacgtgattttcatgatggatgcctcttcccgtttaatcaccacggtaacctcgaccagttttcccagtggctttattgttaccgcggtaatgcgtaatgttgtcttcagtagatcgccaacgcgaacggttccatacctgggacgggttcaaaggtgttcgagatgtgcaacaagcgagaaaggtccccccctagtcccgggcttagaagtgaccttaatagcgcctcccaggcaacaatgataccaacatcaagggaggccatgttgagaacatgtggacgaacctaatgacctttggccctcgatatcagagagacaaaattaagtacaacttgggaagagagtacaacgggacccgtggtgagctttacacaatcgaatctttagtcggctcttcagcatcgacggaccaacaagacgcatag

SEQ ID NO: 19333 - DNA, 528 bp, Arabidopsis thaliana columbia
tgggaattgcttcaatacaccaaatggagaatttctattttgaagactaagaaaaaaggtatatatgatttaatttcaagaattaagatgtgccttcgctaattttatgagcacaaaccgaataatataattcaaattgcttagagagagagagtcatgttagagagaagtggcattaaatatatagaatttcatgataagacttaccccatcatcatagcgcaaagactgcaccaactgcggcatgaaaaaagtaactcgttcaggagggtaggactctaaaactcgtaggacatatgccatgacacgtggatgtcccttataagcaggcgtgaggaactcaagagcctgtgtaattgaacaagcagcccagtgcggtagtgctgcaacagcactgagttctcttcaacatttttcggtgtaacaaaatacggcaatgcctcaggaattgtacgaagatctactatatttgtctgcaagaaagaatatcagtgagaacgctcattttacatcatttacatattaaga

SEQ ID NO: 19334 - DNA, 815 bp, Arabidopsis thaliana
ccgagagataatcttgaatcaagtatcagagatcttgcttgcaatacatcaaacttagttaactcttagaaccggtttcagtaattactaaaagagttgattgtttttgaagatacctgagattggtctggaccgtttggactttgattgttgttgagtaggggttggtgtaagcgcggatggtgagaaaggctcgatctcccacggtgagaccttgtttggtctctgtatagaagatggctcgtcccattggatctaaacatatgaagaagagattttacagaaagtatgcaacaagaatgatatgatatatatcatctctagaaaatgattccaattcactaaacctgcaatgacctccatttggaagctggccattgagaagatagatctccactgccaataatggtacctgtaaatctgaagaagaaaccattctaaaatttcagacaacaacattcaagagaggactcataaaaaaaaaatcaacaagtgaacaaagcaaaaaatgagaaactacattctctcaggagactcttgtccttcgaatctcatcctataccgcataccgagagaaaacccgttcttcatcgccatcatatacttgttcacactaattataaactggcttgtcctgaacaaaaaacagacaatgtcaagcttaaagcccttccactagcaacctatacaagatggagaaagtttgaaacttaaccttggtttatagaagacaacaaatatagttgttgtggtacagcatgagaagctgtagcaagaactccaaacgcatactctgactcgacataacggatgcg

SEQ ID NO: 19335 - DNA, 542 bp, Arabidopsis thaliana columbia
gaatgttagtttttgctacttacaaagtcccaacgatcctattcgtgtagcgttgagtcgtgtggtcgatatcgaaaagcctagccattccgaaatctgcgatttttggggtcatttcctcgtctaataatatgttactagctttaagatcacggtgtataatccgcagacgagaatcttgatgaagatagagaagtcctcgagctacacctccaatgattttgtatcgtatttcccactccaattcattaccttggatcggatctatacaaacacttgagaacatcatacacacaaaaaacagttgaatggtttccaagaagacgttgtaatgtgaagaaagttgtaccgaagatgaacttgtcgagactagtgtgtgggaggaactcatagacaagaagcctttcagttccttctattgagtaacctaagagcttcacgagattgcgatgctgaagcttagccaccaacaagaactcgttcttgaattcgggttcaccttgttgtgcattttcgacaaccttttcaccgctattttttgg

SEQ ID NO: 19336 - DNA, 139 bp, Arabidopsis thaliana
gccgctgatgcccttggcagcagcccgccgaacggatctcgccgaacatgtccaggcggttgttggacgcggcgccatcggtgccgaggatggtgttcacgccggccgcctccagcgcctggagcggcatcacgccgga

SEQ ID NO: 19337 - DNA, 783 bp, Arabidopsis thaliana
tttcttaggttcttttgatgtccaaccagctccgaactgtgtctgtggtacacatacacataacaccttgaatactttgtcaactttatcgtatccgaaaaaacttctcacggatgctccttcaggcacttggatttgcggtaaattccgaaactttttcagaccgggattgcaaatcacaatctcattattatatccttgatgacagagcaaaccaagaatgggattagaaaccgtgaaaactggtgctatgtgattatcggtaagcatctgccgtttaccagacaacaacaatggtggttcttgataaacagagtgaaagcaggtttcgcgtgtgaatttgcggctacgactagcgacgaacaacagtcgaggccttgccattgatcggagcaagtaagcacttctgaagtcttccccacgtattaaagatgcccatttctttgagacgcacatgcatctcattaagtatttcagaggcaatcgtgccagaatctctatttgcatgtctagagcaagtgtttcgaaacttgtgttcaccattttttttttttttctgctctaatgatatatatttttttgtgttggagacaaatgcacagatgtgaaatatttatagcaaatctcaagagtttgttgtgagtaggtgactttagtttaacttgttgagttttgtaatgcgcatatttttaatctaatttactttcatttaaacaaattaaagcagatgtttcacttccacacgttaacgacttactaaaattattagccaattagaataga

SEQ ID NO: 19338 - DNA, 1154 bp, Arabidopsis thaliana
gagtctggtatacgtgcaagactgtcgacaagaggcatcgtgacttcaagatttttcaattgtttctccaggagagctttgtacttttgtatcatgaccttcttgaatcgaccaggaaatgggagtggtggcttgtaaggtgggggaacgaagacattttccttggttttggcgacaactggttttccaacaagaggagacgctgcaggagctagtggtcgtgtagatcggtcgagtataggctcttctattgctttttcagcggaatcttcattctgacagaaatcctccccatcttgctccacactgtcctcagtgttctggttcggactcacttttgtgggtaattctttaccgcttctaggtgtgatagcatgagcatactcctttgaatttggcattgattttccgtaaggtcctgtaaatttgggtgctgagggcgacccagtttggccttctatgtatctgatcttagatgtcagtgcttcaaccttggtattgatatcactgtaactagaggtacgttgtttttgtgcaacttaggaggtacgctccacctctgcaacttactgttgtttctgtgagtttcgctcaagctcttgctcttccgcgctggaggtacgtgctcactgaaatgatacatgctcgtatcgtactcctcctttctatcctcatctgtctcagcaatctcatcctctgtagcttcttttgtagggccgttgtcatcagtcggtagagcgctctcaaagtagaggtaatcacgcgcaggattgaagtcaatgttttcgccctgaagtatggttatggcctcggtgcagggaagcagaatgttggctgttcgggtcaaggagtgctcgaatttgtagcgatagaaatcgccaaccatgtcgtgctccagaaactcacaacgacgcaaatgatctaaatccatcatcctcggatcaaaccctggagacatgagcggtacaccacatgcaatcagaatcggtgtcacaacaccacctacacaaagggctcctcgcaccctcttcttctcgttggtgtgcgcccacttcctgtatccacacaggtggatcaacagaagcataaccgctggtgcatcattgaggtcgcccttcaggaccttcttcccctttgttctgcggagaatgccc

SEQ ID NO: 19339 - DNA, 1405 bp, Arabidopsis thaliana
acctattcactactcagccatccttgtagcacgcataaacgttgaatggaatgaaaacctgctcacaccagagtaatagcaaaatgatcacccgctgcacaacagtaaacgcaatcaagcacaaatgctgaatactgaatagctaaagagaaatccggtttataacaggtctagaacacagtgtatgcggaataaaactagataaaaacttgttctcgaaaatgtaaagtacatgctacttatagcaaaatattctgaaaccctaatactcaaaacgacgcagtattgggacggattaagaactgtactcgacccatgtggtcgagtgagaggtcgagtgataagctggagtcttcttttcttccttgtgctcgagtgtgtagttaagtgcggaatggagaagactctgaagcttgccatcgagtatgtagtcgagtggtggttctgagagtcaaaactcgcacaagagaaaattgtactaagggtttcttcaaagaacggatctttgtgagattctcaaagaacaacagaattgttgattaccgcggatggtgttcttagttatattattgaaatgatgaggattcgatcgtacaagtgtttagaaatatgaaaataagtgttttgccttcaaaatcagagcgtttttgatagcctgaagttgagagcgtttttgtgcgtgtcccccttgtttgtcctcagaggtgctttatatagggttttggcggatcgttctcgcgatattctcggaagatttctctttatcttagagttggcgaaggagattgcctttatcttccgaagattttggggacttctatattcggtgatatcttcggagattctccaatatctcttgcgggtttttcggaaatggtatgtttgatcttatattggttaagtctttttttgaaggttttttgacccaatccgaagttctttcgagccgggttgagctgccctcgagtcgttgctaagcggctcgggccgcgctagtcgaatgatgtgcccccgaggcgtcttgaaacctgcctcgggatgattttcaggtgttggcatcgaggcacttcgagaccgggtcggggaatccttgtggtgatgctccgaggcgttctcgatgttgcctcgggatggttcctcgacatgatctccaaggtgttttgaggcccggccgggatggttcttcgacatgatctccaaggcattgattagggttggctcggttacctgggtggaatccgaccccaacagtttgccccccagctcattgacttggcggaaagacgatgagcttcatgaatggattctcgagccgactgttcgtcttcttaggcctaactttgtcgcttcatcttcctagacggtcaaacttccgttgcgtgcgccgactatttttgagaagtgg

SEQ ID NO: 19340 - DNA, 1232 bp, Arabidopsis thaliana
ctttgtatattaggttgattaatctgagttattgtttgtatcgcaggaggctaacaaaaatcattcaaaaactatatgagaaccatcctccatgtcctcagctctatctttacagctccggggacaaagttgttccatctcattccgttgagctccgcatccgagaacaacagaagattggaagaaagatacattctttcaatttcaagtcctctcctcacgtggatcattaccggaactttcctgacttgtattcctcacagcttcaaaacttcttgcaagaatgcttcacaccaacaaaacaacaagctctgtgactttggaacatctttttttgcagaatatttgtagccttggtttgtttgtttgttttctcctcaaaagttgtttattattgatgatagaacaagataatccgaagagacagaaactccaaactgtgtcgacgagctactgagcagagatagtttctgaaactcttagattgttgttgctagtttggcttcatatgtgaaacttgaccgatgctcggacaaagaaaaaatgtaaacctatttcattcccttgttcaacggtgtggtctaccccttcctcaaacggctcgtcttatattaccttaaactacgtcgtgctggattctttaaacggcgccgtcttgccgtaccataacacgacatcgtaatagctttccttaaaacggtcgtatcaactttccttaaaatgtagtcgtaggaatattttgccgttttgtttgttgaaaaactacattagagaaagaaaacgacacacatgttaaagcagaatgggtttagaaatggtcagaggagagttgaggattttgggagtgggaatcgatttcttgtgtgtctgtagctacggattcgattcgagtgaccaaaggaactcgatttattggttctaaagtctccaaatcagaaaattcagagacgagccctaaatggcagctccggaagattcaaagatgtctccggcgaattcgtttggagctgtcgttctcggcggtacgtttgatcgattacacgatgggcatcgaatgttcctcaaggtaattgggtttttcttctctctcttcggtttctgcttacgtatgggtttcttgagaattgaagtacaactatcgatttttttgggggatggaaaaatcaggcggcggcggagctggccagggatcggatcgtagtgggagtctgtgatggcccaatgttgacgaa

SEQ ID NO: 19341 - DNA, 798 bp, Arabidopsis thaliana
ccagaatgttccattatctccaaatgaatcccaaacatgtaaagacctgaaaaagactagataagactctagaaataacatatagactttaaaacctatacctaaatcatagctaaaagcagtaaaaatagggttatatcatatctcacatcagtaagggactacttgagtcccatcacagtttcttatcttgatattgccaatacccttaacctcagaataagtatcattgcccgtcttgacaaaacctgaactcagttctttaaaatctttgaacaagtctcttcttggggtcatatggaaagagcatcccgtgtcaagcacccattgttatatccctatttttaccaattttatctatgttttaggtataggattttgggtctttatgttatttttcgagtctttttagtgtcttttcaggtattctatgcagtgggacaacaatggagataaggagacattttggagcaaaagctaaggaaaaggaagctaaggacgattttcagtcccaaattcaaaggagtgtcgatcgacacactcttggtgtctatcgacaccagttttggcccagcaaagtccaagacgctttcaagtttatagaagaagaaatttgccccagaggacttccctatttgcattattagtccctggacgttttatagggtttatatacattgttttagactttagtttcttattatcaagctttttgcaaatccctattttcagagacataagctattcatcatttgttcttcagagattgaattcagttcttaatacagtgaagggatc

SEQ ID NO: 19342 - DNA, 1783 bp, Arabidopsis thaliana
tacactgcaaccgtatttgagctgcgctcaaacctagccgcacacaccgaaaccctaaaattttcttcttctctgttcttcttctccggatcttcttctccgttcttcttctcctttgttcttctccgttcttcttctccattcttcttctccgtcgtgccacatcctctgccaggagatccagatagccgccgctgaccaggaaaccctaatttcggaggtttgacatcgagtctcttccgtctctgttcttcttctccggcgacaactcggtcttctttgccgcctctcctctcacatcgatctgcaaggtaaagaaatgtttctatttgaaaccttatcgattttctctagatcttagtaaggtttacttttacttattcaatttgttctgtttcatttgatttgggtttcgtttactcaatcgatttgttatgtttcatttgattagggtttcgtttactcaatcgatttgttatgtttcatttaattagggtttcgtttactcaatcgatttgttatgtttcatttgattagggtttcgtttactcaatcgatttgttatgtttcatttgattagggtttcgtttaacaaaatgagatgatgagcatgtgtgtagcattagacaactttatattttgttggttatgcaaaatttttagtttaatcccacaggatatctcgactaattgtgattcttttataatagagtttcattttaatgtttgattttctctttagatcttattagggtttcataatttgagtttgattgtctctttactaatgtgttatttttatttgcaagatgagcttctctgggaacgattatacgaggtatctgtctcagcagcaacagagtccgcacacgagtgtaagtgaagggaacacctcagctgttaatggtactcgtcgttcctctgcacaacagatgccaaccgatctgaactctaatcatccggatggttctgctccccaaccgcaaaatcattcgcctcaaccttcagtcaatcattcgaatcctctaactgccaggcttaacgacatgacactagaagagttgcttgaaagtcctgggcgtgcatctttgcctagattagatcctaaccgtcctccgggaactttctggtaagtataagtcacttgttttgcattctaagttaatttacataatgataagtcacttgtctctgtctgatggaatcttgttttgtaggtttgacgatgacacatcagtagcagccactgtccggagcatttttgaaagagatttcaaagagcctcacgctaattggacacagacaccagcaccagtgatcaaacgctggtttgagacatttgctgtaagtcttttcaagttgtgttttattttgtaaagctgttggaattgtttatttctgatgtgtcttgtttttttgtagcaagtgtataactgggacgctgcaataaatgagagagtgcggaatgagtttgaagcaaagctgaaggataggatgtctgatcaagtctgtcggtggaagggaaagtggagggaaaagggagatgaggccaaaccaaagtggattgatccagatgtgtgggcaggtcttgttaagttttggaaggatcctaagtcggaattaaagagtatcaacagtagaaatacaagataccatgatccggatggcctcagggatacataaacatcgctctggccagacttcttacaaagcccgtgctcgcaaacgtgtaagtacctcgcacctttactttattacattgttgaacaacaactaactatat

SEQ ID NO: 19343 - DNA, 1108 bp, Arabidopsis thaliana columbia
tcgtcgatgaccactgtctctgagttcacggatggaggaacttcatgtggagtgattaccacctccagaattgatgccggcgcgataggcacttcgggttccacgggatcgctaacacctaaggcaattatctcggattaatataagagtaattcactgtggattggttttaaaaaaagagtcagaatttaccggcccattgtaatccagattcgctcaaaggaggcgattcagtgaagaactcctcgaattgttgagtgttgaacgacgaggaaggaagggcagctaaacaatttcgcttctcttccaggacgatcttcaactcgtccctctctcgttcctcggagaagtcatcttcatgggtttgatctaaaaggaggagattgctctcgtactcctcgatgtttgattccagttcagttctaaccttttcggtttggataaagacgattgccccttggatcaattccatcccgcgaccttttacctccttcctggcttttgatgtcgacctcgctaactcagcatcccgatagttggccacccctttgtatttgattccagctcagttctaacctttttggtttggataaagacgattgccccaagggacgaagacttatctttccacgtcataacctccttttccctgtctagcagcagcctttcgtagtactcaatcatgtcgttgagttcgctgttcgcttgaaccaggtaataacgagaagggtttaacgtctaagtgaaggagcaaagattaaaatatctattgtgggtaaagggaactaacccgagatgagtggtgagcatggagtaggaatcgctcgcgaattgcaggacgccatctatcgaagcctggctggatggtgtcttttcgggttttgaaacatcgaaagatgtttccctccgtttccatcgctgttagagaaggtttgaccagtcaaggaacgctaagtcaataagtcgaaatggtaaaaaatgtaatgatataaagtagaaagaaatttctaacccgtgagcgacttggtctgaggaaccaaaacagctttagttccagcatctcggacctcaatttcatcccaccgggggttagcactccacgttacta

SEQ ID NO: 19344 - DNA, 537 bp, Arabidopsis thaliana
  unsure (1)..(537): unsure at all n locations
nnnnnnnnnnnnnnnnnnnnctaaagaataattagaaagaatctgaaataaatgaaacagcagggaactaccctgccagctaataatcacactctaaaacaatatgcattttttgcagggatgttgtcgtccctgaaaaagcaaaaatggagaaaaggaatgagtgaatcattacatctgacccgcaatggatcaattctggaaattacccttgatcgtccaaaagcgaatgctattgatgcaaaaaccagctttgaaatgggcgaagtatttctaaatttccgtgacgatccgcaattacgtgtcgccattattaccggtgccggagagaagttcttttccgcgggctgggatttaaaagcggcacgagaaggcgaacgaccggatgctgactttggtccgggtggttttgcgggattaaccgaaattttcaatctcgacaaaccggttatcgcagctgtgaacggctatgcctttgcgggcggctttgaactggcgctggcggcagattttattgtttgtgccgataacgccagc

SEQ ID NO: 19345 - DNA, 744 bp, Arabidopsis thaliana
taatttttaggtaatttttcaaaagaaagtgaaaaaaagtggtggtccaggagagatcgaaccagcgggccatagtggatctgagagacttcgaactatgatccatccactgctgtaagagggaagtagtcgctgctctgtgaaaccagcctcacgcattaccctccgactttagaatccgcctgagtcaagccttcgcctgacccacacagattactcacagcttggactgggcagctcagatatatgtcagcatcaggtccgacccgaggaattgaaccactgttccaccaccttattgtccccactcgggtcacaagctctcgttacttagctcgacttacagttgttgtgttcttctgatatataaacaaacgcaaaactgctgagttttccgatgtgggacaaaaaactgtcatttgttttgatttatcaatttacttttacgtgggctaaacctttcaggcccattatagactgatgaaaagccctatttaacgcaaagagctctaaaaatatgaagagacagtttttgagataggagaggggaaagcaaatgcaagaagaagaagaagtgtctctatgtgctctgtctgaatctgttaacggcgttttcaggaactttgcagctgacttctgactacgttcctgataaattcttagtcttcctctctctctcatagtcagaattgtttagtatctctgttttcgggcatcgtgttagaataatttggataagctttc

SEQ ID NO: 19346 - DNA, 279 bp, Arabidopsis thaliana
atcgatcagtgcattgtaacagtatgaatcccttgtgcatcctttctcagacatctcttcaaaaagcctctcggcttcatctactctgcccgcttttcctaaaccatcaatgagactagaataaaacattgaattgatagccaatccgtcaaaccggcaagtatggaaatagtccaatgcctcttccactctcccgtttttacacaaaccattaactacgacagaataagttaccacatcgggtttaaacccttcgtctatcattctatgtaaaagcct

SEQ ID NO: 19347 - DNA, 1919 bp, Arabidopsis thaliana
ctctagaggattgtagggacgttgtcatcagtcggtagagcgctctcaaagtagaggtaatcacgcgcaggcttgaagtcaatgttttcgccctaagtatggttgtggcctcagtgcaggaaagcagaatgttggctgttcgggtcaaggagtgctcgaattcgtagcgatagaaatcggcaaccatgtcgtgctccagaaactcacaacgacgcaaatgatctaaatccatcatcctcagatcaaacgctggagacgtgagaggtacaccacatgcaatcagaatcggtgtcacaacaccatctacacaaaggggtcctcgcgccctcttcttcccgttggtgtgcgccacttcctgtatccacacaagtggatcaaccgaagaataatcagtggtgcatcattgaggtcgcccttcaggaccttcttcccctttgttctatggagaatgcacttgagtgcagaatcaatcatctccatgtctgtgttagacacagtgcctgtagattccctagagtacagaacatttgctacagagcgctgatagtagcggatcacagggcttcaaatctagttgctcttagacctcgcagagttgagcgccatatcgttcccaatggttaaccacaaatccttcaactcttccctctcgaatttgggtttagttccctttccactggggaaccaaacaatcctaccaagctcttgatagatagctggtaacgctgctcgttcactgaaaaagtcaagaaccccaacccttcactctccagctcatctactgtaagtccattatacatctccacttgtagagtggagagaaactctattgtttccttcttgtaagcaacgtacgggtaagacatcatcgtctccagatgacacttctcgaataagtgttgtacgtcctccagtagctccagctgggctaaagtctgataacaggggtacctcgttccccagaagtcgttcagctcaaaaagtctgatgtactcctccactgtaacttcatcaggcctgttcaacagcttcgtctctctatgccatgactcaggctcatactcgacgtcaatgtcttcgttgatcaactcatatctgctggtcattgctctatttcctctagcaatctcagctctcctctcattgcgtcgagctactgaacgttcggtctcagctctgaagctctcataagcttgttgctctctctatggtccagttgaccaagattcagcttcatcgacgttgtaatccgcatccatggaggattcgccgctgtagttactcatattgatttcctgaaaaagaatgtaactcaaagccaaatatcaatatgttagtccaaataaaatgcaaacactaaaccggtcaagtacgcggtcgagtaaaacggtcgagtacagtgagattgtggcttcgggtatagcggtcgagtgaacacgaatgagagacagtaacagcgtggtcgagtatacgttgaatggagagaagacggtggcggtttgaggagcggtcgagtgaagagatgaacggaggcgcagtgaatggcgaggtcgagtgaacggtgagaacggagaggtgagagaaagaaatcgaagtagaagctgaggtgctcttgcggtcgagtgaatgggaggcgagattgagtgaaaaggaagcgatggtgagacggtgaaggtccgacgatcgagtaggcggtgaatagagaggagcagcggggtcaagagtgaagagggaggaaacgttgagacggtgaagcttctggcgaagtgaagggcggagtggtcgagtgaacggcgagtggtgagaagggagagatggcaaaactggtcccatcgttgagtgaaagagaggatgaaggcggtggcgtgagtgtcggtggctgtgtcgtaatcgagtgagaagggagacgaagccggagg

SEQ ID NO: 19348 - DNA, 1608 bp, Arabidopsis thaliana
gctgcacgttaatggcaatctgcgatcaccatacgggccggaggtgtcgtagaccggaatcgcttcgttttcttcgtactgcggctgttctttgtaccgccaattagcgtcgggctaagctggatctcacgcatcggcacgcgcacgccggggtgtgtgccagtgatataaatgcgttttgagttgggaaaggcggtgccttccagggtgtcgataaaatgttgggcccgggcgcgttgttcgcggcgggtcagttttgttgcagacatagctcattccaaaaagttaaggacgtggcttgtcagacgacggatgaagcaagagacgatcgccgcaggggcgatgcgatagcagattaactcttgttcccttcgcaggtattagcctgatcaggttccgcggatcccgaataaacggtctcagccagttaaggcactccgacaagaaattagccccgcaaatggggcattgaatgtaaattacgcgttaacagcgcagaactcaagcaggatgtttgacgcgggcggcgtcaagcaccagcagaatcagcttatcttccagcacaaagcgcgcttccagccgctcgccgatgtcagataaaacctgttgaaactcaaggtaattatcatgatcgatggcggtttccagactggaatcgtagtaatccataatctgttgagtattggcttcgagttgcggccaaatcttcgcggcgcgcgcgagttgcccgttgccttccagcttatgaagaatgcgctcataaatactgaaatgtccggcagacaagtaatcgaccaggctctgacaaaaatcatcaagggctttttcgtttagcctcatgtacgattctttgccaggcttaatgccaaccagattgtagtaagccacgagcagatgcttacgtacatgtagccagcgatcaaccagtttgttacttcctctgacgcgctccgtcaggttatcgagctggttaagcatgattgactccgcaagtttgtattcaaaaactgctcagtgagaaatgtaaaaaccatgttaaacatgccagtgatgcaaaggtagtgcaagagctatggatcgtataattgaaaaattagatcacggctggtgggtcgtcagccatgaacaaaaattatggttgccgaagggagaattgccatatggcgaacgggcaaatttcgatcttgtgggtcagcgcgcactacaaatcggcgaatggcagggggaacctgtttggttagtacaacagcagcggcgtcacgatatggggtcggtacgtcaggtcattgatctcgatgttgggctgtttcaactggccggacgaggcgttcaactggcggagttttaccgttcgcataaatactgtggttactgcgggcatgaaatgtatccgagcaaaaccgaatgggcgatgctgtgcagccattgccgtgagcgttactacccgcaaatcgccccctgcattatggtggccatccgtcgcgatgattcgatcctcctcgcccagcatacccgccatcgtaacggtgtccatacagtacttgccggattcgtcgaagtgggcgaaacctcgagcaggcagtctcgcgggaagtgatggaagagagc

SEQ ID NO: 19349 - DNA, 1857 bp, Arabidopsis thaliana
tgtgcaatatccgaaacattcgcgtaaatgggatatgtgatctttctctgtcatggatttcaccaacatgtcgtcgatgtaaacttccattgtcttcccgatctgtaatgcgaagattttgttgacgaagcgttcataggttgccccggcgttcttgagtccgaagggcatcactcggtaacaaaagatgccttgttctgtgtaaaaagcggttttttcttgatcttcagggttcatcatcatcacaacaaaaagcgtccatgaatgacagtagcttgtttctagaagttgattctacgagaggatcgatgtgtggtaatgggaagttgtctttcgggcaggctttgttaaggtctgtgaaatctacgcagactctccatttgccgtttttcttttttactacgaccgggttcgcgatccaatcgggatatttccctcggtgatggatccgatcctcaataatttctcacctcggctttcacggcttctgctcgctcatgacccaatttttcccatacactgtcgcttgtggggaatttcaggcagagatgatacgtcgaggcgacacgtcggaattgatttaaccatggtgtgccgataatcgcgttgtacacggttggctggtcggtaatagagaaatcgacgatttttgttacccctttggctcggactggtaatttgatggttccgagagtcatagtggtttcccagagaatccgagcacaggtcgtggagttggtacgatttgcgtcatttcgatcttcatttctcgcagagttgtaagaaaaatgatgtccaatgtgcttctcgtgtcgactaggactcgttcgacgttgaaatcaccgatggtcagtgcaatgactaaaggatcgttgtgcggacggtctaaacccttggtatcgctttcgtgaaaagttacgtcgtcatttggcccgttaaatggccgcgtccagttatgattcgcgtcggccttcctttgataagcctttgattgatgccgcggtgtcttgacagaaagccgaatcccctaaaattgtgaagatccttccccgagcagcttctggctcatcgtcgtctgcttcgcgattacctcggcctcttttgggtccttcagggttcgccgcgggggctgcctgctcgggattggccacagcgttgacctgctcggttttacccttttccgcttctaagtcttcgatggtcaaacctccaccgatttctccggctaggaattttgctgccaactttgctgggaggctacgacatctggaagtatgatggccgtaactcttatgcaactcgcaatattcctgctcgtttcctacgggttgatcctttgtccaagtgtaggattctcgaccgcgtcctcgaccgcggcctcgtcctcagcctcgggcggctttggctcggggtgtatcagcttggtaattatgggttctggagaaatttcgtccttcatggtgaacgaatgtcccgccttgagcaccctttttgtgattcggagcactgggttgggatttatcgatgcgaggcgtttgcatggacggttcgtgtcttttggctagtagttccatttcttcttcatgggatacgtaattcgaggctcggtgcaaggcgtctcggattgtctgtggtttggacaaatttaattcctttcgaaattcggatttgtaccacagtgctttcttcagagcagagagagccgctacgtcgttgattccttcgactttggctagggtagatcgcaattttgcgaggaagtctcgaagtggctcattaggctgctgagatagtgaccataggtcggcgtctgatgtgccgagatcgattagcaccgaatattgcttcaggaagagt

SEQ ID NO: 19350 - DNA, 491 bp, Arabidopsis thaliana
tgtgctctaaagggcgctggcggcagattttattgtttgtgccgataacgccagcttcgccctgccggaagccaaactgggcatcgttcctgacagcggcggtgtgctgcgtctgccgaagatcctgccgcctgccatcgtcaatgaaatggtgatgaccgggcagacgaatgggcgcagaagaggcgctgcgttgggggatagtcaaccgcgtggttagccaggcggaactgatggataacgcccgcgaactggctcagcagctggttaacagcgccccgctggcgattgcggcgctgaaagagatctaccgcaccaccagcgaaatgccggtagaagaagcgtatcgctatatgcgcagcggcgtgttgaaacactatccatcggttctgcattcggaagatgccattgaagggccgctggcgtcttgcgagaagcgcgatccggtgtggagaggacgttaacaacttgagctattacgcctttgaggg

SEQ ID NO: 19351 - DNA, 1250 bp, Arabidopsis thaliana
tgcgggaagtcatgttgatattccttgaatctaacccatgctgctttgaaagcctcagctagatcttgggtgaaggtagacagcttgtttccgagctccttagacttagcatcatcattgaaattgttcaagaaagctatcttgatgcttctccaaatcttgagggaacctgcttttagttgttttagccaagaagcgatttccctagcaagtgaataagggaagagcttccacagtagatagttagttctcttagactccattagctctgatgctcaaaacgagttcctcaaaacgagttcctcaaaacgcttgatgtggtccattggctgctcatgagacaagccatggaaaggatgctggccaactaaagcaaagtagccaagctttagctcatagtcgttcttctggaaaggtggggatacaatcgctgatcgataatcatagaataagtccgacatgttgaaatccccaagagtacgatgtggatccgtaacaggaggaatagctataggaatctggggttggtgtcgatcgacacctctgttgtgttgttcgacaccaatcgcatctgcgttctggtcatgaaggtgtcgatcgacacccagttggtgtcgctcgacaccgagccctgcagcgtctctgacagctaattgcgcattgaggcgcggctgatcctcattggcgtcctcagggtcgatgagtccatgatcatccaatctttgaccagcctcattttaggcttgcccatcctcatctctcaaactccttcctcatcagctctgatgactctgttagccattgctaatctctgaattttgctgttggtacgttcgagttttcccaagttaagaactgacaagttgatcaactccttctattgtgtgctctttgtttgcctagacatacacctgaaacacagaaaagaagaaaacaagaaacgcgtgagtaacaaaataaaagtaaaaactagacgaaatctctaaactaaactcaatggtgattaccaagaactttggcaactgcgccaaatttgatatggttcaaattgccttaaacctactctttccaaaagagatcgggttcagtatttaagggtcgaatttcctcaaagttcttttgttcatacaatgaatcaaatgtcaagattaagctagcatgaaatgattgaaataaaaagtaaacaaagtaagaagacagcagattgaaggttgtgtaacgattaaataaagagataggagtagggtatt

SEQ ID NO: 19352 - DNA, 1819 bp, Arabidopsis thaliana
cgacatatgggttcgaagatgtgatgttctactctagatgtatcatggccgaaagaaaggactgtccagacgagaaacatggatggctgtatgatgatgtaagttactgttatgttctgtctgagtttggctaatgttatggctgagttatcgtgtcgttatgtctgagttacagtagataatggctgatttacgatgtaacttattgttatattctgtctgagtttgtctaaggttatggctgagttatagtgtcgttctgtctgagttaatttagctaatggcagatttatttaggtgttaaggctgagttttacttggttacgtctgagttaatgttgtgttttgtcttggttttattttttgtccagcacattgctgcgtatgtgaaactcctcaccacgaggctcctgcgagatcctaccccatactacagcgaacgcgtcatgattctagacccgtggttcacgtcaatgtggacgaaggattacgcacagtggaagatgaacccgaagagggtttctttcaaaggttctacgtatgaaaaatgggtcaacggtacgggtggagacgacccgacaaacaagaagtggataacagatgtggatcacttgtatactatcctccaaaccggaggtaatcattgggtggccattcacgttgacttgcctaggggtcacgtggactgctatgattgcatcgtcggatgtcatacaccggaaagcgatggaaaaatccaggaatactgtaggccgttcacgaggatgattccacagatcatgagcgaaattatccctcccgcaatccgtgtcccgcaatacgaccaattttcattccggcggagggaccttaaaaaggtcccgcagaatactatcaccggggactgcggcgtttacacgttacaaattcttgaatgtttattgcttggtgtttcttttgaaggcattaataattcaaatatccaggggctacgggttagaatggcaacagagctctacgatgaattacctaacagaatgcccgttcgtttttatgagacctgaattgctttttcgaacatgtctgtgtcttttgggatttttagcatgtgattgtactaaatattgacacgttaggattgataaccagaattatgtccgtatgaatctattattatgttaattataacaaaaaccaatgtaatggctgacttatcatcgctcgattcgtttcacggctgatatatgctaacgtgaaggctgacttgtcatcgctcaaatcgtgctacacggctgagttattgttgtttaattcgatgtttagctgagttattataacgcggtggctgacttgtcatcacacaaatcgtttgatggctgagtttgtataacgtggtggttgacttgtcaaacccaaacttccctcccatcaaataaaccagacgttactttaggactatacatacaccggtttacgacacctgaatagtcaagaacccaaacgtcattagaggaccaaacgtcgttacgttagaggaccaaacgtcgttagaggactatatatatatacactggtttcctcttgtcttttcacttgtcgattcttagcaactacaactcttcattcttctcttgtcctttctctgagaaacaaaaccattccgagatcatggatgcatcaggttcaggttcaaacaagcggcggtgtgtggatgacggtcccaacaagtggccgtctgtggatgacaccccaccctaaagctgtatgaacaggagaagcgtttcaaatccgtcatctcttacatcaggagcaacataagggagacggcggaacgacactt

SEQ ID NO: 19353 - DNA, 2329 bp, Arabidopsis thaliana columbia
gctgtgtgggttctagcttgatttcgcacttggaactaacagcattccgctcttgtgactcaatgagtttagctatctcaacaatatctgcaagattcactggcctacagcgaactacctggtctcgaagacttcttctcagtccattgaggaatgcagattccaatatgtcagatgtgacatggggtaagtcgactgtgagctcttcaaaacgttctctgtattcctccacggttcctgtctgtctcacgttgaagagatgatccacagcagaactgcctctgcttggtcgaaaacgtaacctgaacttttcttgaaattccctccaggtatagatttgttctctgtccttagagcagcgccaccatgtaactgatgctcctgttaaacaagacacagccttttccagtttttcttcctctggggtgcgattggataagaagcactgttctagccggaacaaccaatcgtcggcattgcctccttcataagccggataatccacagtcctaggcggggctgcttcaaaccgaggttgatgtggcgcagattgaggcggaaacgtctgtgtttggaaggttggagtagtctgaaaccccgtggaaggattagatggaaaacctgaagatgatggaagacccgtggaggcattcagctgaaaccctggtggttctaatggtgacgagtgaaagcgacgcggttcgaagggtgaagctggaagtcgaggtatctctgaagtcgacgcctggtatcgcgactggtcaaagagtaagggccgagggtgtgtgtcccgttgatttgtgccggaaaacagagtctctctgttctgtacctccaagtgttgaggatgagaggtgtagactggtaacgccggagctggagaagaaaaacggactcctctattcggtccttccagatgttgtgggtatgaagcttgtaaaggcagtgcgggtgtcggagtggagaaccctatcggagctgcactgtcctcacgcgtaaccccaaagatctgatttctaaggatctgggttagagctctctgacataagtcatctctttctccactttgtctactcgtgtgtccaaatgtggagctggcggaggttcctcaggtggtggtgttgttgtcgagccgagttcaggtgactcgacggcggtatcagatgcggtggctttaggtaacggtggagccatcggtctctccaatgaagaagcaccaatgataaggtctgaccctatcgaagacaagaaaaagactaagactgataaaataacaagacaataggaaatgcaccttgaacggcggagagtgtagatgagagagagaatttcaagattaatgttgttgattgtttattttgataacaaaaccctaaaagggaaggttccttaaatagcatctactgagactcaatacaaaacgcagcatttcgataacccaaaagtaaaacgacacagttggcgagctggcgagctgtctttctgtgccgagctggcgagctgtctttttgtgccttagccacttttaaatagaagcttcctcaggaacttctcacgagctctgcctttccttccatttgatctcgcccttcttctcacaccagccaacgtcacccgtaacctatcaggataccactctactcgattaccccatccttaggaatttctcgtctatactatttctctgttttatcgttatcgcttaatcgttctcattgcctgtttcttagtttttacaattactcgaccaacttactcgaccacacccagtgtctggcaacagactgtgcagtcgagtacagttgtctcatttcctgtctgttactcgaccagtatactcgaccacacccagtgtctggcaacagactgtgcagtcgagtatagctgtttcatatcctgtctgttactcgacctgttactcgaccacatcctacttatggcatcagcctgttgtggtcgagtgattttagtaattctgttattgcttctgttttctgcatgttcgcttaggactcttagaaaccccaaatctgttattgcttggcttgacttagagacttctgatcacatctcatctgtttgcatcacacccatttggattgacacctaaaatactacaatgacatgattggtgttttaggaataattgactaaaaatatattatcaatttggcgccgttgccaattgggtgtttgtttgctatatttgagatttcagaatatttaagatcaagttctttttcattttttctgaaagttactaactttgtgttatttctgtttgtctgttttgatttaggtactacggatcactagcttcaccagttgg

SEQ ID NO: 19354 - DNA, 1679 bp, Arabidopsis thaliana
cattattgtcattcttaaccactgtaacacctcctttctttggaaccacatgcactggactaccccaatcatgtatctgaaataggatagatgatccctgcttcaaacaatttcatgatctccttcttaacggcatccttgagattcgggtttagtctcctctgatgctcaactgagggcttagactcatccttgaggtgaatcctatgatgctcaactgagggcatacacaagtctggagagatacatgtaatatcatcaagagaatagggaagagctttgtgatacttgcgcacgttgcttagcaataaagtgagctctgccttgtttaacgaagcattaacaatgacagggtaagtagagttttcaccaagaaatatggaccttagccctgcaggaagtggttttagatcagctttaggagctttttctgggctcccatcgccaattgttgctgcttgggaagatgtcccaattaactcctcttgagcaaccaattgcattacatgctcactcctatccagcagcttaccatacccgtcgggaactttgtcaattgagggaatcagagcatgctttaaaggatcagcaggtgtcatcttcatgagaaattcgtcagccagagaagagatagtatccacatagaaagtctgcccatcgatggtaggcttcttaaccaccttattcatgtcaaactgcattgtaagatcacctacattcaagtctattctgcccttccttacatcaataatggcaccagttgtggctaagaaaggtcttcctaagattaaaggatctttcggttctttctcataagataaaaccacaaaatctgtaggaatgtagctagtaccgacttgtacagggacatcgcataggataccatcgggtctacggacagatcgatcagcaagaacaagagtgatttgggtacgctctaattctgtcaaaccaagccggagcgcaactgaacatggcatcaagttgacactagaaccaagatcgcacaagcattaatcaaaactctcgttaagataccacaattgagaacaaagctacctggatctggaagtttctgtggtagaatcttgttctgaataatgtcgttaacctgtgtagacatcgtcatgacagctttctcagtaagcatatccttagtaaccatcctcttcacaaattgtctgatcataggagaagacttcacaacatctataagtggcatctctacaatcaacttatccatcatatctttgcatctagcatcctcaagctcatgtttggacttcctaggactcttgggaaaaggaaccttgggtttggttacctttgctgcagctgaaattgggttttggcgaattcccaggtttgggcagggttggtgtcgatcgacaccttgttggtgtcggtcgacactgtcgcgttctgtagtgtctgtcatagctggtgtcgatcgacacgatgctgtgtcagtagacactggtgtctggtctgcaaaaactgcaacatcattttcttccaaattaacgattttggctgcaggaagttctcgttgcagcactggatttagctgttttccactccttaactcaatagcacgaacatcttctttgtttgtagtcaattgcttgatccgattgttcaatatttgaatcttcctattcatatcgtcggataatgca

SEQ ID NO: 19355 - DNA, 1400 bp, Arabidopsis thaliana
tatccaaaatccttaatgtgtattaaaaagaacaaaaaaaaaacttaacatgtaaaaaaaaaaaattgggtctttggatcctatgccccagcatctctgacacatgctctaagccggcactgattgatcaattgtacaaaatacgatatatatatatatatatatatatatatattatatggatacaacagtagatattaagtctcctaaaacctactaatgtgtcatataatagacatccataacatagattaattttagagatttttaacactcgtttagttgaaaaataggactaataagaggtataatttgaagaggtttaagaaaaaaaaaatgttcacataaaatattgtaagaaataatatctcattattgatccttttattatagaagattttagtttagcaaaactctattttagcagaacacataaaaggaacaaggatcaaatcctttatgttatggatataactaatataaatttgtgacataaaaattaggataacaagaatgaaatcctttaaactcaataaggaacacagatatcacaccaatcaaacaactccacgtgtcgattcctcactccttctcaaaccacagcctaatccttctgaaaactccacacaagataaaccttctaatctccaccgtccatctaaccacaatccaaaatctccaccgtccattctcatctcccccaaaaaaccttaccttcttcttcttcttcctctcctctatcgtcttcgagaaaccacaaatctctctttctctcaaactctctcaacaacaacaatggcgtctcttcaacaaactctattctctcttcaatccaaactcccaccatcctccttccaaatcgccagatctctcccactccgaaaaaccttcccaatccgaatcaacaacggtggaaacgccgccggagcaagaatgtcagccaccgcagcatcagactacgcgatggcattagcagacgtcgcgaaaagaaacgacacaatggaattaacagtcacagacatcgagaagctcgaacaagtcttctcagatccacaagtactaaacttcttcgcgaatccaacaatcaccgtcgagaagaaacgtcaagtcatcgacgacatagtgaaatcgtcgtctcttcaatctcacacatctaacttcctcaacgtcctcgtcgacgcgaatcggatcaatatcgtgacggagatcgttaaggagtttgagttggtttacaataagctaacggatacacaattggcggaggttaggtcggtggtgaaattggaagcgccgcaattagctcagattgcgaaacaggttcagaagttaaccggagctaagaatgttcgggttaagacggttattgatgcgagtcttgtggctggttttacgattcggta

SEQ ID NO: 19356 - DNA, 1685 bp, Arabidopsis thaliana
caagtaaacatatatttcaaacaccacaaagattataaacatagatttcaagagaacaaagctaaccgttatatctccaagtgcttcatttatttcttccaaactaaatcccttcatgcaactttcattgaacttgtgcttgcacattcttgaacattccttgtttgcaggtacagcttctctaaatctcttcccaagctgcggaatgcactcaaatgccagaatctagacacaaaaacataaaagtaaatgcaagttcacaataacaaaatctagccactcatataatttactcgactacttaccttaagtggagtaataaatccataaaaagcagtatgtgtcttgggtttcaccacacctttcatgttcttcattactctctgcaccccttccatacactgctcaaaggaaaaacgtccccacgggaatgtctcacaagctctgatattatccacaatcctaagcagcaactcctctatcttcgaatcccctttagaatcagctttcataaccttagctaagaataacagaattgccaacttcaacctagcagtagacttctcactcttaaactcttccagcttctcttccacgtctttaatcttgatgtcctcagtccttttaaacaacttctcaacaaacttcaaactgcctaaagtcttatagttttttgggtactcacggcagttcaaaccggtcaacaatgcatgctctttaattaagtaccttataggtactccattgacaacaaaccaacactctctcgccaattctgtcttagccgtgcgaaccataagcatccacatgccttgaatcatgtgatttggctccttaggcatgtggaatatgtgcttaaattggtcatgattcttaaaccacttcagttctgcatccaaagtctctataaattccactgtttgtaccaactgacacctcgttcctatcttacacaccttcgtgtaggtagttggatcaaagtacataacttctggcggcaatggttgattatcatcatcatcatcatcatcatcctgcatattctgcggtaggttatcgtcatcaccatcctgcatattctgcggcaggttatcatcatcaccatcatcctgcatattcaattcaaaatactttcaattccacattaactacctagttgtactacttgttcctgaatgaccattcacaaatttacgacctagttgtactacttgttttatctgaagcaccattcacaaatccaatcatttaccaatgcataatatcctaaaacgagcctaatccaaaaaataacggtcttctctcataccttatttgctgcatcatcatgttgaacaactgcattcgttgtctctttttcttcttcacaagaatcggcatttgggtctgaaaaatcgtcaattgaatcccctccgacggcgtttgaatgacccaaatcggcggcgtcacaatcgctggttgtaggctgaatttctccggcttcctcttctgttgtaagaagctttgcgccttcttcatctctttggggaatctcggcggcggctcttcgactgatggaggaattcgccggctttggtcgcttcaacctagttgattcatatcccagaagagcttttatctagcattggaaaataatttgcggagatgaagagcaaagacgacgaaacggagaagaagagagagag

SEQ ID NO: 19357 - DNA, 499 bp, Arabidopsis thaliana
gatcagtttcaactaaggtggcttggtataaaggggtctgatttgctcaagccatcccaaagcatgctttctgcatgtggttagctgttcataatagactctctacgggggacagaatgctgcaatggaacatgggagtagcggccacttgtatcctctgcaacaacgatttggaatctcgtacccacctttcctcttcatgcccctatgcaatggaagtgtgggaccctttagctgcgaccatctataacacaagtcactccacggactggcaaaccatcattaacaccgtctcaaccaattggcatgatcgcactgcaggcttcctggctcgttgtcttttgcaggtttcaatacacactatatggcgtgacgtaatgcacgtaaacacggtgcttctctaaatccagcaagcaggcttgtcaggtggatagacaaacacattcggaatcacttattgacaataaaacagagtggagatagaagacttgacaaaggt

SEQ ID NO: 19358 - DNA, 412 bp, Arabidopsis thaliana
caaaatgtctcaaaatttattgggtgtgtgagcgaccatttttagtaggattgctactgtgtcagctgtttatttgcggatatggtagatcaattgacagatcctcagagatgaatttgatatcttaaatttcttgcagacgctttcgtcggggctggatgattatccccgggcttcgcaccctagtgaagatgagcgacatgttgatcttagatgctggatgtaccttgctgcagattgcatgcattccatcacagagcttttaggaaaagaagacaaactttcaaaggttagcacaagatggaaaacacaggggcgtctttttctccccccctttaaccacatgtcactgacgtaaaaaaaaaaaatcctgcaggggaattacaattcaactgtcaagctgctttcaaat

SEQ ID NO: 19359 - DNA, 1804 bp, Arabidopsis thaliana
tccacatccatcatcaacgccatatccaattgacaatttcatatccagctcacaattttcagataaatatcaacattttttgttggctattacttcaggagttgaaccaaagtcttatcaagaagcaattgaagatgaaaattggagatatgcagtcaaagatgaaattgatgcgttggaagagaatggaacttggactgttgaaacccttcctgcaggtaaaaagcccattggttgcaaatgggtttttcgtctaaaattcaattctgatggtacgttagaacgacacaaagctcgtcttgttgttcttggaaataatcaaaaagaaggtatcgactactccgaaacatttgcaccagtcgctaagatgatcaccgtgagaacatttttgcaacaggctgcatctttagattgggaagttcatcaaatggatgttcacaacgcatttctacatggtgatcttgatgaggaggtttacatgaaatttcctccgggttttcgcacagatgataacactaaagtctgtcgtcttcacaagtcgctttacggtctgaaacaagctcctcggtgttggttcgcgaaacttggttcagctttgaaacaatatggttttgagcaagactattctgattattctctcttcgtcctcgcgaccggtattacaaggcttcacgtgttggtctatgtcgatgacttgattattacgggaacctcgattcatattgttaacgaattcaaacattatttgagttcttgttttcatatgaagaatttgggacctctgcgctatttcttgggcatcgaagtggctcgtagccccatagggatgtatctatgccaacgtaagtatgctttggatattagttcagaaacatgtctcatgggagtcaaaccaacaacgtttcctttggaacaaaatcacaagttgtctcttgcgcaagatggttctttttcagaccctacaaggtatagacgtcttgttggtcggcttatttacttgggcaacacacgacccgagctgtcctatgtcattcatattttgtctcagtttatgaatgatccacaaaacgctcattggaacgctgctctccgtgttgttcgctatgacaaaaacagtcctggtcagggcattctacttcgtgctaacacgcccttaacattgactgcttggtgtgactcggatcatggtgcttgtccgatcactagtcgttctcttaccggttggtttatacagtttggcgactcaccgttatcttggaaaactaaaaagcatgatgttgtctctcgttcttcggctgaagctgaatatcgcgccatggcagataccgtgagtgaaattctttggctttgtgagttattaccaactcttggcattaaggttaacacaccaatcactcttcactccgatagcttatccgccattatgcttgctgctatccggtgtttcatgctcgcaccaaacatgtcagacgtgatgttcatttcgttcgtgatgagattattcgtgtggtcatagcaaccaaacacgtttcgactacgactcaattggcagacattatgacgaaggctttgggacgtcaacaatttgaagattttcttgtcaagctgggaatttgtaacctccatactccagcttgaggggggatattgggctaatgggcttagtcggttttgatatttagaataggttaactttatgctcaagttgtcacctatatatacccaaacaatgctacctaaaagcgtaagagattcagtttatacaaacaagagtttcttgacagaatattttccgaacgagtgt

SEQ ID NO: 19360 - DNA, 457 bp, Arabidopsis thaliana columbia
  unsure (1)..(457): unsure at all n locations
nnnnnnnnnnnnnnnnnnnnnnnntaaaggacaaaagtgttaagcggtaacctgggccgtgcggttatgaaaacctctgccgtgccggttgagaaccaggtgattgaagcgccacggttgtttttgaaagccagcatgacgttatgccggcctttgaagcgggtttgctggaccgcgattgtgtcgttgttgtccgtcatcaggggccaaaagcgaacggaatgccagaattacataaactcatgccgccacttggtgtattattggaccggtgtttcaaaattgcgttagttaccgatggacgactctccggcgcttcaggtaaagtgccgtcagctatccacgtaacaccagaagcctacgatggcgggctgctggcaaaagtgcgcgacggggacatcattcgtgtgaatggacagacaggcgaactgacgctgctggtagacgaagcggaact

SEQ ID NO: 19361 - DNA, 1653 bp, Arabidopsis thaliana
ctaaagagttaaaaacctttttgccgtaaatgaattttatagaaataatgatgatttcataaaccctgatctacaagaacggttagtgatcggggattatagcatttcaatatttacttatgacattaaaggtgatgctgccaacttactgatttagtgtatgatggtgtttttgaggtgctccagtggcttctgtttctatcagctgtccctcctgttcagctactgacggggtggtgcgtaacggcaaaagcaccgccggacatcagcgctatctctgctctcactgccgtaaaacatggcaactgcagttcacttacaccgcttctcaacccggtacgcaccagaaaatcattgatatggccatgaatggcgttggatgccgggcaacagcccgcattatgggcgttggcctcaacacgattttacgtcacttaaaaaactcaggccgcagtcggtaacctcgcgcatacagccgggcagtgacgtcatcgtctgcgcggaaatggacgaacagtggggctatgtcggggctaaatcgcgccagcgctggctgttttacgcgtatgacagtctccggaagacggttgttgcgcacgtattcggtgaacgcactatggcgacgctggggcgtcttatgagcctgctgtcaccctttgacgtggtgatatggatgacggatggctggccgctgtatgaatcccgcctgaagggaaagctgcacgtaatcagcaagcgatatacgcagcgaattgagcggcataacctgaatctgaggcagcacctggcacggctgggacggaagtcgctgtcgttctcaaaatcggtggagctgcatgacaaagtcatcgggcattatctgaacataaaacactatcaataagttggagtcattaccgggccaaatcgataaatcgctcgatgaagcctcactcagcctgcgcgccggttccctgcgtaccattacgcacatcctgctgccgctgctgcgcccggcgatcctctcggcgctgatttacagctttgtgcgcgccattaccaccgtcagcgccattgtgttcctcgtcacgccggatacccgcgtagatcggcttacatcctcaaccgcgtggaagatggcgaatacggtgtagcgattgcctacggttccattctgatcgtggtgatgctggcgattattttcatctttgactggctgatcggtgaatcacgtacctcccgttcaaaagccaaaaaccaggcgtaatggagcgcactatgactcagaaaaatttcgttgaactgcgcaacgtcactaaacgatttggcagtaatacggtaatcgacaatatcaacctcaccatcccgcaggggcaaatggtgacgctgctcggcccgtccggctgcggcaaaaccactattttgcgcctggttgccgggctggaaaaaccgagcgaagggcaaattttcattgatggcgaagacgtcacccatcgctctattcagcagcgcgatatctgtatggtgtttcagtcctatgccctgttcccgcatatgtcgctgggagagaatgtcggttatggcctgaaaatgctcgggtaccgcgcgcagagctgaaagcccgcgtcaaagaggcgttggcgatggtggatctggaaggattcgaagctttag

SEQ ID NO: 19362 - DNA, 563 bp, Arabidopsis thaliana columbia
ccgcccccaacaatcactactttctcctctctgtcaacaccgcttgtttcggctctggtcgttgttaagcaaaccgattttaatccggttcgaaccggaaaccatctcttgcttctggccaagaaaggatagatcggacgcacaagagacatagccgcgttccaagaggaggtccagtggattcactctcctataatcaatattaaatcgtagtcacaaaattgcctaaacttatatagaccttattttatttttgaacatcaatagttgtcgttgaaaagtatcttggggatatttagatttagcatatgagtcaatgttgggtccttaagagttgaggctacaaatttataactcagaaaaagtgtatatgccctttaatttttggcctattggtcttttatggcgtcaactccaatttcagtttgaaaagaaatgtcaataactaacaatgttgtcttttgactttgaaatcttagaagtttcgacttacccatttctacaagtgttaaatagcactgttatcaaaatcttatatttgttaattgtgcttaatatatttt

SEQ ID NO: 19363 - DNA, 490 bp, Arabidopsis thaliana columbia
  unsure (1)..(490): unsure at all n locations
tnnnnnnnnnnnnnnnnnnnnnnnctaaagggtgtcgttatcctgcggacgcgtcgtagtcacaccggatgcgaccatggcgtctttgtaggtttccagcgcctgcgttggatcgcccgcctgcgcttcaaacttcgcaccatcacgcagcaccatcgcgctttccatcgacggtggctgagattttgcctgcgggatcaacttattaaacgtccgctgcgctgctgcggtatcgccaagctgcgcctgtgccagcgccacgcgtcgctgtgtgttcagcgaggcgttatcggtagcgggcagtttcgccagctggctacgtgccgccgctttgtcaccggcagcaatatccacttccgtcagaccaagaatggcgtcggcgttactggctcccgcgtcaggacattctgatatgcagcgcgggcggcggtgtaatcacgtcgttgttgcgccagtcagccagcgtgaggtcaatacgcgtggaaggtgg

SEQ ID NO: 19364 - DNA, 557 bp, Arabidopsis thaliana columbia
ggactcctcagtgcaagtcttgctatgccctcgaaatgctggaaacgacatagttgggtcaaacagagggtagaacatgaatttttggtcttttttttggttgtggtatccggcttctatttatattttagtccatcaggaagttggaaccatctatacacaccaccaaaaaaacttaatagtagatgccgatgctgggggtaacagaaggaaaatcgtagcttttgtgggcgggcttgatctatgtgatggccgatatgatactcctcaacatccgttgtttaggacactgcaaacagatcataatggtgactatcacaaccccgactttcacggtatgtctgcttgcctttctaaatatatattagtgtaactttggtgtcgaatacttaaggaatttatagcaaggaataacctttggcagtggaaaaacatactgcttttaactttattaagtggtacttcaatctttgtctgtctctcaagttcttcttggtgattacctagtaatcttagttgctagttcttttgtctgaatgggaaaccttgacttggat

SEQ ID NO: 19365 - DNA, 612 bp, Arabidopsis thaliana columbia
ctcgcatgaaagagtgtttcggagttgtagacatcgtgttcatctcactatcaagttcaacgtcatcgtcaggttcctccgcactgtctgcatctccattcactatgacctcatcacaaagctcttcgtcaccatcttctccataagtcgttttcaccattgaccagaagttgaagttcggggagatgtagcttcaagaattgacaagaaaacacgtgtgagaaagagagttcaagcctatccaatgcaaatactttgattcatcacttgttttatcatattaaaataattttcaatgtcatttcaagactgtaattaagatgtatgcagtagaatttgtatcaaatatgcccaggtcgggtaaattcatccagtgagtcaagaaccttgtgtaagattctcacattgatttgtccttactttggaagagaaaaaataatcaagagtaaagatagcaaacctgctagacattttcaacaagcacgggtcaaacgggaagaatgtgcaagcctttcaaagccccaaaagcacgagagagctcagacttgtgtaggtcatcgaaatgaaggatctgagacaatgatcagccaccagctttggcttgtttaagga

SEQ ID NO: 19366 - DNA, 480 bp, Arabidopsis thaliana columbia
  unsure (1)..(480): unsure at all n locations
nnnnnnnnnnnnnnnnnnnnnnnctaaagttgcctgtacactgaccaggataaccaaccggctcgcgtttcttacttcggtcagaaaatgaaaacggcgcgtatcctgattaacaccccagcgtctcagggtggtatcggtgacctgtataacttcaaactcgcaccttccctagactctgggttgtggttcttggggtggtaactccatctctgaaaacgttggtccgaaacacctgatcaacaagaaaaccgttgctaagcgagctgaaaacatgttgtggcactaacttccgaaatctatctacttccgccgtggctccctgccaatcgcgcctggatgaagtgattactgatggccacaaacgtgcgctcatcgtgactgtacgcttcctgttcaacaatggttatgctgatcagatcacttccgtactgaaagcagcaggcgttgagactgaagtcttcttcgaagtagaagcgg

SEQ ID NO: 19367 - DNA, 459 bp, Arabidopsis thaliana
tgagctggtatttttagtataatttttttttagggcaaaatcataaattatattattttgaaataataacatgtacaccgccccaaaattgtcataatggaaagaaacatagatatattgagaataactaaagaggataaaataagctacatatataggcacaccataatctagaaaagaaacgtaggtttcgctaactaacacaagagcaaaatctacttaaatataaatacatacagagtgcatatcaaaagcaatccctaataataatattactcttatatctatttagtttccacacacaaacataagaataatttagaggaagtgagggaatgtgctgttcatgagagcattggccatgatgtgattagtcttctgtgttgggtgaaatgagtcccaaaacacatacttgtctgcgtttgtacatgtgaatgggttattcctttgacaaccata

SEQ ID NO: 19368 - DNA, 544 bp, Arabidopsis thaliana columbia
gctacctttttccttccttcttatgccgtttccatattttactaggagaagcctgaaagctttcctggaaaagaagaaatggagcaatccctgcagaggttggaaatggatttgaaggaaacacaaagagaaagagataaggcacggcaagaattaaaacgactcaaacagcacttgctagaaaaggttagcagctgtcgtaaaagctaatattttactgaatctattagtgtgggacatggttacatttgttgtagtattatagcttttggatcattattttgcaaattatttcgttttctagcttctaagattgttatgaattcagccgagacaatattttcttgataattttctgtgaagatgattgacaagtgtgttctatgccataatttcacaggaaacagaggagtctgagaaaatggatgaagatagccgactgattgaagaacccgccagactaatgaatatcacaggtctcagatatcacacttggagaaaagtcttaagcaggccatcatcgaacaggaggccaacagattga

SEQ ID NO: 19369 - DNA, 474 bp, Arabidopsis thaliana columbia
tgggaaagcaatttcctttgtaggtgagttgggtcattggtgttccaagcgtcttctatgaaacagtgtgcccaatattcatgtgagaattggttatagagatagttggcaatggcggtcttgcctatgcctcccatacccaatatccctatcattctaacctcacttttaggctccttatccaaaaggagttgcatcttctccatatgagcatccattccaactaaattgattagatctgtaggcttcatctttctcagtcggtttgaaatttttgaaactatctctgcgatgttcgttgcctcatcggaactgacatggaacaagagcatttgcgttaaaaactaaaagatgaaagaaaggtatatagttaatttacacatcaaggtggttcttcttggctaactcatttacttcttaatatccttctattgctataagacaaacatgggagaataggaaaggttgtagatg

SEQ ID NO: 19370 - DNA, 564 bp, Arabidopsis thaliana columbia
ggtaataaacttgaatcagatcgaaaattagagctagctcgtgccttcgggattgcaacctagacaaattgctatataggttccaaaacagaagagctcgatccaaaaccaagcagcttgagaaagactatgacatgcttaagcgtcaattcgagagtctcagagatgagaacgaagttcttcaaactcaaaatcaaaagcttcaagctcaggtaaaagcagaaacttcataacacaaaagtactctgtttcttttttaatcttaaatactctgttttttaaatcatatatttcataaaatatgaatcttttttagttgaattttataaaaacaatgctcttttttgttttttattgatgttattctttcagtttcgaattcataatttggaatatatttgttttaggtcaaaacataatttggaatcattttgcaattttacgttctttcttaaatagtttgtgtaaattatgcaggtaatggcattgaaaagcagagaaccaatagaatcaatcaatctgaacaaagaaacagaaggatcatgtagtgacagaagtgagaca

SEQ ID NO: 19371 - DNA, 645 bp, Arabidopsis thaliana
gcagttcatgtaaaagaaagtgctaatgaatgcaaaaaaagagagagagagagagagctttacatctttcacaccaatagcagcccaatctccatcatcctgcatcaattgaaacagataagactttatcatcaacatcaataaacaatctaggacacacagatcataatatagcattcagtaaaacccgggcagcaaccaatgaatccaacgttacctttaagagaccacctttgaccatgatcttttggcgttctggtggaactccagtcaaatcatacaactgagccttgaaaacataaggaggcagactaacgtcaatctcgataccatccaacactttcttttgccacttcacgcttactgtcaaaatcaaacaaaaatcaacaacaaattaggatttacatcagtcaaatccaaacatcatccactatcccagacgacacaaacttcactatcaactctcggcaaaatcaaaaacctaatcatcggaatccagattacgaaaactcgaaaggagtacatctacaacaacaccgacagagaaatggattcgaagaagtaaacgaggagaaatagatcgattaagcattagttatcgaagaaatcgaaagagaaggaacctgtaggcatcttcgctgtgag

SEQ ID NO: 19372 - DNA, 631 bp, Arabidopsis thaliana
ggtattgttgaacaagctaaatctcagtccttgaataggcaaagctctctttacagcttaacacttgatgaggttcaaaatcacttggggagttctggtaaagctctgggaagcatgaaccttgatgagcttttgaagagtgtctgttctgttgaagctaatcagccatcgtctatggctgtcaatggtggagcagctgctcaggagggtctttctcgccaggggagtttgactttgcctcgggatctcagcaaaaagactgttgatgaggtttggaaagacattcagcagaataagaatggaggtagtgctcatgagaggagggataagcagcctacacttggggaaatgacgcttgaagacctgttgttgaaagcaggagtggtcactgagactatccctggttcgaaccatgatggtcctgttggtggtggtagtgctggttcaggtgctggtttagggcaaaacattactcaagttggcccatggattcaatatcatcagctcccatcaatgccacagcctcaagcatttatgccctatccggtttcagatatgcaagcaatggtgtctcagtcttctttgatgggtggtttgtcagatacacaaactcctggaaggaagagtgtag

SEQ ID NO: 19373 - DNA, 729 bp, Arabidopsis thaliana
cacattccatttaacagttttacaaacagtctggattacaagaaaacaaacacaaagcacatagagaaacagtgatacaacagcttaagaacagtaacaacaaagaagcagatacattcatacaatcaaatacagaaaatcagtaaataatcataaacagagagatacagattccttccttctatggaataataatgcgcaacgaacacaaacggacctttttttctgttgtcatggcatcaatgtaagcttagcatcaaacacaaaacctcgacacaatccatctgcataaccagggacgccctcaatccatctccaaccttgccaacaatcccacattgcaagcttccccatccttttagcagagaagtaaaccctatctccacctccaaaaactttaaacttactcgattcttgaaaacctcggtacatctctaacggcattctacctgcttcttcccactccaagctttctagatcaagcctaagtatcagaatcgttgaacaagccgggttcaacgaaaacgtcgatttcaatccaccgatcataagaagcttagaatcaccgttaccgcgcaataaacgcggtcgtttgatgatatcgaatatatcaccccattcatgtttctccaagcaaacccaattggtatgagtgattgtgagattcgtcaatttacatgagaaaagcttccattgacttctccatggagatccacatcacacaatgcg

SEQ ID NO: 19374 - DNA, 791 bp, Arabidopsis thaliana columbia
gatcgttgatgttgtggatgaccactcgatgatgcaatactcacccgatcggagattagtcgaatcgcgtccaacagtttagccaccatcttgtccatctctagattttgttccgcaatcctttgttcaaatcgtgatctagttcctgccattgattccgaggaaagagatggctctgatacctttgatacagttaaaccacaatttctcaattaacccaatcacaaacacacattgaatcgtcgttcataaaacgagaatcaaaatctcatgtgataaagcttagaagtagaaacagctctatcacaatgaagaaatagctatgataattcaaaatagaactctcagagaaacagagaacaaatgaagaagaagaagataacaactcaacacaatttttcatgaatgattatttttcctcttcgtttccttttaacgcttcttttctcttctgttagcatccaaacaatctcagccattgatccaacttctaatctccacagtacacgtgttcattactcctttctcttttcctatatcagtattgaaagcgtaaaaccacataatcactcgaacaagactcataaaattcaagaagattaacagaataaaagtaattgtaatcgaatcaagtaacagagaaacacacatcagaaacagattcatcggaatttgggagaccgcttataactaaccttagaatggattaacctagccgaaatcagagaacggccttcctagatcaccatcgccggtgacccgccgcaaaaccaccgttactcttcggcaga

SEQ ID NO: 19375 - DNA, 2090 bp, Arabidopsis thaliana
tcgtctctttcttggtaatgtccctagaaattggatggagtcagacattaagaaagcagcaaatagaattggtccaggcgttcaaattgtcgaactcccaaaggtttgtctcctgcaacttggataagtttcagcctatagtgtctattaagttatttctgtaactttcatctcaagttcatgtgtaatttgtaacttacagaagtattttttctatagaaatttaagacatgcctttctcactcagttgatcggttttctatttggttttgttaaaatcacaggaaccacaaaatatgggccggaatcgtggatttgctttcatcgagtattacaaccatgcatgtgctgaatactcgaaacaaaaaatgtcaaatccgagttttaagcttgatgataatgccccaactgtaagctgggctgaatcaaggagtggaggaggaggagattcttcggcttcccaggtttgcttcattagaacctttcttactaataaataatagaagcagcaacaaagagacatgtgttcaaatgtttttctttcaaaaccatgaaaaagatcttactaatatgctgtgtggaatgattgcaggtcaaggcattgtacatcaagaacttacctagagatataacacaagagcgtctaaaggcattatttgaacatcacgggaaaatactgaaagtggtgatcccaccagcaaaaccaggaaaggaagacagtagatacggatttgtgcattatgcagagaggacaagtgtcatgcgagctttgaaaaacactgaaagatatgagattgatggtatgttccattccgaataatattcttccgtatcctcacatcttttgatgtctaaataccaaattgtatcctcatttgtatataggtcatatgttggattgtactctggcaaagcctcaagctgatcaaaagacgaatacaaatacagttcagaatgtgcagaaatcacaattgcaaccaaactatcctcctcttcttagttatggcatggctcctagtccctttggtgctctcggtggatttggagcttctgcctactcacaagtgagatttctactacttatcaatcaaatcattatcttttgagaaaacgttataacaatttaagcctaaatttgtgggaattgtgcagccattaatgcatgccggaggtcacgcagccggtggaatgtcgatgatgccaatcatgttacccgatgggagaatcggatacgtcttgtaagttcttttctatattcctctatactgatctcatgcgattcctatatataagacacatgtactgatctgacgtgttgaatgttataggcaacagcctggactagcagctatgccgcaaccaccaccaaggcattctccaccgtataggggaggcagcggttcgagcagcagcagcggcagcaaacgaagtagtgacaacggtagaggacgaagccgttacaatccttattagtaatttcataattatgttttctttattgggaaaaacaccccaaccaagacacgaaaaacaaaaagtcaattttaaccattgtgtttttgtctttgtgccatctgttttgagttttgtgtgactcttaagaatttgcgggtagcaatggggttcgtttaactcgtgttctgtatatcattggtttcctgtttgttttttaaaaaataatttgtttattcatgtctttttctgattattttatgtatggtccaggcttactaaagcccaataaaggcccaaacttgttatcgtttcaaattagcacaatcactcacgtcatcatcatattaaagcaaaatttgtatccgccccgcattatccaaaaccctaccggccggctgttcaattctgtatcctctaacgccgtctcgtctcacaattggtgagtttcaatctcttctaattttcgtgtttgcgtttagagcgtttgaaatacgattataacaccggaaaagcaaacgccataacaacgatgagaaatcaaggttttacgaaggaggataggatgaatcagttgcctgaagatttgattctgcggattctgtcttttcttccaacagaacttgtcatagcaacga

SEQ ID NO: 19376 - DNA, 2044 bp, Arabidopsis thaliana
gcagcgaaccaatcaacgtgccgtagacagagtggcgtttcatgtacaggctataaacgccgacataaaccacaaagcccatcacccccagccagcaggccagcggattcgcgccaaaccacagcagcataaagccagcaatacccagcaacgtggcgtacaccagcgagacagcaggagagatcaggcctttcaccagcacccgattcttcgtcctttccatctttctgtcgatatccctgtcgatgtagttgttaaacacacaacccgacgccacaaccagtgacaccccaaccagcgtgtagataaacaggggataatcaatgctgccctttgaggccagcaggaatcccccaatcaccgagatcaggttgccaaagatgatgcctggtttcgttacttgcaggtattgcttaaacatcataaccgccgctcttagtgcatcatcatgttgtagttgaggttccacataatccagatggagcctacaaccaggatagcgatgattagcacggtgaagacaaacgccgtcatgttccagccttcatctgatttggtattcatgtgcaggaagcacaccagatgcaccagaacctgtaccactgccattgccaggattgttcccagaattacggccggagagcagctcctgtcatcaccatccagaacggaatcaccgtcagaatgatcgacaggataaagcctgtcatgtaggtttttacgctgccatgggacgcgccgctgtgatcggtagaatgactcattacatcgcccccatcagataaacaacagtgaacacacagatccaaaccacatccaggaagtgccagaacaggctcaggcacatgatgcgggtacggttagtgctggtcaggccgcgacgggcgatttgcaccatcagcaccgccatccagataagaccagaagtgacgtgcagaccgtgcgtgccgaccagcgcaaagaacgctgacaggaagccgctgcgatccggacccatgccgttaacaatcaggtgatggaattcatagatttccatcccgataaatccggcaccaaacaaccaggtcaacgccagccaggagataacctggcttttgttgtttttgtacatggcgatacggccatgccgtaggtgatggagctgaacaacagcaagaaagtttcaaccagaacgaacggcagttcgaaaatgtccttacctgtcgggccgcctgcggtgcccgttcaccagaacggcataggtagcaaacaagatagagaacagaatgcagtcgctcatcaggtagatccaaaatccgaagattttggttccgcctgcatcgtggtgcccgtgttcgtgcgcgtgggcagtcgcgtgcgtcaaagtatcagttgccatttttcagccctgccttagtaatctcatcgaaatgctggttttccagtttttcgatttctgccaccggcacgtagtaatccacgtcctcgtcgaagcttttcacgatccaggtgatgatcatgcctgcgaaccaacaatcgccagccaccagatatgccagatcatggcgaaaccgaagatggtggagaaagctgcaatgacgatacctgcaccgctgtttttcggcatatgaatttcttcatagtggtcaggctttttatacgcttcgcctttctctttcatttcccagaatgcatcacgttcgtgaacgtgcggcactacggcaaagttatagaacggaggcggggaagaggttgcccactccagcgtacggccaccccacgggtcgccagtcaggtcacggttctggtcgcggtcgcgaatagaaacgtacatctgaataacgaggcagagaatacccagcgcaatcagtactgcaccgctggctgcaatcatcagcatggtgtggaactgcgggtcaatctgctggctcaaacgacgggtcatgcccatgaagcccagcgcatacagtggcataaaggcaacgaagaagccgatgatccagaaccagaacgcgcgtttacccaggtttcgttcagtttgaaacgaacgctttaggccacagta

SEQ ID NO: 19377 - DNA, 1487 bp, Arabidopsis thaliana
tcggcaagctccccttttgcttgggagctttcttcttcttaggcttgtcgactctggtcgatggccttcggataggacccatgccgcctagggttatgacgcgcctgggttcctgccgctaggactccgccgacctcatctttgacgaactatcgtcgtcgccatagctgtgattgctcttgttctgggaatcgtctaagtcactcatctcttgattttgaagaagagagacgatcgatatgaaggaaagaagagagaaagcagagaaagtacgaaggagatagcggaagaaaagttagagtttctatctctaaaaacaaaagttaaaggcagtaaatagttgagaaggagagaagttaccttgggagtcgtgtgagttgacgtgaaatcgagtggagatgtgggaagttatttaaagaagccatcatcaccacgatttttgagattgtagagatctcttccccgcgcctgatctgagccgttagatgcggtgcgctgaagagacgcgtcatctcgaccgtccacgtcacccgcgatttacctcgcgtatctactcgatatctttcggtttaagaatctaagattataccgttttcattgagtttatcctcagaaccgattgatcttatcgtatctactaccttatctacaatattttcgcaatcttacttggcttaggtgtccgttcatcgagttcgcctacttactcaatgggctggatggcaaatgttggagctggatttctctccaggaatccacctgcaaaaatagcatgccagcccactaagcccaccaagtagaggacctgcgcagctctggagcccatgaacagattaggtatttgggcctgataagcctagttacctgatgaagggagataagcgaataacaacctaggaactgaccaggagatattcgcggagcggacctgatatctcggaactaacctgccgaatatccaggagaatatccccgcggatctcggatggagctacccacgtgcgtagatctatgtaaggaagcaaggacgacttggaagacatatacattcagcttaacacttacacttatactttacacttgtaatctcattctacattgtaaaagctctactatcatcaatacaaaagtttattcgttttcagcaatataaatttcaaagttcttgtgaagatctagccctcctttctcataaatctatttacaaatctctagtatggatttcagaacccacaaaggtcaatctcaaaatattggtctttatatgtctttaccattcgtgatgatatttggcaagatttagctatggattttgtgttgggattgccacgtacacaacggggtgtggattctgtgtttgtcgtagttgatagattttccaagatgacacatttcattgcatgcaagaagaccgctgatgcatccaacatagccaaactatttttcaaggaggtagtgcgccttcacggggttcactggcggccgtt

SEQ ID NO: 19378 - DNA, 1643 bp, Arabidopsis thaliana columbia
tcgtttcaatatcaatcaaacgatcgcatacaaagataaacttaaccggatagtttcgaaaatacaaaagagcaagaccaccactgttacctataggttcaacagtttgttgataagtaggtttttacgcctacttatatgctgaagtgaggttcaattcaatttcccttaaacactaacatgtcgatgcagctatagggagtgtcaatccaatccactgttattgctagcaatcaagatgtttacagaagcaactaagtgaagccagattatagagatggttgatttctagtaacaatcctaggtcaggattcgaacaacaaaaataagaactttaaaagccctactcgatcattgggtcaagtataaccaacagatgacaatattaagaactaaaatgcaatcaacaggggatacaaataataggtaaataaaagtgcaatcagggggtgaatacaaataaatctaagaagaatagaagtcctaaggatggattcattgataagggcaactctagggttcatcaggtggctaacaggtgaaaggcaaataccctagacgatagattcaaaaccagatcaatccactctcgtatcattgatcctcataactttatcacttcctaatctcaactctcgttgaagaaacatagcaaagcaggctttaatcaacaatctatcaaagtcaataagtagtctaaacatcaaatctcttggactagagtctacaaatctctggaattcgtagatcaagcattcatttgaacgtctttaggacgctggaataccttgggtcgaattccaaacttaaatgagcgaaataagcattagggccaacgattccaaaagggatctaacctaatcttacccacctgaataacctagagattaccctaatctaatccatcctcaagaaccctaatcactactcaagcaatataatcaagattataaacccaaaaattactctaaacatatcaaaatgtagatctaaacaagataaaaaactttactcaaagaactaaatgcaaaaacgaaatagattaagagtaattaaggtttcaagattctaaaacacaaagaaaaactacagaataaaagcttggtcttttggacaaaccccaagagacctatttatagtaaaacctcaaaaaccctagattcactagaagacaagagacttgaggcggtttagatggatgctcgatctaggggatcgagtaaagagggtgctgcaaagtctgcgcctttgcctccatgcttcgagtgatcaattggtcgagtagttgcttcttcctctcctcttcttatgctcagctgtctcgttgagtggggaaatgaggaggatctgaaggcaccttgaacgatcaacaagtcttttagaatccattgcccttgatcgagtatttggtcgagtagaggaccaagtaaagggtcgagtggctatgtactgcttcctctaaagatgccttcgatagagtgattggtcaagtgaattgctctgctgcttccctcctggtctgataaagtagaggggcgagtgatttccttgtaacctccttttgaacctgaaaacacaccaaaacatccttagctaaatgatgacgaatacattcgtaaactaagtaaaatacagtgttggaa

SEQ ID NO: 19379 - DNA, 905 bp, Arabidopsis thaliana
tcggatcggatagaccgatcgtcggacgggtcggatgggacagtccgatcgtctaacagaacgggtcggacagaacgatcgtcggatgggatagatcgagaaaagtgttcgaggaagcacaaagataagtgcatccaaacacacccaagggtcgcccatggatgcaatcttaccagtaaagggagaaagcttcaagaatgggtaaggaaacgtgattcaccatataggatcaatatcgcggccgccttcatgtatctatctcctcagctatggtgaaactgatcagagatcggtaagaccaaagggtgactcgacggataaccaacgggaaagtccacggtaaaaaccgatggacaaaacggatgttggacccgtgagcaaacctaaggccgacggaagaaggatttcatgggctagcctacgatgatccgatggatgaatccacggacccttgggtgtgataaggatatagttcggatcgtatggatggatcgataagccgaaagctttatcgaccaccatagaccggacggataaacggttagtaaaccgtgggcggtcgtagtaaacgaccggaacggaaacatggatggttcgataagccaagggttcaatcgtccactgctggaaggacgattgcggaatctgctggagctgcggtgagagcagctacgattcgtcatcggagtgccgaccttttgcttggaagctttcttcttcttcggcttttcggctctggtcgacggtggacggattggacccattccgcctagggttataacgcgcctttgtacttgtgcggagacgccgccgacctagtctctgacgaactctcgtcatcgccgtaactgtggttgctcttgttctaggaatcctctaggttgctcaggccatcctgatagctc

SEQ ID NO: 19380 - DNA, 593 bp, Arabidopsis thaliana columbia
  unsure (1)..(593): unsure at all n locations
gacttcccctatcgccagtgtgctctaaagctttcagcggcgttctgtcccaaaattccactcgaaactgaatcaagcgtactgcctgatagctgccaccgattgtccacgcaggctcctgctgatctgccgttacccacaccactttttgcatcaacttatcattctggctatcgggattggcagtgccgtctttgaaacccagcaaattaatcggcgtctctttgcctttactacgcgccgcgtgatcggaaataaacccttcccgcttccagcgcacactgagcaaatccggcgtgtgtttgatgatatcgcgcagcantgtgataaccgtgtcctgggtgttggcgcaaatctgtagcaacacatcaccatgacataacgccgcatccagcgagtcgttggggaaacgcgtcatcttctgcagcttttttggcatctgtggcgcaaggcaaagcgctcatcaaacaatgagtgacccaccgataacgtgatggtgagattatcgggcgcaatgtagccgcaagaatgctggaatcgagtggtggcaggcgacttggtgatatgacacaagcgtcaatatgcaacccatg

SEQ ID NO: 19381 - DNA, 578 bp, Arabidopsis thaliana
tagggagtgcaacaggttgtggaatgaccgagctgctaacgtcgcccgtactacaaagaaaacctaagctcgtcttgatagagaaggcttatctcgagccagaggacctcgtcgggccaaaggtggatgctgagaatcaagccagagcgcctgaggagatagtgggcatccttatgcagagaggcgcgaagattgtagcatctgaactcagcggccttaaggagttaaccaaaaaagggcgaccgacgaagtcaatgccttgaacgttatcgagctcggggacggtgatctgaacatgtccccagatcggcttggctcaaatgtcgacctcgttagcggaagcgatattcgtcgtgtaagcgatgaggaaacgaaccagacgacctgaataggtcgcttttgtaatctattttggaatatcgatcgtggacccaattttcgggatgatctcaaaactcttatttaaccgtggacccacttccagggcggtttttaatcttaacttctattttcgatgattttctatcttgcctgtttctgaagcagaatggttctttcttccatttatgagctttgtc

SEQ ID NO: 19382 - DNA, 1934 bp, Arabidopsis thaliana
aatatgccacctcccccagctcccatcgaagagactcggcctttggacggagaggcggctacgtcaaatcctcccgttaatgctggcccttccggtgttgatcaggtctcccatgagacggtcaatccggattctcaagacaggatgtgtcttgaaggggacggcgtcgttccagctcaagagatcgccgagtgcgatcaaaatcaatctgttcaggtcgtcgaacctgaagttcaaagtgttaccggcgaccgctccgtcgtcgattatgcctccgcgccagcgagcgaagaggtcaacgcgggcctaactatccttgatgaagacaaggatgaaaccgttgcggagctcgggatttccaggaggtcccgtgaggagaaagggaaaggagtggctacccaatccaagaagaggtcagcttctgaagccggtttagatgaaactgctgctccgaaaacattccgcctgtcgcgaggtgagactctcaactccgaccagtttacgttcaagtattctggcgagaaattccttgtgagagatcaggaggccgccagtcatctttggcgtaatttgatgctccccgggacgaaagattttcctaatcccgacgacctggttctgaaagaaggatatcagaagttcgccaggtcatcacttgaggtacacgctagttacatgttttcttgtggctcaatatctttgtatttcggctttaaccgtctctttttccagaccgccgccctggccaatgatctgatcgcgacatatgatcgcaaattgaagctgaagctcgccgacagagaggccttcgataacttgaagaagtgcgcagaccaggccaaagccatctatgccaaagacatgaaggaaatggctgcattgagagatgctgccgagattcataaagcggagatgagctcgttgaacgacgaggtcaagaggctcaatagtcgagaagctgatcttcagaaagagttcagcgatcttcaggttgcattggttgctgtaaaagagcacggggagagggagtgcaacaggttgcggaatgaccgagctgctaaagtcgctcgtactacaaagaaagcccaagctcgtcttgatagagtgaaggcttatctcaaggagcaagaggacctcgtcgggccaaaggtggatgctgagaatcaagccagagcgcctgaggagatagtgggcatccttatgcagagaggtgcgaagattgcggcatctgaactcagcggccttaaggagttaaccaaaagggcgaccgacgaagttaatgccttgaacgttatcgagctcggggacgatgatctgaacatgtccccagatcagctcggtttttcgaggcaaacctcccaagttgctccagtggcggaccagcacggctcaaatgtcgacctcgttagcggaagtgatattcgacgtgtaagcgttgaagaaacgaaccagacgacctgaataggtcgtctttgtaatctattttgaaatattgatcgtggacccaattttcggggcgatctcaaaactcttatttaaccgtgaacccactttcggggcggtttttaatttttacttctacgtcagggtcgacctcgcgtcgtatgagcgtccgttctcggggaggaaaaggatgtggacggagtttcctggtagattttttttaaatagatagggtaaagatatgtcgatcccgattagattctcatagctttttcttttgttgcagatcgatacaggcctagtccggattttcccgtcgagttcgaaggagttttagaggcgatcttccgagctcgtcgtcgtacctggaaagacgtcacgaggtcgcgcgtcaacaggataatggggaaggtcaggaaatccttcattagcttttaaacatgccacctcccccagctcccatcgaagaggaaagacagcctttagacgga

SEQ ID NO: 19383 - DNA, 1446 bp, Arabidopsis thaliana
tacctcaagaacgtaattaactgctcataatttcacttatatctgcagaacctcattgacctggcaggttctgagagctcaaaagctgaaaccagcggtttaaggcgcaaggaagggtcttatataaataaaagtttgctaactttagggaccgtgagttcttggttctcactgtttttcccaagcaacaatagtttttcgaatttagttgaaatttaagaacttctttggctttttccacctcctttacagctgaaaagcttggttggttttttttgccttccagtcattatgttaagtaatctcccaaaagctgaagttggtacgttcttttgcaattttgtaggtaatatcaaagcttacagatagaagggctagtcatgtaccatatagggactctaaattaaccagactgcttgagtcctcactgagtggtcatagacgtgtatctgtaagtgttgtcagagatctgttttagcttcttcttctaattaatgacacacacaacatgaccataggcagcagaaaacaattgttatgatcgatttaactgattgattgttcaatctggatatgatagctcacatgacaatgactcctgcatcaagcaactcttagttagatagtcttcttgtgtctctcttgccaccttttcactcatcaagcaacttgaccacttgtatcgctttgccctctaaaattctgcaatgaatctctcattattgtatcccctgctcatgcgctttctcttataacagctggagaaggtaggcacttgcatgtaaattttcttacgatttttttgtgttgattccagtagtttcatttcattctcttgaatcttctacttttttctcatacttatgtttatcactgcagcaagtcatcttgattgaattttcgtgcactgacaatattggattcacaagtattgatttgctcagcagcaatggagccatacaatgatgtttaccatggtatgtttatttatctctttcaaagcatggagagatttatttcatttctagccccctgcataggttaaaccaagctatgttaccaaacaaatttcttaggaataggtttaggcttcagcttcagggtaaaaagtttcttggctcttgattctgagatttttggaatttgaaagtttaatcatttcctacacttgttgtaatgtgcaacgactactgtggttttggatatttttctgtcagttcatagtttgtgatcattttgcgttgggccagaaatgcaaattacagttaattgtggtttggtttacatggttttgaaattgaaattgatttcggtttggtttactttggttttgaaattcaaattgaatttcgttcggttaacaattggttttgagacagaaaacccaactaaaagaatccgcgatggagaatttggagagatatgcgcgataaaaattggcatgca

SEQ ID NO: 19384 - DNA, 1083 bp, Arabidopsis thaliana columbia
attttagacacttaggcatttaggatcatcttgcatacatattgcatgttttggtgtgttttcaggtgcaaaaggagcttaaaaggattctactcgaccctctactgtatccaaccaggagggaagcagcggacgaatctactcgatcagttcactcgatccaggcagctaccgaggaggcagaaattcactcgactagtttactcgatcaaggcagctacgaaggaagcaacatatctgtctacttgcccctcttactcgatcctctactcgacccctttactcgatcaaggacgaccaactctacaagacttgttgatctatcaaagcgttttcggatcctcctcattcctcactcaaccagacatctgagcataccgataggagtggaagaagcatctactatgtagactatagaccaagagattggctagattgcttattggctttggtagattgttgcttaaaccctgctctgctatgtttcatcaacgagagttgggattaggaagtggtagagttatgggggtctccgtcacgagagtgaattgacccggtttttgaatctatcatctagggtttctgcctttcacctgttagccacttgatgaaccctagagttgtccttatcaataaatccatccttaggacttcaattcttcttatatttatttgtattcacccccgttgttgtacttttatttatctgttatttgtatcacctgttgattgcattttagttcttaatattgtcacctgttggttctactcgacccaattatcgagtagggcttttaagttcttatttttgttgtctgaatcttgacctaggattgttactagaaaccaaccatcactataatctgacttgacttagttgcttctgtacacatcttgattgcaagcaataccagtggactagattgacaccccttgtagttgcatcgacatgttagtgtttatggggaattgaactgaacctcacttcagcatataagtaggcgtaaaaacttacttatcaattagtcaattattgaactgaccttgttaacaaaagcatcgacacaaaggacatgttggacg

SEQ ID NO: 19385 - DNA, 1101 bp, Arabidopsis thaliana columbia
tacttcaaaattgaggtgtgtcccaaaaaatttgaaaacttaaatttcgagcaagttcacttcgcctatggaggcttattattttttttattttttttgaacaagttgtttgcttgaggaaggctttaaacctttcaaattttcgatccctaaaaggtttttttatttaaacaatgaaatgcgggttggcggagtctgcattcttagatttcgaccttgtggttatactttgagaaaattggatgatctggcctttcctgtaaaatgcgataactttgctcggcttaacgcgagttcccactttgagtttagtcaactcgataattttaggggcttgggccaacttgtttcgttggccattaataggctttatctttaatgcgacggcttacttttgtaccttgagaaattgaaaagattgcacgtccttagggcaataattgaacttcctcgatttccaaaaatggtttaaaccattcggccacgccgccattattaattttctagttccaaggtaaccctaaatttcctataaataaagtccttattgtgttcataattccttccaacaatgatctcagaaatttatctccttgatacgtcgaagatggacaataaaattgcgacccccgtttgtcccgtggatcccggcagccctctttacgttctggtgatggttttgagccatccggagtcctatctcctcatgctgccttccactttccgccaaaagataagaaagaggcgtatggtttcatcgaaaaggtaatcgcattaaaccctactgctcctcttagaatctttcgacccttattcgtttctcttggagtaaggttgttgaaaagcatcgtcatgtatgcgaggagagggagcgtgtggagcttaaaaggcaaacgctagaagccgcatcgcccgagtggaaaggaaagtgagggccttggagagcaatcactttcagtgggaatggaggaactttgattccgttgctaagaacgcgaccatgctccagacgtttcttcgtagtcaaggtaaagttcacggacccgtggctcgtacaaccaaagtgctccctccggtagcgaagaggatgaagatgaagag

SEQ ID NO: 19386 - DNA, 1374 bp, Arabidopsis thaliana columbia
  unsure (1)..(1374): unsure at all n locations
atgtcttgtcaaagggggggattccgcgagacacttagagacaaagaccaactcgtcagatcgcccgtctcaaccagctcgtcatctcacccgtctgaagcatctcgtcagccggtccgtctcaagtagctcatcagcccgcccgtctcaagcagctcgtcagctcacccgtccgaagtatctcgccagccggcccgtctcaagcagcttatcagatcgcccgtctcaagcagctcgtcagctcacccgtccgaagtacctcgtttgcccatctatcttgagtagctcgtttactcgtccgtccgaagtgtctcgccgacttgcccgcccaaagtaactaacctactcgcacgtctcaagaagctattcaactcgtcacttatccgccggatcatccctaaaactgcctaactcgacatacgaccttcctccagtaatggcctagctcgtttatcgcgatatgaactacgtgtggcttgatccctttctaagggtacgtaggcagccttttacaaggttcagctataaaacgaataaactctattcttcctcggacattaagttcgtcttccggtctcaagctcgcctttcatctacaatcagctcgttcttactccatcaatgctcgttgaagaaatcatcctttgaaatccgtccaattcgcctaagtcgcaggctcgtctttaatagaaagattcttccttccctagagatcccattttcgtacttgtgtgattcgtgcatcaacagttggcgcgccaggtagggggatagctcgaagatatctctcaaaactacgaccccgcgacgaagcaaagtgacaacaaacagactacatggagcattcgataccgactcgtcaggctctggaagtaaaacgacaacgtcgatccccgggagagccagtcactcgacctcttcattcgatatcgcagcatgttcgacaagaaaaggacttcaaggaactatcgaccccatcatcctaggcgatgacacttccagcccggcagtcaggacaataacactgaccaacgaggaagtgccgctgattaaagaggaacatcccataacctcattaaacataccgacctcgttatcactcacgcctaaccaagaacaagaggagaagtcatcaggcggacgtcacttggagaacctcgacgatgacactaccagctcggcagctcggacgataacgtcagcgcacgggaaaactcaaataaaggaagaatactactcggcgtcatctattgtaccgacctcgttatcgcccacgcctgaatacctagcgttgcaaaaagaccaaggagaagcttcacttagccgatttcatcgcctggacgatacggctanagccaaccaacgcggcgaaga

SEQ ID NO: 19387 - DNA, 671 bp, Arabidopsis thaliana
tttgcgtgtattagcattatgatgtaatcgacatccttttcttagccaccaaccttgtagagttctagtctttagagaactgatcattttcagtagctgagacgtgaaaaccttctatatttgagctctgcgatggctttcttttggtcgtaaagccaaagcaacattgatgcaactgcttccggtagccatcaccgatgcaggataagacttttggtaattgaatagaattgctcagacaaaggtaggaaataaactctagttctcatttctcttcaaagtttacatttttttttttttatgtttttacatttttgtgatagcaagtttgagaatgaacatcataaagatacaaagttacagatttttgttgtggaagcaaatactaaaaattacaaaggtacagtggtggctaaagatacacagaccgaactgctctgacttctctgactagttaacaacatatctcttcagcgaggctggtggatgtttctcggagcagcagcaaccctctggtttccccatttcgctggcttttccgcatacttagctggttcccaatcgatctcgggctcctgtttccacttgatttcttaacatctcccattctttcaaagcctgatgatatatataaacaacaattagcctcacaaatctactgatcttggatg

SEQ ID NO: 19388 - DNA, 1981 bp, Arabidopsis thaliana
cttttgacaattataagtgcaaaacaaagaacaaccaaggaacttgcacaagatagaacacccatacaagggttccctcatgcgttagttcttgtgacagtgacatgttgtccagcgatcatatacatggcagactcggtgtttaacatactaggcccaccaattccaatagagaagttggtgcagtatgttttggggaggagcttgaatatcaatgtgcatgatgcacgcactatagaccaaaatggaatggtaatattttagttcaatagactcttctttgtttttggtattaaagttgtatgtaagtgccttaactattccattaatccttctattttaggaccgagtcacatcactactgaatgaagagctccttgcaagagagatcgacttatctttctctagtaaggaggatgatgaagaagtttcacatctgctgctcctaataatggaggacacccattcgagcataacagttggagtggtgacatggatgctgctgatgttgaacaccaatctgaagatgagtgcatggcagatgaagctgtgaatgtgtctaagagtgatggtgaggatgagatggatgttgagggcactagtgttgctgcggaagataaagaagagggtgtagcttgtgacggtgaagacaacttggatggtcatgtggataaggatgtaccggttacacagacagataatgttagtgagtctgctaatggagaagaagcagagcaggaagtccctgttgctggcaaaagggaaaacacttatagggagtctgctggatattcaattagggaggcacttataaaagaggcggctgctgaagttgagaaacgtattctgaagattcaccaagaagacagagatgaattgaaggcctaatttgatgctgaactcgttaggcataaaaaagtattggtgtcaatgcttggtgattgttttatggaggctgtaaatgggataaatagacagccgtcacagaaaggagaatgtagcaaatgtttatcggatagctgctctacaaaggttaagtaacctttatttgcaatatatgtttacttaaacatttgcaactatatgtgactttcgattttactatacagcttatacttatcttaacattttgtttgatgcatcaggtacaaagaagttctgagcagcaaggaaataagcatggcggttcagtgcctattgaacctcaaataagtctagctggaggaagtgacagtgtaccgagtgcttgtggcatagctggtttagttggtgtttctgaagggagcaagactgctacttttaatgaggtgagccaacggtaaatattctaactcatttggttgtgttgttgataattgccatataaatggattatgaatcaaggaggaggtgacgattgtagaacatatggaaggaggaaaaaaacctcttctgaaatgagttcacacactactaggccttcaaaaagagttaaagagaatgagcacgtggcaagaaagaaggtagtactatgtatgtctgcatatttcagacaatagcacttgtttatgttgcattaactccttttattttcactattggatattgacagattggaaacatagaagaaatgcgtgcatacaaccctataagacttgacttatgtggtgaagttaaattatgtgttctgtttataaacgcttaactatgtacatgtttttatgtttgcaggatgtagctgcaacagaacaattggatgatgaagtagacaatctgggaccgaattttttattgggcctaactcaagaaactatggttgaaagcagcaggttgcctgcaagagggaagaagaagacaccaccaaggaaagttagtgttttgcggtcaagcaaccggataagggacaatccaagcatgagcaacagaagcgagactcggactagtatacaggttcagacgcatcaatcatctgtcagagtggcgggtaaaggacatgttagtg

SEQ ID NO: 19389 - DNA, 1410 bp, Arabidopsis thaliana
cggcctcggggtcaagtgatgtgatcgagtgtttctcgtggtggtactcggccagggagtcgagtaatgaggtgaaatggtgaaggacactactcaaacaggggatcgagtgttctgttgaggtcgtgaagtgtctactcgacctgggggtcgagtggtttgacatgatcaggtccgcttcttccaattagctcgtcaacagctccaaatcacctgaaatcaacacaaatatgcaatatgtatgcaaatctatccaaaacacgcaaagtgatgacgaatgatgagaaatggtataaaacagtgatgatatgatgctaaagtgatgacaaatggatgctcaaaatatgcaaaatacacacttatcagatataacccgaatttcattgattttatctatgttttaggtagaggattttgagtctttatgttatttctcgagtctttttagtgtcttttcaggtactctatgcaatgggacaacaatggagataaggagacattttggagcaaaagctaaggaaaaggaagctaaggacgattttggttcaggaatcagcgaggagtgtcgatcgacacactcttggtgtcgatcgacaccagtttcggcccagcaaaaacctagacgctttcaagtttcagaaaatcaaatttgcccctgaagacttccctatttgcattattagtccctagacatttttagggtctatatattatttttagacctaagtttcttttatcaagtcttttatcaaacttttgcaaaaccctattcatccattgttcttgagagattcattccagtttttaatacagtgaagagatcccttctttccccttctctatttactgtgtttatgctttctatctgaattatgttgtttgcttcattcaatatgtctgagtagccactttgctaggtatctgtagaattcttcatctctaattatgcctaatgctagatgtagagtaattaactagatcttgaatgtagacaatacatatgcccgccataggtatttacagttggatctattatttgatgagtctggtttataggtgtgtaataagaatcggcctatctactaagatgaataattgaactcattaagaatgcatatttaggttgatagtttctcggcttctccgattattattagctatagatatacggattttcacggcacgcccaccggttattccataattagagttcgagcttaagaatggttcgataacaacctagctttcattagatctactaaccaatagtttcctgagaataccctgttcctagctctttattaaatcgtttacaacacaatcaatctgttgtctttttactttgttctcttttatttcactatcaccctgctagcttaactcgacatttactcattgtttgaacaaaga

SEQ ID NO: 19390 - DNA, 1937 bp, Arabidopsis thaliana
attcttagagttcttcatcttgattattcttaatgctagttttagacagatcacctagaacttgatattagataataggtatggccgccataggtacttgttatttaaactatcatagatgagcctaggcatttaagaaagaataggttggctcatagaagggccctggtttagataataggtgaactaatcaagcttattaacaatgcattcttgagcataggatatctcggcttctctggttatcttagctttaattatagagactttcgcggaaccgcactggttactcttgaatcatagtttgagttcaagaaaggtgcgataacaatcttgatattagctagatctacaatttatctatctcgcgagataattccttagacctaacgctttaatcacttgaatctacaaatcatttacttgcttatttttctttaatattcaattacttcatttagcttattaaacaacatcataagtctattgtgtgaacatcgagagctcagtggaattcgacccttaagtgctaacaacgatctcttaattgagggagtaagcttaaggtaatttgagctatatcaaatttggcgtcgttgccaaagttctcttttagttcaccattagactaggtgtccttttaagcctaaatacaacttttctaccacctattcacgtgattttttggctattggtctcttgtgtttcaggcaccttcagattgagactcacgttttcatgggagattttcacgacggtgtcgacagacacaactctggtgtcgatcgacaccctctgcagaaccagacggctacaataggcgattttaacagaactgatctcttctacacaaatcgatcagtattcaagctacctccttttgaaagagatgactttgctatacaccctgcctactatgatcttgtatctagtgcaaagtttagaggagctcccgatgaatcaccattggatcatttggaagtcttcgaagacatcgtttcctctattaaagaagaaggtgtaccagctgattacttactttgcaaactcttcccccactctctcgcgagtagaggaacatcatggttgcgtcaattggaaccaggttccttaaccaattggactgatacaaagaatgcattcatgaatcatttcttcgatgagtccgtgatagaggcaattcgttttcaaatttcttctttcacccaagctctagcagaatcccttagagcatcttggctccgattcatgtcttatcagcgtgaatgtccccaacatggtttccaagagagccaactcatcaacatcttctacaaatgaatagacaagccataccagattcaacttgatgcagcgagctcctgtaacttcatgacaagaacaactagtgaagcattaatcctaatcaccaatgctttaactggtcattcgacgtaggaatttgacaaaaaaccaagcatttcagctgagaaagctaccaagagcaaagacactcatgtttcagcaatttctgctcctatcccagcttcttgcaggccaaacagagcttaaaagccaatataattctctatccacagggtttgacaatctacgctctcaattctccaatctctcatctccatccgctactatcaatgtagttacactacgcagcggaaagcagctcaacccaatccttcagcgcgaacaatcggctcagccttcatcatctccaattgcagaaaacgaatcagtgtcgatcgatacaccagggtgtcgatcgacaccaattactcttgacgactatgtttttcctttgttgagtggaatcgataatttcgcggaagaggaggaaacaattcccgatggtgtgatcgacacccatctcctgtcgatcgacacccagttcgatcagacaatgtgcaaattccagcttcaaccaagttagcaaatcggcg

SEQ ID NO: 19391 - DNA, 1158 bp, Arabidopsis thaliana
tagtaacgtccgccagtgtgctctaaagcttgctacttcattaaagaacagagcgtcattaaccattgttacaccgaaattgatctgaagattttccgtcagtacctcgctcccgcgctgggtgtaactcaccgctttgtcggtactgaacccttttgtcgcgttaccgcccagtacaaccaggatatgcgctactggctggaaacgccgactatctccgcaccgcccatcgaactggttgaaattgagcggctgcgttaccaggagatgccgatatccgcttcccgggtacgtcaactgctggcgaaaaacgatctcacggctatcgcgccgctggtccctgcagtcacgctgcattatttgcagaacctgcttgagcactcccgccaggacgcggcactcgtcaaaagacccccgcatgagaaacaggtgaaaaatgaaaataaaccagcccgccgttgcaggcacccttgagtctggggatgtgatgatacgcatcgccccactcgatacgcaggatatcgacctgcaaatcaatagcagcgttgagaaacagtttggcgatgcaattcgcaccaccattctggacgttctcgcccgctacaacgtgcgcggcgtacagctgaatgtcgatgacaaaggcgcactggactgcattttacgtgcacgactggaagccctgctggcacgcgccaggttatcccggctctgccatgggaggattgccaatgatttccgcttcgctgcaacaacgtaaaactcgcacccgccgcagcatgttgtttgtgcctggtgccaatgccgcgatggtcagcaactccttcatctacccggctgatgccctgatgtttgacctcgaagactccgtagcattgcgtgaaaaagacaccgcccgccgcatggtttaccacgcgctgcaacatccgctgtatcgcgatattgaaaccattgtgcgtgtcaacgcgctggattccgaatggggtgttaacgacctggaagccgtcgttcgcggtggtgcggacgttgtgcgtctgccgaaaaccgataccgctcaggatgttctggatattgaaaaagagatcctgcgtatcgaaaaagcctgtggtcgtgaacccggcagcaccggcctgctggcggcgattgaatctccgctgggga

SEQ ID NO: 19392 - DNA, 1914 bp, Arabidopsis thaliana
caatactgacggcaattcgaagacgcaacttattgaagttttaaagatttccaaattcgccccagaactttcccttatttctaaagaaggcccatcacgttttacgtcagcttcatgcacctttgattcattaaccttcagagttgttttcttccatctccgccccttacacgtttatgaggtggtcgatggatatcattggaccattgcataagtcaactcggggtgtgcaatatcttttggttttgacggattacttctcaaagtggattaaagctgaagcttacgttaatattaaggattcggctatgaaaactttcatatgcaagaatatcatatgtcgacatagtgtcccatacgagatagtcaccgacaacgaaccacagttcatttcgcacgaattcgaggccttttgtttggattagggaattaaaagttagttactccactctgcattatccgcaaggaaatggacaagccaaagctgcaaacaagacaattatgagcaatcttaagaaacacttgaatcatttaaaaggaggatggtacgatgagctccaacccgttttgtaggcttatcgcacgactcctaggtggtctactggggatcgagactcaattttctttggtgtacgggatggaggcagtggtcccggccgaactaaatgttcccggacttcggcaaacagaagcactgcatattacttgttctaagtatccattcgtcagcattttagtatcatatcaccactgtttcataccatttcacataatttgtcatcactttgcatgtttaggatagttttgcatgcatattgcatatttgtgttgttttcaggtgatttggagctgttggtgagctaattgaaagaagtggacctgatcaaatcaacattctcgaccacgagctcgagtacagtcatcctcgagttcctgaagtactcagccacaacctctacagcaaatcactcgaccgcgacactctatcattcactcgaccaataactctaccaacatggccgagtctcaccatcatcattcactcgaccaatcactctaccaacagggcaagtatcaccatcatcattcactcgaccaatcactctaccaacatgcccgactcccaccatcatcattcactcgaccaatcactctaccaacaggtcgagtatcaccatcatcattcactcgaccaatcactttaccaacatggccgagtcccaccatcatcattcattccaccaatcactctaccaacaggacgagtattaccatcatcattcactcgaccaatcactctaccaacatggtcaatcccaccatcatcattcactcgatcaatcactctaacaacaggtcgagtatcaccatcatcatccactcgatcaatcgctctaccaacaagccaagtaccacgatctctatcactcgacttcatactcgactgtcagcttcagagttttctccattccgcactcaaccagacactcgagcacaaggaagagaagaagactccagcttatcactcgaccattcacttgaccacctgggttgagtaccgttcttaatccgtctcgatactgcgtcgttttgagtattagagtttcggaatatttcgctataagtagcatgtattttaaattttcgttaactaagttttattccgcagacactgtgttcttaatctattcagtattcagtatttgcttttcatcttcgtttactaagttgttcatcctgttttcatattgctattactatgttgctattatgttttcattctattcatcgtttatgttctctgcaatgatgtctaagtagtgaataagtttctgaggatgggttagtgtagtttagaattctcagtatgctaggtggttgactttgatttatagatccccttctggattagtg

SEQ ID NO: 19393 - DNA, 1677 bp, Arabidopsis thaliana
tgctcagtcctatccagcagcttactatacccgttgggaactttgtcaattgagggaatcagagcatgcttcaaaggatcagtaggtgtcatcttcatgagaaattcgttagccagagaagagatagtatccacatagaaagtctgtccatcgatggtaggcttcttaaccaccttattcatgtcaaactgcattgtaagatcacctacatttaatcctattctgcccttccttacatcaataatggcaccagttgtggctaagaaaggtcttcccaagattagaggatctttaggttctttctcataagataaaaccacaaaatctgtaggaatgtagctagtaccgacttgtacaaggacatcgcataggataccatcaggtctacgaacagatcgatcagcaagaacaagagtgatttgtgtaggctctaaatctgtcaaaccaagctgaagcgcaactgaacgtggcatcaagttgacactagaaccaagatcgcacaagcatcgctcaaaactctcgttaaggataccacaattgagaacaaagctacctgaatctggaagtttatgtggagtcttgttctgaataatgtcgctaacctgtgtagacatcgtcatcacagctttctcaataagcaaatccttagtaaccatcctcctcacaaactgtctgaccataggagaagacttcacagcatctatgagtggcatctctacaatcaacttatccatcatagctttgcatctagcatcatcaagctcctgtatggaattcctaggactcttgggaaaaggaaccttgggtttggttacctttgccgcagctgaaatcgggttttggagaattcgcaggtttgggcagggttggtgtcgatcgacaccctgttggtgtcggtcgacactgtcgcgttctgtagtgtctgtcgtggctggtgtcgatcgacacccagctgtgtcggtcgacacttgtgtctggtctgcaaaaactgcaacatcattttcttccaaattaacgattttggttgtaggaagctctcgttgaagcactggatttagctgttttccactctttaacttaatagcacgaacatcttctttgtttgtagttaattgctcgatccgattgttcaatatttgaatcttcctattcatattgtcggataatgcaaccagtttgtgatcaaaatctgttgtttgcttctcttgacctttgagaatctgttcgagcatagatttgatcgtcttagtggtgtcgggtggagggtgggcttgggttgaagaagcatgattctaaatgaagcttgtactttgctgaaccgatttctgatgtgttgattgttgattgaagctcatgtatctctgttgatccatcttttctgaagtggctaaactgtcaacttgtgcaacatactgaacttgcgttttccttgcaatgtcaacgcttttggtactaactgcatttaaagccatctgatatcgccaatcaactcctttgaagaagagtcctaacaactgaacctcattaaaaccatgatgcaggcaatctctctgatatcctctgaatctgatccaaacggctttaaatgcttcagttgcttcttgggagaaggtagagatctccattctcagctcctcggatcttgcatcattaaaaaagttgttgagaaaagtaaca

SEQ ID NO: 19394 - DNA, 635 bp, Arabidopsis thaliana
caaaattgtctgatataattacgctaatttctgagtcaaaaaacttctcttgttcccttaagggccttaatcactattaaccttaactagtgacttaatctcaaacttataacacacctttcacacatcaacaacaccttcttcatcatctcctttctctgtctctgtctctctcttctctctcaaacctgtaatcatggcagctcctttgttgatgatcatcaagaaccaaacagatcaccgacaagatccgaatccgaacccgacccacctttcctcttcgatccaagaagccaaatcaatcgccaaaatatctctcccactgatcttaaccggtttacttctctactctcgctcaatgatctcaatgctcttcctcggccgtctcaacgatctctctgctctttccggtggctcacttcgccctcagcgtcgctaacatcacgggttactctctcctctccggtctctctatcggcatggaacccatctgcgttcaacctttggcgccaaaagattcaaacttttaggccttgctttgcaaagaaccacacttttgcttctcctctgttctcttcccatatctatcctctggctcaacatcaagaagatccttctcttcttcggacaagacg

SEQ ID NO: 19395 - DNA, 597 bp, Arabidopsis thaliana columbia
tgcctgtagtccgagttactaactctgtgtgacttgcttttcagtgtgacaatggacatgtagcttgctcttcttgctgtattgaactgaggtacaaatgcccatcctgctctctgcctattggtaactaccgatgcataataatggagaaagttgtcaaagcaatcattgttccttgccaaacgccaaaatggctgcaccgagacattctcttatggcaacgagttagtccatgagaagaaatgcagcttcgctctgtgctattgtcctgcaccaaactgcaactacgcgggtgtgtacaaggatctctacagtcactacgctgctaaccacaaaaaattatggacacgtttcagttgtggctattccatgcatgtatgcatggacttcgagtcgaaaagtttggtacttcagcaatattcagatggtccattggttgtgcttcagtgtttcaaggaaccaccacaaggattgttttggactgtgaattgtatagcccttctgctccaggagttggaaagttccctatgagctacctactcgacggcaggtacactttgacgtttagatcgcggagatgaatcggatcagaaagtg

SEQ ID NO: 19396 - DNA, 534 bp, Arabidopsis thaliana columbia
  unsure (1)..(534): unsure at all n locations
attaccatcaactcctttggctgcgtcgtggagactctctacatagccatgttcttcgcttacgccaccagggagaaaagggtaaaattattcccctctcctcctccttaattccgctatgtaattaaatacgaatattaaatgaataatatgcgtttttggcagatatcggctatgaagttgttcatagcaatgaacgttgccttcttctcgttgattctaatggtaacacatttcgtggttaaaactcctcccctccaagtctctgtactcggctggatttgtgttgccatttctgtttctgttttcgctgcccctctaatgatcgtggtaagctagcgttatttaatttaatttgtaaatttatttctagaacattatattttgaaataaaatgttaaatataaattcttgatgtgaataggctcgtgtgataaagacaaagagtgtggagtacatgcccttcacgctttctttcttcctcactataagcgcagttatgtggtcgcttatggtttattntcaatgacatat

SEQ ID NO: 19397 - DNA, 574 bp, Arabidopsis thaliana columbia
ctaagaaccttggatcaatataacaaaactttataatgaacatgtgatgaggtttgaaactgaaagcaaggcataacctggaaagacgccggcaaacccatcagccttctcgatcaactcctcaacagggatggatgcaatgttcgagtccttgtcggtaccgagaagagccgcagatggatacatattggttcccattccaagcctgcgaccggtttccttaccaatagcaagttgatcacctggcaacgtagttagagcgcaagttaggggaaaacatctaaataaccatggatttcatgggaaaaaaatgatgaataagaatagttaccagtgatcatcttcacattaacacctagattcaacgccctacgaatggtttcggcactgtcgtgtcttggagggtcaaaaagaggcaacaagccaactaaattcccatggtccacctgggctttcttttgttttctcgggtaccactaaaaaggaatatgcaattaaacagttgatttacaggccaaaaaaaaaacccaaataagaccaatgtaaaaattgcttgtaaaaaagtacctgacga

SEQ ID NO: 19398 - DNA, 962 bp, Arabidopsis thaliana
cctgtggattgtacaacatgcaactgcgtctgatttgtgctggatcagggaaaagaattagccacggaacctgattaggtttggagacacagtctccccaaaccctacaccaagtggaacaaaccgccctagctcgatgaaaatccgagagtctcagccgtcgcagaaccaatctgatcacatcctcaggaagctccgaccaatccacccccctagaattgagagcttgacgtttgtgaatcaaagccatatctaaaagtcgtcacaaactgcactctttttacttttctaaagccagttatgacgaggcaatctaaaccaaatcaaattccaaattcaatcaggatttgcttttgatacgtagtaatcatatacagtatatatgttcgagaaaaaaacataataatttatggcaaaaatattttggtaatgccacaagtatttagtaggttatttcatttcgtgacttttgttttttacgattatgcaatgttttgtatgtcttcaagactgcttaaaaataataattcggtcaatacaccaaccactaagagtctaagagtgagttaagagttaggttggagtaaccaaattaaatagaacattgttcacactctcaattcaccaaccttttgtttcctgaaatgtacaaacactagaaccagatccaaaaagacacagttctactatatggatgatggccctggcttcttcaaaccatctgtgtgtttagtcttctcatttgtgcacaactcaaagacaagtccactaaggtgaaagagaattattaatatatttattaatgatcaactttatgctaacatgttacagcatcattcttctcgttaaatattttactaattaatagacacattcactggatccaagaagcgttgacgttcaaggttttctttgtagtttgaagcaaaatggcgatatggtttcagagaattttcctgttg

SEQ ID NO: 19399 - DNA, 627 bp, Arabidopsis thaliana columbia
attatctctcttgctctatttcaaaaatgtatactttaggaaactgtagccatatgtgtaagaaagtttgtgttttgtggagactttttatctatagaccttttagtgtgtgtacaaggttttttagttgtgtttggttttggatatatgattaggtttcaggagagaatggtggatctaaaggtgggaagagaagcaagcaagatgtagctgggagtagtaaaaacggagtagagaagtgcgatagtaaaggcgacaataaggacgatgctaagcctcctgaggcgcctaaagattatattcatgtcagagctagaaggggtcaagcaactgatagccatagtcttgctgaaagagtactacacaccttctaaaactgatctgtttttttgttgattaggggctgttttgatgtttatgatgttgatgttttttttggctgtgttttggtttcaggcaagaagagaaaagattagtgagagaatgacgttgcttcaggatctggttcctggttgcaaccggattacagggaaagcagtcatgcttgatgaaattataaattatgtgcagtccttgcagagacaagttgaggtatgaattgtggtattcataaatggtcttgaaagt

SEQ ID NO: 19400 - DNA, 554 bp, Arabidopsis thaliana columbia
caatggatattagtttatagtaaacatacttaattgctaaggtgtaataattttattgaaaagagtatacaaacatacctcccaataaggtaacttgaaaaatattgatcttctcttccatctagacaactcctcttcgtctagttctacttcttcctcttcatctgattcactgtcttcactctcgctaattgatgatgtctcaattacagaaccagtcctaactctcttcttccctttctctttcatattcccaaaatcatttttgaaatttctaagcatgatagagatattacgaccagttaagatccttccttttctcccatgttcagcctttccatcaaaccatgatttcttactctgatagctgtgatttgatggtaaacccttgcgatgactcatatatacatgttttctgcagttaggcagccacatactgtcagtgttcttccacataaaggcaacccatcttaccttttacgttgcatccagctagatttccataagcaggaaaatcactgatagtcccagaagcattgctttaaggttgaaag

SEQ ID NO: 19401 - DNA, 551 bp, Arabidopsis thaliana columbia
  unsure (1)..(551): unsure at all n locations
ctnnnnnnnnnnnnnnnnnnnnnnnctaaagtttgcaggcggaaggtttttcacccagcgatacggtctttttcgacgataacgccgataatatagaaggagccaatcagctgggcattaccagtattctggtgaaagataaaaccaccatcccggactatttcgcgaaggtgttatgctaaacaccattcaggacacagccaggcaccgtacccgtccactatgggcctgggtccccctactctggcaaggcattgctgaggagaacatgacacgcctggcaggtcaccttgcctatctctcgttgctctcattagtgccgctggttgccgttgttttcccgcttttcgccggttttcgcatgttttccgaggtcaggattcagttacgtcactttatttttgccaagtttctgtctggtagtgggcatgttattcaggggtatatcgaacaatttggttgcaattcgaagaagatgagagctgttgcggggtgcggggtgatccgtcaggtgttattgttgatgtagtccatcgatagtgggttgaata

SEQ ID NO: 19402 - DNA, 517 bp, Arabidopsis thaliana columbia
attagtttcatgaattatgtttcgggtaaaaggacagccaaattacatcagataagagacagacctttccagtgtatccagccttctcgatagcagtcttgagcaattcaagaccctccttgttctcctgaatgtttggtgcaaaccaccttcatcaccaacatttgtggcatcctggccgtacttcttcttaatcacagactggaaaaacatatgagaacaagatggttaagccataaacatgtaatacatgttagttcacaggaaccatctgcgaaaaagtaatacatgtatatggaatattcattgaagagcatctcaaagaccaaaaaatattggagatttaccttcaagtggtggtaaacttccacacccatcttcatggcttccttgaaagaagcagctccaacagggaggatcataaactcctgcatagcaagcttgtttccggcatgggatcaccattgatgacgttgaaggcaggaactggtagcacaatcttggggttacagcaagg

SEQ ID NO: 19403 - DNA, 1293 bp, Arabidopsis thaliana
tgtgatgcagattggtccggatgtattgatgacagacgcagcacatcaggggatgtttctttctggggaataatctgattgcatggcacaacaagaagcagaactgtgtttccctatcatccactcaagctgagtacattgccatgggcaactggttgcactcacttactgtggatgaaaaagatgcttgcagattatggtatgacttctgaaattctgttaatacattgtgataatactggggctattgatatcacaaaaaatcttgtgcatcacactcgcacaaagcacatagaaatcagacatcatttcatcaaaaaacttgtagaagggaaacttgttgaaattcattacattgatactgagaagcagttggctgatattttcactaaaccacttgatattaatactttctcaaatttgcaaatggcacttagcatttgtgaacactgacctggtttggtttttaagggactgttgtaacaggatcactgcacaggagtacagtttttttttttttgtgtgtctcgtttccttgtacataacaagcaaaacctcctgttggcaacttcattcaggtaaagagctgctcttcatgcttttcttcagagatgttcaacagagacagcctgacttgcacaaaagaaaaagaaaaaaaaatgaaaagaaaaaaaaagaaaaaaaaagaaaaaaaaagggtgcacgagcttaaagacaggagaggtcactgactttgagaaagggaccttattcccttgagaaactctgattctcgctgtgataatgattgaacctctcctgttactcctaaatggtcagaaagctgttttgagaatgtctctgagtcgagtatgcggatgtgtagactaatctgagtgaagcagtgtgtgcaagctatccgaccgagaaatagctacctcactgagaaaagaagcagtgggtgtgaaagctcctcaaccgagaaatagctgccacactgagctgtatggttgatcatgttttttcctttgttacttcaggctgactcatgtgtacatcatgctgcttcagaaacttttaagcttaaaggtatgatgtgttttcatttgttgaatgacaatccaatgaacttaatttcttatatgctgcttcttggtaacattgtctttggatgctaaacatggtcacttcttgatctctgatgcgtttaatagatgtttgatcgtagctgtgctcgacaaaaaacatgtgttttgcataggttaaagaaacaaaaaactgttcttgccttgtattgctttggtttttacatga

SEQ ID NO: 19404 - DNA, 461 bp, Arabidopsis thaliana columbia
caagaacatagagacccttcaacataaacgaaaagatcacacaccatagggaagattgttaaactacttttataacacaatttgagatgcattttagaatacgaaaacatcatttatctacatgacaacataactacatagtcaagactcaagaagaaacacactctagagctctaaaactagtttgagattagcatatagagcaatagatcaagcaaatacacacagagagataaacaaaccttgatctgctacacaagcttcttgcttctctttgtctataacatcttcatcaaaaaaattgaacttcataagaaatggaatcattctgatgaacatacaaaataaaaacttaaactttgatctgaattttaccagtaactgatttagccaccggagtagaattcaacttctcaggactttctctccgatctagatcagacaacaatccctcgtctgac

SEQ ID NO: 19405 - DNA, 575 bp, Arabidopsis thaliana
tcggagtctaagctttaggtttaggtagccgtctgatctcacgtctttgtgaatctcaagttctaagtcgtaggctattagggttcttggtgagtgaacaaagagggatacatagctgttgctgtgttggtgagttgggtagattaggaattggtcagtgataggttgtgttaacctgtgtaaagctgatgaaacagatctgtaagattgtttaagtgatttctaataaagaaaagaagttcttttcaacctatcgatatctctattattctcatttggtatcagagcaggaaaccgacctgagtaaacactcaatacaggttgagatcctgcggattaaggatgtcgaagtctgaactcatgcggcatgtacctctcgatcacatagggtatggttactagaaaacacagatgatacagctaatcagaggacaaggagaagatgcctggactactgtagaagatggctgggacctcctttcagcgtaactgaagcaggtctcaaggtgttgaaccaaaggcaaattggactgatgaagagaagaatctgtctaagtttaatgcaagaggaatga

SEQ ID NO: 19406 - DNA, 789 bp, Arabidopsis thaliana
gggtacctctatgctttaaaatttaaataaacaactgtgattcgttgtatagaaccgtgtatcagactatcactatcctacaagttaattaattacgccaaaaacaagttaattacgccaatcaaactaaagaaaactataataatagcgtgactctatggtttggtactttggttaatgtgctgcttacttgctcatcttatctatgattagaatatttacttaataagtggagttttaaactgtatttctcatgtattttagtgaatctcatattaacttattaggttatactttttgataaataatttaggttagacttaggtaagataagtacgtattaaactgggatgaagataaaacaatgccaaaacaaacggacacgcttcagctgatgatagatttaattttgccaatagtataaaccagttacgcctttttatagaacaactctgccatacttgataattcatacactctatctcttctctctctcaatctctcaaaagatctccggtaacgttttaacgtcggtgaaaaaatgcggaagttaacggcggttaattcactactgaaacggaacaattatcttcttccgcgccatggctcctcacaaacagcagctcagagaacatcctccgtccgcgagaccgagaccgaaacaaaacttccgaaaatgcccccgttcaattattctccgccgccttacgacggtccatctacggcagagatcatcgcaaagcggcgagagttcctcagccccgctctttttcacttctacaacaccat

SEQ ID NO: 19407 - DNA, 1683 bp, Arabidopsis thaliana
tctttcttattagatcacttaacatctacagatctgtttcatcagttttacacaggttaacacaacctatcactgaccaattcctaatctacccaactcacaaacacagcaacaactatgtatccctctttgttcactcaccaagaaccctaatagcctactgcttagaacttgagattcacaaagacgtgagatcagacagctacctaaacctaaagcttagactccgattatatatcagacggctacctaaacctaaagtttagacttcgattatataggtaatgacacacacgtcattaacctatttcctaattcaaagatatcttcaaatcttctttccttaatttgcttatatcttgaattacttgtatatcacgttttggaaactctagtaaccaattgcagctcgccacgtcatcagcattcgagtctcgcagctccttgcttacagcagctccctgcttacagcaacttcatgcttacagctccctgatgtccatatatcttcattctccccctttttgcttaaatgtgacaactgaagctccagtggatcctgtcaaggttagttttccaaagaaacaaccacaatacaacatatattccaaatccacaagaatctgaaatacattcattagcataaaaccaagaaaacgatcaaggttcagaagcacacaacatacgacagatatcaaaggagaccgatgcagtttcagtagtgcatataaaattaagaccaaagctacactacacatttgctcccccttaactactggatccacgacatcaaggttctcccatattctccccttgcttgagtgcacagtcatgtaaaaaccaaagcaatacaaggcaagaacatagttttgtttctttaacctatgaaaaacacatgttttctgtctagcacagctacgatcagacatctgttaaacgcatttcaacaagtttcccttctacaagttctctgatgaaatgatatatgatttctatgtgcttcgtgcgagtgtgatgcacaagattttttgtgatatcaatagccccagtattatcacaatgtattaacagaatttcagaattcataccataatctgcaagcatctgtttcatccacagtaactaagtgcaacagctgcttatggcaatgtactcagcttgagtggatgatagggaaacacagttctgcttcttgttgtgccatgcaattagattattccccaaaaagaaacatcctcctgatgtgttgcgtctgtcatcaatacatcctgaccaatctgcatcacaataacctgcaagattctcattagtatggttagtataagacaaaccatattcaattgtacctttcacgtatttgatgatacgtttagcagcattcagatgagacactttaggattggcttgatagcgagcacacagacacacactgtgacagagatctggacgacttgctgtaagatataagagacttccaatcatcgatagtttctgatcaacagcctgacccccttcatcctttgataactttgaagctttacttattggagtatatgtcatcttgcaggtttgcatatcaaagcgtttaatgagattctttgatccgacttcagacactcgtttatggttgaccttgatctgcttcccttgttgcaggaacaccacgtactactcttgtcatgt

SEQ ID NO: 19408 - DNA, 323 bp, Arabidopsis thaliana columbia
caaaacaataaaggaaatgcgatttggtttggatcctgtacctttttcaggcattggcgcccttgctcaagcccaacaccatcaccaacccagaagaagaggaaggatggagtgtcagctattgcctacatatacatggaagaattcaccttatgtttataataacaatgaatggaaacagccttacctacaaggtctacacacaagttaaaatactatatgtatcgtatcagctacatcagctcggaatccgtatgcacgtgatttccagagcagtggtggaactttatctagatgttgagtaccactacgtcatctaggta

SEQ ID NO: 19409 - DNA, 530 bp, Arabidopsis thaliana columbia
tcgactctagtagcgatcaaaactggtaagactatcggtccacacagttttccatgtaccaatagaagatccagagttggaatgcttccaagaaattagtatccttgattttaataagtcaatttatactctttaacaccaatttgaaatccaaaaattgctttagtctctgtttgtggtggctaagtctatccctacaagtcatgaatttagaattcttgcaataaattaaaaagcaacaaggtctactcggcataaattaggaatagatcatttaacatattaacttgtttcgtaagaacctttcgcataattaacaaataatcataatgattatttatatacgtgtctttcaaaaaaaaaacactgtataaaaattatatgaaattgactttgttgaacactagcatttatatatagcacaagtgttgcaaaataggtatgtctattcaatattgacttttcattctgttagttagaggcttcctatatattcgtctatgttaaattaaaacaccacaacactctct

SEQ ID NO: 19410 - DNA, 567 bp, Arabidopsis thaliana
taacggccgccagtgtgctctaaagagtcataggtgtaagcacctgttccgcggcttagccatagttgcgtataaccagtgccgcgcgggtcattcagacgcacggaaatcatattgctataactaccacctgcatcgctggagtcataatgggtatagcggtagtaggtgatcaccgggccagtatagagtgatacgccgccttgccaggcatcgacttcgacatcatcgtaatatttagtgtagcgataaccggtcgtgaaaagcgtttttggtaacagggccaggttaatatcctgacgaaaatcctggcgggcaaagaccggcgtattatccgcaaaggcaatacccgttcgggttgtcagccagttattccatttataccagaccgcaccctgaccgcgagtggcattgaaatgttcagtttcataatcacgacgcccctgggaaagattaaaaagcagcgttgcgttttcaactttcgccaccagttcagcatacgctaaattacggttgccatgatcgccagaataatcggtaaaatcgtagccgcggtaatggaagtta

SEQ ID NO: 19411 - DNA, 822 bp, Arabidopsis thaliana
tctcacagcaatacatgaattctcgaaaaggtcggtacaaagatgacgagggtgtagcaaatgaggtatgtacatgaacaagaagcttcttcatcttctatgaggtcaatgaccttcaagtctagagcttctttagtcttacctgaggttcctgttttatttgcaacacagctctcgttccaagtgtggaccgaccagattcaggagactctaaactccaagaaacaaggagatgctgcgttcaaaggcaaagactttgtcactgctgttgaatgttacacgcaggtaagaaacagaaagtgggttactttcttgaaacccagaaacataattcccctggaactcgactcaatccgtcttattgtatctgcagttcatcgaagatggcacaatggtatcgccaacagtttttgcaaggaggtgtttgtgttatctgatgagcaatatgcctcaagaggctcttggtgatgcaatgcaggcgcaagtagtgtctcctgaatggccaacggctttctatcttcaggccgctgctctcttcagccttggaatggataaagacgcctgtgaaaccctaaaagatggaacttccttggaagccaagaaacataacaacagaaactgaaaacttcaagtgtataggtttcttctctcttccgccttcttcgttttgtgattggattctgagaaagcctcattgtctctgtcttctttaagcattatcttaaatttgtggttccaatttgaagagatgatcaaatcacatttgaatcaagaaaagaaggatctttctcatttaagtccaagatccctatatgagatttg

SEQ ID NO: 19412 - DNA, 608 bp, Arabidopsis thaliana
  unsure (1)..(608): unsure at all n locations
nnnnnnnnnnnnnnnnnnnnctaaagaaacaaaaatcgggcaatactgcgtgagaatttcctcaaagcaggcatcgcctgttacgttaacgacagggtagaaaggtagaagttatgattcgcacgatgctgcagggcaaactccaccgcgtgaaagtgactcatgcggacctggactatgaaggttcttgcgccattgaccaggattttcttgacgcagccggtattctcgaaaacgaagccattgatatctggaatgtcaccaacggcaagcgtttctccacttatgccatcgcggcagaacgcggttcgagaattatttctgttaacggtgcggcggcccactgcgccagtgtcggcgatattgtcatcatcgccagcttcgttaccatgccagatgaagaagctcgcacctggcgacccaacgtcgcctattttgaaggcgacaatgaaatgaaacgtaccgcgaaaganttccggtacaggttgcttgattgttaccctgcggctggttactcacagcgcgacatcgtctcagcgaatccgttcttaagatataaagtcgttttagtacgacggattatccccggtttactttgcgttcatggt

SEQ ID NO: 19413 - DNA, 574 bp, Arabidopsis thaliana
cggaaatctcctctcgattcgtcaagatccgtcgcgcttttggagactccggcgagcagaaacggtggcagttcgagtcagtttccgattcgaggagagagtagtactaatcgtcgtgggaaagagaagaaggtgtttttgtataactggaagactcagaaatcttctagtgagaaaagtggattagctaagaatggtaaggaagaagaggaagaagaagaagatgcttcttcgtggacgcaagctagtgttaatgatgatgatgatgtgagtgatgcgaggaatggtggtgattcgtatcgtagagaaatacaatcagcttcgatgggttttaggtgtagagatacgaatctagcgtcacaaggtgtgtcaaagatgaggaagagtaatgttggtagttgtaagaagaagagtaagaaaaaaattagctcttctcgtttggattgtttgtcaaagtatcaacctagagatgacattgttgctagaaattgtaatgctggatcagatgacacagaggaggaattgagtaattcagaggatttgaggaaggtcctggtgcgtctctttgcttttg

SEQ ID NO: 19414 - DNA, 361 bp, Arabidopsis thaliana
acaacagaagatcggttataggagaacaactaagttttgaagagttgattaaccggctcccagcactacaagaccgtcgtggtcctcctccagcatcactagccgcgattaactcattgcaaaagatcaaaatcaggcagaagcatctcggtttaaatccctattgtccggattgccatgaccagtgtgaaatctgatcagatgcaaggaaaatgcagtgtaaacatatctaccattctgaatgtatactcccgtggttagtccagcgtaatacttgccccgtctgccgcaaagaacttccacaagaccgaaataatagccggaaaaatccattgtggcatctgtggccgttcaggtcctc

SEQ ID NO: 19415 - DNA, 491 bp, Arabidopsis thaliana
atcacctctaaatttcagtgatcccaaaatttttaattgtatgtaatgctgaccggtaaacataacagttgaaaatatttaacgaattttacatatataacgaaataagacagacattttagtattttacataagactgaagatgaaacaccacgaaagtggattaaacacacaaaacataaactaaagagagattcaagaagctcttttctttttcaagagctaaagatcaaattaattaactaattaaacattcttaatccatcctcattagattagttgttttattaagcttcctgaatatataatctcagttcgatgacgactggttcaagggactcctcccacaactcgccggctttggactattcccgacgactcgaggactcatctgacccaacctgattccactcactcttggactaaacacttgtgacaaactccgattattgactggagtcgaacttgaacttgtcaccttaggactactc

SEQ ID NO: 19416 - DNA, 1064 bp, Arabidopsis thaliana
gattgaagatggaaccgattaatatgaatgaatgtcactgagtcttacacacaccattgtacaaaataaaagccctaatgtatcctaattcaaagtctccagctttctctgggagacatttgatcaaacacgtctgaatatgaactaaaattcaccaagataaatggccaataaccgcaaaaaagtagtctttccttgaaccctagaagcgatatatcacacaaaagctctacgtaccagtaaaattgctatcaagatttagaaaatcagcgttcatcttccttcctcttgccggtgaccttactctgtcgaataacaatatcctgaagattcgtcaatgcacctttagctctcaacttggccgttttagctgctatgatcttcttaagagcttcttcctttaacagagccaccgctttattcatattagccaccgagatatttccagctgcgacaagagccattgccgatttcggagtgagaggcgtttcatcggggacgtcttcattgactcgagatttggggaagaaggtgaaattggggttagaacatggctggcatgtgaaggaagaagctggtggtggagcggaggaggaggaagatgcggcggaggaagacggcggctgagttgagcaagaaaggtgggtgcttgatgggcaattgacgcagatgatacgagcttgtggaggaacggcgttgtcgaagagattgaaacaaacagagcaaaagtgttctcggtactctttgagcaaacaatcggtgcagagtcgccggaaagcgccggttttgatgacggtgtggatgaacgacggctctttttcacggcagactatgcattcgcgctgtttctgttccggattcatggctaagtcaacgagattgagaactctctccctcaacggtaaccctaagcgagagagagagagagaaagatgaaagaagcgtttgtgttgttctcagaatgttgaagatcttgggcttgaagagacttcaacgtataattctattgggagctgaaaaaacttatatagaagattacaaattgggtcttgattcttgttgaa

SEQ ID NO: 19417 - DNA, 555 bp, Arabidopsis thaliana
tgaaacatgacattgcataaatcggcattgccatgaccataaattttagcattatttccttttcagctagtgatagaaactttgcactccaactagacgtacgttttttaacccgatcaataatattctcaacatttctctttttttccttctgaactgttccggtagtcctaaatatttgcctccgcctccatgattttgaatgcctaaaatgtgcttaggacgattttgtgttgtaccatggacttttgatctgaacgtaatcatcgattttgtcatgtttatcttttgcctagagtagtaatcatagacatcaaagacatcctttaacgcttgacaatttcggacatttgcttggcaaaaaaacagagaatcgtctacgaattgagatgagttatacttgaatctccaagccctatacgaatgcctctactatctccatccgagactcttgatttgatgaggtgacttaacacatccgcacaaagtataaaaagataaggtgaaagaggatctccttgtcggattccacgtccggtttgatagtacatgtgg

SEQ ID NO: 19418 - DNA, 1202 bp, Arabidopsis thaliana
tgtaatgcttaattggctccctccaatcagctctccaatctttagcagaattttggtcgatttcgtgaaatatacatggctccgattcgggatgcacattttgttcaagtatatcttcttcgataagtggctcggtctctaaaatctcttctgaaattatgtgctctactaggataataggctcctcgctactgctttcctcgggtatgttttctcagatgtgttctaaccttttgacttcctccgtatgacgggtggtaactctacttccggttcaccacgggcacgtgccactgctcatatcttctaatgacgagagtttctttttcgtctttaatgcttcgctccgagatgcattctactggaatgattctattttcgcaggatctaagttgatgctaatgcggcgagtgcatccgcggttgtatcctctcctcgaggcatttgaactagtttaaatttcttgaagctttagacagatctttaactacttcaagatatgcttccattctcgagtctttggcttcgtagtctccattgaactggttaattactaattgcgagtcacaataagcgaccacttcttcaactccaactccttgtgccaaccgaagtctggcaattaaggcttcatattttctgcctcattattagaagcactaaatagtaagcggaacgactgttcaagaatttccgatgtgggtcactccaacttgattcccactttggatccttgctttgatgaagacccgtctacatgcaatttccaagtctgattctccggttgttctggcgcaccaagtattggtagcttggtcaagaaatcagccaaaacttgggccttcatgctcaccctgcttttaaactctatatcatactcactgagctctactgcccacgtcgctaatcgtcctgactgatttgggttgtgaagtattgttcgaagtggctggttggtctatacttcgattgggtgggattgaaagtacggacgtagctttcgagcagaagtcaccaccgcgagtgcaagtttttccatcattgtataccgagtttttggatccgtcattgacttgcttatgtaataaatcggcttttgttctcacgatcctcccgaatcaggacttcactgactgcatgatttgataacaaacattcaaataaagcttctcatcacattgagtttggacaatatgggtgga

SEQ ID NO: 19419 - DNA, 1629 bp, Arabidopsis thaliana
gttaattttagagatttcaactcagaaattttcaattgacaaaggggtttttggttttttccgccaaaaacagttgattgagtataaaaggtttcggtgtacgtgtatatgaatatcgagtttatgtttagttggtatttgaatatagtgtacgtgttaagaacttcttcgtcttgttcaactttcaggaagtacttctaatgatccgggtgaattaccacagaggttgtttgcactcgatcactaccctagcaaggcgaagataaatgcgtactccagaccggagtacattggtcaaatagcagttgcgcttaaggacacaccagaaatgacgttccttctagattctccatttggtgacctctttaggatccctactaacaaggcatccttttctggtaaacttgttcttgggttaatatgccgtcagttagttacaaagaaacgttatgagatgtggatggtattcgctggtcatcctattaggctaggattaagagaatgggcacttataactggtttggaatgtggaacctatcctaaaaataaggatgtagaaaatgttatgcagcggcaggaaggtgaaaatacaatttgggctactctgtttggagatgataaagctgatccaacagttgaagaattaagggatagattgatttctgaaactgacatgcctgcatggaagaaattagctctcgccctaattatcattgtggatggggtgctaatatgtgacaagtctcctcctttgagaccaaatgagatgacagttgagctgacgaagaaccttgatttcttctgtaaatatcccttggcaaggacatcatttctgcttactttggagcgtatcgcaagtttcaaaggagagaccgatgttcaaaaactccggagtggttgcaagcaacattcttatgcactccatggcttcccacttggactccaactcctcgcattcaaaactatcccgtctattgctagtcttctaccttctgaaggagataccgccatctttacagagaggactattaaaaacctttccaaactgcgtccaatcaagacatccaccatattggcgtgcgagtctgctgaaaaggtttgtgcagttgttgttgtacgtacattggtataaaaaaatgaagtacatacactctgaaattaacaatgatcatctatgtaggtggatatcccatatattatggacccagcagacagtaattgcccaaaatcttttgtatggaggaaagaaaaagaggacccaagagttgataacattttaaggatgttgaaatctgggcaggagtgggatgagaaaatgtgggttggaggcgatgatgcgcctaagaagcaagtccgaccatcagcaactggagagagaggtaaccatatcttttcatcgtataaattatatcagaattaggttcctctaagagtagtaatgcatgatttaaccgtttaatatagttattttgaagaggcaaagacgggtggcagatcctgttgaaaacaagaatcaggacattagtcactctgataatggtgaaggtggacccagtggtggtgatggtgaaggtggcccagtggtggtgatcgtgaaggtggacccagtggtggtgatggtgaagttgg

SEQ ID NO: 19420 - DNA, 896 bp, Arabidopsis thaliana
caatcgagtggtggtgatggtgatactcgacttccatgtggagtgatgaggtcgagtagtggtctggcaatgaaggtgaagacactcggcctcggggtcgagtgatgtgatcgagtgatggtcaggtgatgggatgaagacactcgacctcggagtcgagtgatgtggtcaagtagtgatgtcctctactcgaccagggggtcgagtgatctgttgagatcttgaagctcctactcgacctcggggtcgagtggtttgacatgatcaggtccgcttcttccagatagctcgtcaacagctccaaatcacctgaaatcaacgcaaagatgcaacatgcatgcaaatctatcctaaacatgtaaagtgatgacaaatgatgagaaatggtataaaacagtgatgatatgatgctaaagtgatgacaaatggatgctcaaaacatgtaaaatacacacttatcagtattgcttctatttcctcgtcgatctcctgcaacagatattcattcatattactaccgatgttacctagaatcatacacatagttatatcctagtactgacagtattaccttgaatcatacacgtagttgttttcaagtaatgacagtattacccagaaacgcatagttatatcctagtaatgacagtattatccaaaaatcatacacatagttctatcttagtactaccaatgttacccaaaattcatacacatagttatatcctagtaatgacagtattctccagaaatgatagtattatcctgttctactagtttcataccattcaaatactcgagaaatacttatcattgctgccggaatttcacttgatttccactgtagtccatcaccatattctcatcggacgaggtttctcgccaaggtttctact

SEQ ID NO: 19421 - DNA, 926 bp, Arabidopsis thaliana
cgttggttgatggacatcatcggtactatgcacgcctcgaaatagcgaaagttagtcctcgttgtgacagattatttctctcaagtcaaaaacttcgtgtggaagcacattttatgtcaccatgggatcccttacgagatcgtcacaaacatcgactcgcaatttatttcgactcgtttccaaggtttctgcgataaattaggaatttggctcagcaagtcgataccgcgatatccccaggggaacgaccaagctgaggctgcgaacaaaacgtttctcgacggcttgaaaaaatagctcaacgccaagaagggttttggggccgaagaactcgaaggagtattgtggtcgcatcgaacaacgcctaatcgagccacgagagaaactccattcgcagtagtctagggtacggaattataattccagctgatatggaggtaccaaatcttcgtcgaagcctatctcccgaacccgagacagataataatcagagaatgcctaacgagttagatctgatcgacgaacgaagagattcggttctggtgcgaatacagaataatcaaaacgaaatggctcagttgtacaattcaattgtccgatagcggagatttcacgaaggagattgggttctctgcaaagtttttgaaaataccgtcgagctaaacgctggaaaactcaaggcacactgggaaggaccatacttaatctcgaaagtcgtctgaccaggcatttacgaactcgccgatttaagcggcaaaccattccaagatcctggaatgccatgcacctcaggaaatactataactaagtgcgagaacataaacttgaactacgaggtggtttgatcctgagaagggtacttaggcagctcgtcttcgaacgagttcagctacccccccctcaccccaaattaaaaaaaggggagt

SEQ ID NO: 19422 - DNA, 1757 bp, Arabidopsis thaliana
actctatctcggactatgctaaggctcgcgatctctaactctctcggttaaaaggctcggcgatcactctctctcactcgtgttaaaaggctctgacgaactctctgtctctctcggtttgggtagagctttggtgtgaaggcttctaagggttaagtaagggagggttgggttctatttatagagtgaggactagtgtaagagaaggaagacgaaactaggtcaccaagttggctctaggacaaaacttgctcaccaagttggctaaggcgtgggctccaattcggcttgcatggctcgggacaaaacttggtcaccaagttcgttcgcccaaatgttggttttatcttgggaacctgttgaagtgaggtcacacaagggacctgctagattttgggagctaggcttgtgcatcgccagatcacgaatgaaaccttcgtttcttccttgtttagtatgttatgtgttgatggcgaaggaaggagttagatatggttgtcgtaggtgagctacgatgaagtagaagtgatgtgtttttataggtaaggttcactgtcgactttttggaagcgggatcacaaagtggatccgccaacattcgggtgttgggcttgaggtatcgtaagattacgaatgagttttaaatcgtagtggaaacgattgttttgcgaaacatgatattgagtatcaaaattttcttttattcttatctcaaaattgttaagtacaaatgaggtaaagcaaacgacgatctgacgtctggtcatctagaagagacctgcttggtatcgaggaatggttgaattgttaggtgagcaggagaccttctttgatggaagatgtaatgtccattttccttgttgaagaaaaatgcttcaaacggaagggttaagacggtggctgcgttcgaggagggaactgcctacatacctggttaggggattaagccttatcgtagtttgattgaagtggtggttgcgctcttgggtggagctgcctacgtaccctgccaagggatcaagccttatcgcagttcgattgaagtgggggctgcgctcttggggggagctgcctacgtaccctgccaagggatcaagccttatcgtaattcgattgtttttgagtacctattcatggcattccaaggtcgtaactcaagtactccgttgataactttttcgagcttatagacgccgtcacgtaccacctcggtgattcgatagggacctgaccagttagttcccagttttcaggcgtttagctctctcgtgttgctgaacacttttcgtagaacgagctctcccacttcgaatctctgaattttgatattggagttatagtagtgggcgacacgttgttgatagctttgaactcggatcattgcctgatctctgagttcatcgatgaagtccatgctgtcctgtaacatttgcttgttcaggtctgagttagcaggattggcggtccttctcacgcttggtactatggtttcgaaagggattactacttctaaaccataggcgaaagagaatggtgtttcttgcgttgatttgcgaggtgtagttcggtaggcccagagaactccgtggagtacgtcggaccacattaattttttggaatcaagtcttttcttgatgttgctaagtatagctttgttggcggcttttgcctgtccgttaccttgtgtgtaacgggggtagacgttgtaagacgaatcttccacttgtcgctgaatgctttgattttttccgaagaag

SEQ ID NO: 19423 - DNA, 416 bp, Arabidopsis thaliana columbia
cgggtaccgagctcgaagtcattctgtcttactgtcggttctcttgagtaccatgtcaagtctctcaagttgaaaggctttggccatcctccaggcaggtacagatccccacccataaatgaatcaagctcagaaagttcaacatctgataaatatgtctgacggacaaaatctacaacttcctgtccatcagttagcccaagcgaagagagatagatgtgctcccaacttagctgtaactccacaaaagttgattaccattcatgagcagcaattggaagaggtgaacccactgttcgagctcaagatacgtgatccgtacaccaaagctttgaccgtttagccatgcatgaacatgtgctttggccatggaagtaaccagcttataacctggaatacctgacagagcaagaaac

SEQ ID NO: 19424 - DNA, 1186 bp, Arabidopsis thaliana
tatatttacgatatcttgcttatgggctgtacatgttaagaggcccaaacctaattacccaaactacacatgcttttcttcttctcatgtcctgctacatcttcttcttcttcttctctacaagatcttcaatcttcttcttggttgttttagagctgttcctgaaagattagaaagaagcaaaaccagaaggaaagaacatcaatacatgaatagagaatagagaatagagaacagagacgaatactaaaattatgtacaagaatcagatataattagctcaaatgatgaaaccaatcacatttgataaggatgaagtcgattagtacttagaaaagaccaatcagattcactaaaaactccggtattttttttagaacaaacaagatgatcgataaggaaatcttcttggccattctcatgtctaaacaatgcgtttggttaagcatatgcatatctctacacttcggtatcagtttaatagcaaatgagttctctctacaagttgccaatttccatggcattattaaaagctaagccagagtatagcaaatcagagagccaatcaaagcaaagaggtgatgtgttttatgttttaaaaataacgtaacacaaccaagcagaatgatagagagataggaccatatgagttatagtattggtttcatcaattctaaggtctattcacgaagttccatttacctaccagtatattagacttgatcatacattcgtacgacacatttgatttcagaaacaatatggcaagaccagtagcttgtcctacgagtgacaattattgttgcttatctaaacagaacgtatagccttctaaattaatgtttctgcctgaatcatcgcagaatcaacagggcggttctacccgcccggcgttgagcttgttgtcgtgcttgtcttactttcaagtcatcaatatgattctggtaaacataagaagcgaaaccccaaatagcgatcagcattgccataatcttaacaccactcattttatcacggaacacaaccaaagctgctagtggagtcacagctagagagagcgtactaatgacgtttgagaagagcgacgtcaccagaaatatcaaacccacgactccaacagaacacacttgccaagtaactgctgtccagaccaagtcagtacataagaggcttgccgtttatgata

SEQ ID NO: 19425 - DNA, 735 bp, Arabidopsis thaliana
actcattagggtttcttgacaggtctgcaattgggtactcagaggccatgtcctcatagtaagcttctttttttatcaagatagtcttctcctctacaccattccgatgtgaattcacatccttctttgctgacaagaatagtggctccatcgtcaagggcgtccttgatattgagtggtacttggttggcttttccattgagctccttgttttgatccttcagctttttcacaatatgtgttagctcttgtatggctttgtcctgccatttagatctctccttgagttctaaccaatcatctgacgtctgggtgcttgccatgagttgtttggtcgagcatgagctttcagggcaagttggaggcttcttcgagttgttggtggaatcagttggtcgagcatgtgttgaacttacttcattagctttcataacctttgtgtcagaccccatcaagcccttgtaaacctttgacccaacctttgagccaactgttgccttgtgtgagtctaatgacttctcagaactcaaagtttcactaggaagatatccaggtttaccactcttggtcaaaacagtttttgagttatttgcttctttaagttccactagaagttcatcaactagcagatccttttcctcaactaagaaggtctgtccttctattgtcggcttcttcatagcatcattgatgtcaaacttcattttaaaatccttccccatattaagatcaatc

SEQ ID NO: 19426 - DNA, 1083 bp, Arabidopsis thaliana
cagaccaaagactagcaaaacataaattgtggctgcaaagtatcatacaaacagatcatatagagcaaaacatagattgtggctgcaaagtatcatctagaactaaacttacacaatgacagacacgatactaacattgaacacaacatgggatcacaaacaagagaagaagaagatcataccatgtcgtattcggtcgaggaatgggagagaggacggtgatgaacttatccctctccggaaacataagcagatcgtttagggattgaagtgtgtccttctggagatccggcgacagaggtggatattcttcgaagttgttgccttgagaggatgtgtgactgtgagcccgagactcttgaactggagaaggcggagggtcttgctgagaaggcggagggtcttgttgaggagccggaggaacctgctgagtagtcgcggcttgagtcgctggattgttctgcacttctacggaggcagacctttgcacttcaggttgtcgactgccagagtgctggaacaactgtagaggcggcggatagttccgaacatgagctgccgttgactgtaatggaggaccggcaggcttctgatgcaggcgtctgtagctgaggagaccgttctgctgccagcgtgaaatcgtcttgagacggaagagaacgaggtcgtcgaccagccgtggatgtggaggctctctgagcaaggttaggactcgttcgcttcttttttcctagcccaaacatcgtgtaaaggagagatctagaagaaatcgaagaagaagaagagatttaagaggaaaacaaagaggtaagattgatttggtagggtttcgaagaggaaatcgaagagacaaattggagaagaagactgcagatgtttcgaagagaaaaagagttttttgttagggttttcgcagaacaagtgaatggtttgggcctaaagggtttgggcctaaaaggttcagtttgtttaaacattagtcggtaaattgtcacaaattagtcaccaattttgggcctcgaaatttttggcccgataatattgttatagtcgctaaactgtcagcaattagtcgccgtattt

SEQ ID NO: 19427 - DNA, 1512 bp, Arabidopsis thaliana
tcggtctgtaactcctccaaatatgctgagaaagccggccattcggttggggaagataccaatgttggtgtcggatcccgtaccataggctcgggaccggtcaaatattgccacgtaagtaggagaggcccaagagaggaaaggcccacatgtttccttgagcaagaatataggtgaagtgtttaattcgcgaggtgacatgacaacaaagtcaaagctacccggattggagagtcgagtgggccggaaggtgaagcccaagaagtccggagtcaattcaaattcgaacgtttgaatagttaattcgaagaccgaaacatatacatttaagatagaataattgtgtgtaattgagaattaaatgtattctttgagtagaaattatgggtcaaggaccatgtaaaaagacacgcattttttgtgcaaacttactatacacatttttttacaaaactcatagttttctctataatcatcaatctattttctagtacagttgtcctcaagcataatccttctcactaaataaataaatacttgagtgtgtgaaaacgacattcacattttggcgccgtctgtggggatggagaattcttgagtcatctgattttttatatactacattcccgaagtgagcagcaatgtgtggagaagatgctaccaacgcttcactagccgaaactctcaagaccatgctgcaaactatgacagaaatggcggagaagttttcgagtgtggaaaaaaccgtcgaaacactgcaaacaacccaggtatcactcagtcaaaacgttagtactattcagtctcgtgttcgttctttgaatgcaggcaattcctctggagttcgaagaactatcttcggttccccaaattcccttccgcgaaatgcagtaagtgatcaaacgaccccggatggtacaaacgcggacgtccaaccggaagatggagaaactcatccccaagacgacaaccagttcgaaaccatgagagaagtaagccgggaattgagagaaatgaggtcgaaattccaccaagctacaagctcggaacctgatatcaaccgggtcatcgaagaagctaggcgaacacctttcaccccgcaaattgctagcttgagaatcagagaatcttgaaaacttaacttagaaccgtacaacggtttggaagatccgaaaggctatcttgcagctttcctaattgctgctgggcgagttgatctgaacgaagccgatgaagatgcaggagactgcaagcttttctctgagaatctgtgtggacaagccctgatgtggttcactcagttggaaccaggatcgatcagcaacttcaacgagctatcatcagtatttgtgaaacaatactcaattcttatggataaaagcatttcggataccgacctctggaatttatctcaagggccgaacgaaacacttcgggctttcatcaccaagtttaagaacgtactctcgaagctcccaaggatctcacaacaatcggctctatcggctttgc

SEQ ID NO: 19428 - DNA, 1341 bp, Arabidopsis thaliana
gtcccatctaattccagttcattaggaattttaactcttgatggggtatttgcagcggggatatatgactttgtcacctttcttgtatcgatgaacgaatctggtaattgatttgccatattttgtaaatgtacaatattttctacttccaactcacgttgctttgtggggagatcaaaatattttaaagatggtgcgcaccattctatatctttatgcatatgcattttatgaattccttcccctaaagctgggaattcatcttcattataatagcaattggcaaaacgtcccgtaaacaaatcaccagtttgtggttcaagatatcttattatactcggtgatacataaccgacgtatattcacaatctcctttggggccccatttttgttctttgtggcggtgctataagcacatataccgcacatccaaaaatgcggagatgggataaatttggtacttgaccataagtcatttgtaaaggggaatattcattatctgcgcttggtctaatctgaaccaaagccgcaacatacaatatagcatgaccccatataaaaattgggagttttgttctcaatattaacggtcttgcaatgagttgcaacgtttaattaatgattcgtccatgccattttgtgtatgaacatgagggaccggatgctctacatcgattcccctcgatacacaatagtcattaaaggcttgcaaagtaaattccccaacattatcaagccagactttttttatggcataatcaggaaagtgtgcctctaacctgattatttgggcaataaatcttgcgaaagcgatgtttcgtgtagtcaaaagacatacatgtgaccatctagtagatgcgtcaattaataccatcaaatatcgaattggcccgcacggtgggtggattggccacatatatcaccatgaattctcgacaagaattcaggtctttcattcccaattttgtttggtgatggacttattctgagttttccttgagaacatgctttacatgaaaactcaccagatttaaatattttctggtttttcaatggatggtcattagaattttgcataatttttcgcatcatgacttaaccaggatgtccaagtctttcatgtcatatcttaaatgtactagtaaactcacacgagtgattgtcactcgagtttacattaacatctgatgcgattatatttatttttgtgcaatataatctgcaggatagcattggcaattcttaatatatattgcctctcggattttatgcaaagatattcaatgccatctttattcatagtctctatatgatatccattactttggatatctttgaaac

SEQ ID NO: 19429 - DNA, 1044 bp, Arabidopsis thaliana
gttatttatgcgggcccaggaaataaacaaagaattcggctgccatgacctgcttcagctttgccaggtcaagaccaacgccaggagcgaccaggggacgtactacatcagcgctcgtcccggatctctgatcctaggcggtttgaaggcctaggtcactaacctgggtcagatgaagaccaaagttttgacctttattgtttttgtcgaatccttgattgcttctgttgaatactagtaccgctactaatattgcttgtcttttgatggttttgcagcaagaaccaaagaggttaccctgtcaaaaacggaactccagctgttaacccttctccgacgtggtcagaccgactgggccacattcagcagggatcgcatagtagctgctctcgccgtagctccagcagttccagcaattgcccctccagcagcgcagcgagatctgatcgaagaggtcccgcaggtcgaaccgaaccccgaggaagatctgccttaggtacgagtttcatcatcattttttttgtttttgtgcacgagtcattgtgctagctgcgcgatcgagctgctaaataacaaatgtcgtgctttatttgtccagttcctcccaactccagctttacttcagacctcccgctcatttccagaagaagaatgaggcgaccaagtcttcgtgttcaacgagccaacgctggggctcctgctcgtgctggtgatttatcggtcgcggtaaccgcggctcaaaacaatctagctgtctccagcacatctgcctcggcttctcatcctttgcttcctgagatcaataccgggacctcggctgcagcaggtcaggcagataacaatcaggtcgctcaggtctctgatggtgcaccttcttccccgaagagagctcggacctagccggaggtgcgcccgacgactgagctggtcgtgattgatcaggaggtcacccctcccaaggaagagagggtggaacctgcggctgctaacccggtagagcgtatgtccgcagacaggcggttatcaagtaggtcccaaggcgaa

SEQ ID NO: 19430 - DNA, 612 bp, Arabidopsis thaliana
ctattgagatatggtatgctacaagtgaatatttgcgacaagaaatgaatcctaattttaggatgacggaccccttcaatccagtccatatgatgtctttttcgggagctaggtgtacatacatcttgttgttagaaaatagtgaggacagtttagttgccttgcaaacatcattggctttgtcccagtgaaacattgtatttcgttttgccagaatttctatgatgccagtcgattttgaatctcaatttttacagacggtggaagttctatctgatgtttccgcacctgatttggcattgcgcctctacttgcagtgtgctcaggtatatgatcatttggactttggtgtatccactatcaaaaccaacaaaagatatagtgcatgagctgaaattttcttttattgaatctttaggcagcaaataactgtgagttagaaacagttgcttatgagttcttcacaaaggcatatcttctgtatgaagaagaaatttcagtaagtgaatttcttaggaggctacatgcaactttctgcaagaaagaccttgacgtggctataaattttgggtgttttaggattcaaaggcacaagtaacagcactacgttta

SEQ ID NO: 19431 - DNA, 838 bp, Arabidopsis thaliana
gacactccagaggatgcgtgtatttaatgttgagaacagagatactctgactcacaaggcgacaggggtatctttcctgacaaaccagttgagtaagtgtgtgctacactgaatactaacaaggctaaattatgttgttgtagtattctgcaagactcctaaggaagccagatcagtgtagagctgtttatgaatgtgcgcatctcttctgggctgacgaatgcgagaacctgaaagatggagagaggtatgtacacatatgaatgtatactcttaacatactaaatctcaaagttaagattggtagctgtacgcaactaataaggggagaaaaattgaggcatattgagagtttgttgggggtttttgggataccagggttgtgctttgcctgaagagggcacaaaggattgcagatgctgttcaacaaatggccaacgcatcccgtggtaccagtagcactgggtcggtgtctctatatgtcgaactgctgaacaagtaagtttctctttaagttgcatctatttagtacctactacctacgctgcaaaatgcttgcaatcgagtactttcccagttgtcactgctttctcttaatggttttacgagtcaaatgcaggtatctctacttcctggagaaaggaaaccaacaagtaacaggcgatacaatcaagagcttagctgaattaatcaaaagcgagacaaagaaggttgagtcaggcgcagagccattcataaatagtactctacgtgacatcgagtatcagagacagcaagaagatggtggcatgaatgagaaatacgagaagatcaacatggaatggtttgaatgaattta

SEQ ID NO: 19432 - DNA, 1698 bp, Arabidopsis thaliana
tcaaatgttttatcgagtaaatgagtcacaaaaggaatttaggataatccggtctgttcaccattattaggtagatgggttaagtttaccttggttgaatggattcagatgtctggtcaaaggatggagaggagtgagtcgatgaatttctcaccagtttatgaaaactggagtcatcattttggtctaaaagacttggtaccgtacgctggaggggaaggagatgagggatactattaccccaatatgtatggagcgcctgatttggatgttcttggaaccacaccaaaatactccttaccaaggtatgtacactatagcacatctgaagggtcacacttagggacgagaccacatgttcctgtgaatcaacccactgcacacccaaattcttcgctgccaagagaagttaatgaaggaaatggggaaggtcgtaatattcaaagtttgccagagactcaacatacgttgggaatgattcagactttgttgactcatatgattcaacaacagcaacaccaacaacagatgcaggaaagccagcgtgccgaatctccttcagccaagttcttaaaactgattatgatgatgaaggatttaggtgttcggaagtttaaaggagagctgaatacagttttagtagataagtggttgaggaatctggatatgaattttgaaacttcaaggtgcccggaagactttaagggccagatagcagtaaactttttagatgaggatggtcgagcatggtgggatagtgttgtttcacgataccgcgaccagcctatcacttgggatatgtttaagaaggagtttgagtctaagtatttccactggaggcacgtgatcgtctggagcttcagtttatgagtctggaacaagggcaaaagagtgtccaggcgtatgagcaaatttctacaagacttcggagatatttgtacaacggaagggatgatgaagctatgatggtacggagattccttagaggactagggcctgatatttggggacgtcttcagtaccaacgtgagtgaattaacggaaagggccgtgaatgtaaagaagggaatgagttagagaagggagagaagttacgggagaacgaaaagtttgaaggcaagaaagggaataatcgagaatttcagcctggggttttgaggactaatcagtcgggaggacgaaaccagaataatgatcgtggaaagcctaaggttggtaaccaaggaggacgtgtaatgaatacttacgatccaagagcctgctatatatgcggaaagccgggacattttgcacgagattgctcaacggtcgtacagacgaaagtgccaattctggcatttgttacttgttacatttgtggggagtcagaacatgtgtcaaatgcatgcccgaataagcaagcgggactacaggataaccgagtgcgagcttgtttcatttgtagagacctagggcattatcgtaacgcatgcccgaacaggcaaataaagcagtataaccaaatggttaaccacccaccgccagttcagaaagctaagggaccaccggtaaagaagcaagccactctagcaaatgtttatgccttagatgtagaacctaccaaaccttcaggacccgcaaaagttcctgtaacaggttagtatgggttcttacttttcttatttatgcgtgtttgagtgattgatcgttgtgtgcgta

SEQ ID NO: 19433 - DNA, 751 bp, Arabidopsis thaliana
tttcaattttttttggtttttctatgccttagatgaatgcagactcaaaaatattcacaatgcaacacacacttcctgagccctcccccaaacttaaatcacacagtccactgtgtgaataaacttggaagagagtactcaggacaaatccaatcaaagaaacaaaatgaagaacaaatcacaacagatgatataatacaatggtgaagtgaggcgcttacttcagtcgaacaatgaacaaagttggtcgtcaatggctgcctgtgattgctcccaggccatggacgaaccgccctgttccgtatcagctccacaggtgggtactcgacctcatcagctttgtggcggccagcaccgctctaaggataatcgacctctcttcttctgctgcggccagcaccgcggtcgcataaactacgagactgtagaagtcgtcagctcctgctgctagatcgagtgagtgtggtccttctcttcctcccagactcacgaggctcgaatgatgaatgcctcggagggacatgcggaatctcctgctctctaggctcaagcctgcgccgacttgtctaaggcgcgtcatatcttcttgaaggcatgtcttgagggagttgtccctgcagaatagttttagtggaagaggagcagctgatcttgtccttcggaaacttgatagcctgaggcacttggagagtaacttatcatgtttcttgcaccacttctgcagcttgttgttgttcctatgagcttagct

SEQ ID NO: 19434 - DNA, 1985 bp, Arabidopsis thaliana columbia
cgaagacgctttgatagctcaacaagtcttatagagatggtcacccttggttgagtaaatggatcgagtagtggatcgagtaggaggggcgagtagttgaatctgctgcttcatctgaggttgccttgatcgagtagttgggtcgagtaaactacagcctcctttgtagcatcctagatcgagtagtgaggtcgagtagagtgatgcctcttctgtagctgcctggatcgagtgaaaggatcgagtagagtccttttaagctccttttgcacctgaaaacacaccaaaacatgcaatgcgaatgcaagatgatcctagatgcctaagtatgcaaaacaagctaaaatggtgcaaaatgatatgatacaatgagcaaatgcaaagctaaatgataataaacatacacctaaaatgaataaaatacagtgttatcaattccctcaaacttatcttttgcttgccctcaagcaagcaaaaaaccttaagttgaaggagaggtttgaatgtggggattcaaaaaccgaagcatgcatataaaatgggtaagctcaatgtccaggtagcaaattctaggttgcaagatgatagacccttactcaaaaacgctagccatactcgtgacaatgtaacctaacgacttgccttaatctattcaagcattcacatcaaccaattccctttaacattcattaagcacgaacagtggatcaagcaatgcaatggttatgaactcacttggttttggacttaggccaagagacaaaaatggtccctttaatggtttggtcgagtaacaggggactctcagagaaaagattgagctttagtaaaatgcaaaaggtaaaagccaacggacacatacaagaacactcccatctacccaatgatataatatgatagctcagaagatgatcccattcccatagatgtcctaactctaccctttttctcattctttatctctttttggttcaagttctaaggggttctctttgaatcaatttaagagtctagcgggtttggttttatactttgacaaacttaaggcttttcttctaatcttagcacatagggcgatttacccttttctttgaatcactatgcctaacttctttgaattccaaaccctttactagacttaacacttttgtatcccccttagaactctaaactcttactcttttttttccttttcttttcattctcattctcattctcattcaatccatacacaatcccaatcccaaatacaagtctccacctagtcctagctaacccaaagagcgtgggctaggtctacatgaaagactgctcttgtcggctcatacctaacaagttataccaagctcaatcgaaaaagacctcacaatcacacaaatgatctttggcttgaaataaggctaggctaagggtatgggaaactgctctaaaaatatgataataggtttttagtcaattatcccaaaacaccaatcatgtcgttgtagtatttaaggttgtcaatccaaatgggtgtgatgctaacaatcaagatgtgatcagaagtcactaagtcaagccaagcaataacaggttttggtgtgttctagcagttctaagtgaacatgcagaaaacagaaattcaagcagaaacaataaaacactcgaccaacacagctctttgcagagcactgggtgaggtcgagtgacaggtcgggtaacagacagaaagtataacagggatactcgagtgcacagtctgttgccagacaactgggtggtcgagtatcaggtcgagtaacagtaaagaattgcagaaactaagcaacagatgacaagatgcagtaaacaacagtagagtaaacaaagaattcaattagacaaagaattcccgaggatggggtaattgagtagtttcgtttcctcagtttaaacgtggttgacatgctcaataaattaaccctagacaacaagttcattaaccaaatctaagtgccaccgcaaca

SEQ ID NO: 19435 - DNA, 1598 bp, Arabidopsis thaliana
cggaccgttctgtctatggtggatatgagtggccgtggaagatctccatttcgccttttattccttttttgcaggtaaagaagattgtagcttggaccaagtaggaggatgaagcggatagatccctttatcgtagaatccgagattagatcaaagatattacttcattgatttcaaatatggtacacgaagttattattgaaaaacttttgtaatggtttagcaacatatactgaagctgatagacaacatatcatgggacaacatgtcactcccacaaaccaagcaagatcagctcttgtgccaataatggcaaatacaacactaccaacatcacttaaggatggtaaagacttcatattatccgtttggtctattttctcttcttctatgagtgcttaagaaaaaaagttcaaattgtcttctgagttccctcaaagcgcaggacgtatttattaaggatatcaatcatctccttgattgattccaatcatatcttccatgtttgtaatattgtatatactcacattgattataagtgtgctcagcaagtctctcttgtgtatatatattgtaaatcgttgaatggaataaatcaatcacttctataaacctttatatggtatcagacgcctagatccaaaataataaaaaaaattcgatcttcttatttcttcttcgtctctccttcaatggctgcccacgctgaagaactcgttctcaacaacacaagtatccttaacgttaacatgagtaacgttaccaaactcaccagcactaactacctcatgtggagccgccaggttcatgcgctcttcgatgggtatgaactcgctggttttctcgatggctctacaaccatgccgcctgcgaccattggcacagatgcggctccccgtgtcaatcccgactacactcgctggaaaagacaagacaagctcatctacagtgccgttcttggagccatctccatgtcggttcaaccggcggtgtcaagagccactaccgctgctcagatctgggagactctccgcaagatctacgccaacccaagctatggccatgtcactcaacttcggacgcaactaaaacaatggacgaaaggtaccaaaacaattgatgactatatgcaaggcttggtaactcgttttgaccagcttgcactcctcgggaaaccaatggatcatgacgaacaagtcgagcgagtgctggaaaacttaccagaggaatacaaacccgtcatagaccagatcgctgccaaagatactcctcccactctcaccgagatccatgagcgcctactgaatcacgaaagcaaaatcctcgccgtcagctcagccactgtcattccaatcaccgccaacgccgtctctcatcgcaacaccaccaccaccaacaacaacaacaatggcaaccgcaacaaccgttatgataaccgtaacaacaacaacaactcaaagccgtggcaacagtcctccacgaatttccacccaaacaataaccaatccaaaccatatttgggaaagtgtcaaatttgtggcgttcaaggacatagcgccaaacgatgttctcaacttcaacattttctgtccagtgtc

SEQ ID NO: 19436 - DNA, 2103 bp, Arabidopsis thaliana columbia
gggacgaccatgcgctttttcgagcagctcacaattacatactccgaaatgttgattacattcaaaaatttgagaggtataaagtcattcagttttattcataattttttatatttaataattaattactgagatactaattaaggaagctaagcatctacgttaatttgtaggttatttgattcacaaatccgtgaagcatgtcctggattagaagaaaaagaatatgaaacttacaaagatcgggattttgctggatggttaaaatactatgtaagtataagaataattggaaaattcgtttacttatttacttataaaaaatgataattaaacttaatattttctttgtatacgttacaaacggatgtggaaacgaaccattaccactttggttgcatgagctcgttcaagaacaaagatctaagatcacaacttctccgatgtacttcactcatggctatactttccatacgtatccatatggaagtcgaagggcaactgcgaattatggaatccatgttgaaggtgaaactgagttttatggaattctacaacaaattctagaagtcgaatattcgggacttttgaatttgaaatgcgtccttttcaagtgtgattggtatgatcctgtgatcggtcgaggggtacgggtaaataacttaggggtggtcgatgtcaatgcaaacaagacttattcaaaatttgaaccatttatcctagcatcacaagcagggcaagtaagctttctatctcacccgcgtgagaggcctaggcgtgaagtgtggttatcggttattaaagttaatcccagagaccgtatagtcggtctagttgatgatgttgtgatgcaacaagaaagtatcagagaagtttccataccaaacataacaacagaagatgttatccacattgacctacaaaacagagaattagaagacatcactcatgacgattccgaagaagaagaacaatcagacgaattcggcgaatctgatgaagacgttgagtctgaaagtgattgtaataattcagaaaatgaatcagaatgaatattattattgtttaattatcaactttttacaaaatataacaaatatacgaaaaaattctgaaaatcttttttatatacttccaattttttaattttaaagtttttataaattcagaacttagtgatttcttatttaaaatttttgaaatttgttggtgttcttattatattttttaaacttaattttaataaatttgcgagggagttgctgggagtgccgcagattcctcgcaaaattgccgaaaaccctaaacaactttgtgagggatttgcgagtcttcctagcaactccctcgcaaaattagcggcttttgattagttatttggtcggctcctcgcaaaactgtagcaaagtttgcgagggatttgcggtcagttttaagtttatatatacaacgcgacccagaccaaaaaccctaatttccttcttcttctttcttcgtctccgtctccgtctccaaacaacgcaccggttccattcttgttcgtctccgtctccgtctccgatcttcttctccagttccttctttttccatcttcgtctccatctccatctccgtctccgaccttcttctccgtctccaatcttcttcgccgcctctctagtcccatcgatctcaaaatgcaaggtaaagaatcttctttcgtttagggtttcatgcaagtcgatttccgtagatatgattagggtttttcttgtacttaatcatttttgtctaagtttctaataagggtctcgaatttcatgcaaggtgaagattgaatgttctgaatcgccgcctcattccttcttctccggcaataacccgatctactaagccgtctctccctcttctccggcgataacccgatctactaagctgtctcaccctcttctccggcgataacccaatcttcttcgccgcctcttgagtcccatcgatttgcaaggtaaagaatcatcaaacgtttagactttcatgcaagtcaattttatctgtgtttctaattagggtctcgaattttgagttgggtttcattagatctagttagggttagagcacactggc

SEQ ID NO: 19437 - DNA, 1879 bp, Arabidopsis thaliana columbia
ttttaaaattttttaattccaatctcaaatgtcaacttcgccgaaacccagaaatcatttaatgcatttctcatcgatgaacagtgtacgtacgaacctggttcttttggattccaacgacgcggtccatacgtacaaaccgggttcagtttcgtcaggggcattttggtcagtttttggtttaatagctaataactgaaaggcctagctcacagtgttaaaatttgaaattaaaagtgggtcaacagctactgtgcgcaatttaccataaatatgatgtaagcatactgataagactcgtccacaccttagagcatgtccaatggttaagaaccatttgattcttaaccttgcatcttaagtatatttataatctaaattttgctttttgtaagttaagataagtaaaagagtattttagtaaaaatgagctccattgatgtatcttacaaagaaaatatcttagaaaaaaaattcagtttttacatcacaatatcttccaatacaagtaatgatacaaccaaagtcatacaagcattttacaaggattttgaaaatatgccttgctaaccaatggttaacgatggctgtgatgggcggttgattgaccgacgagttatgtccggaactggccgaagagagtataactaagagagagacctaatgctaagtatagaataaagatgatctgcatggaccaaatcaaacctgaaacccaaactgaaaaggagagataatctgcatgtgattctggccaaaccaaacctgaaaaccaaaccaaatcaaaccaatcaaaacgttacaaaaaacttaaagaaaaattgattcattcattgatgaactaatttattgatgagaatcagaaagactaaacataaggattgattcagaaagacatatcttaacttataacagaaagttcatacaaacactgaattttagacatcaaactcaaagcattcagaaacgacaaagcatttgatcacatacaagttgaaatgaaattggaaacaacagaaagacataacataagttgaaatgcaacagaaagacataaactgaaatgcaacaaaaacacaacatagagacttaactaatgttccaaaagaaagtcaattagtttgtttttaagagtcacttcattatcagtaagtggctcttttttggcgatgagagattccagcaaagtggttttcgataacctatctttcttttcaaagtcctccttctcttgctctcgatccttctgccttagctcccaatccttctgttttatttcccaaatagactgaatctccaacattgcattccctttgtcttccacagttgttgtcttggtcacagtcttttttgcttttgcctttgcagctttaacaccaatagggcgagacattgcttcttctactccatgggaaggtggctgggaggttgaaggttgtgcagccttgtcacactttcttctttttgacattacacttgcttgtgaacaccatttttgatcatggcgaagcactctccaagcatgctcaagggggaacttatacccataatcgttgttgaagatttcgtgtgctagtgatatgacatcattgtcattctgtccactagacttctctcttgatgcagcttcataactccctacaaacttgcaaacaccatcattgatcttagcccacctctgctttatgttaccttgcattctctttctcaaaccgttcagctgtggacttgcatcataataggcagctattcttgaccaaaaggtattagccttttgttcattgcctattactgcatctttacttgtgttgagccaagaactgacaagcaccatgtcttctttggctgaccatttcattctctctcttttcaccttagg

SEQ ID NO: 19438 - DNA, 441 bp, Arabidopsis thaliana columbia
ctgatgagttattatgggagtcccaaaacaaacaaaagcaactatagaaaacaaaatcaaatatgctctcatcctagaaatattcgagaactttaacgatagagacaacacctcaacaagtcacactactagctcataatgtaaaatcctgtgaataattctaagaactttgaagggaataaatccaatgattttacccactttagacctagtagctggtatggaggaacttcttaatccaaagccgaacaatttattaaccaaatgtccttttttcacacaaacaaggaattataccataatacatcaaagacgtcaaacaaaacacacataaacatccaaagtgaaacttgaaaatctcagttctcatattcttaaagctccttctgcaccggaacaacagtggagccaagtgattgtggagactcttcaacggaatga

SEQ ID NO: 19439 - DNA, 587 bp, Arabidopsis thaliana columbia
tagtaagattgtaacgatgatgatattcaaactagctactttgtttaaacctttagccaaacaaacttacaagctcagtattaattgtattgtttaattaataccttgtagactggaccaaaaccaccttctcctaacttttttttcctagagaaagaatttgttgcaaccattatgtcacgtacatttaggtaacacatattttctccagcatcatcaattaggccaccttctaatagctctctgctatgtttttcgtctgcgtataattcgtgtttcagaaactagtgagaaatcttgtatagtgattatgcaaaaagctaaaaccgatctcacctctttgtttcttttttcttcttattcttgaagaaatgcaacaatacaaaccaacgaaacatgcagcagttgctacaagtgatgctagtacaagtggtacacaatgcttttgcctttagaatgttctgtttttcctgagtagaaaaatgagtttagagatatctcaacgcattcgtttatttgttagtgaaaatactcacggttgtttgcagttgagatgtttgaagatgcaagtctaagaaagaatgtgt

SEQ ID NO: 19440 - DNA, 367 bp, Arabidopsis thaliana columbia
cttaacagtcatgataccaacatgaagatcgttctgactaatgtaagcagatgttttaatgggaacaaactcattgaggcgataaccattataggttacctccccagagacgtcaagagacttgtcgagtttaccggcaagagccaacaaaagcgtggtcttcccggaagacggaggacccagcaaaagtgtcatccttgaaggtttgacgataccagaaacatctttgagaatagtaagttgtgctttcttggcaagcctaattccgatcatgcctagagcagcttctcccatgtttctcaccgcgttaagaagcgaagtaagagatctatcaccggtgtaacagtcagctttcacagtccagtgg

SEQ ID NO: 19441 - DNA, 460 bp, Arabidopsis thaliana columbia
tattccttttagtggttggattggtgagggacaggacttgacaaaagtggtatatcatatgtcatgcattttcttattatatctgcttatatcttagatactttataatgagattagctgtgatcttacctgagccattacctaatgatagtcctaaagttaagtccaatactattcttcggtttgtgcatttttccatttcattttactctgatcttctgcttttagatgatatatttttcatgttactcctcttatccctcaagtaactgtgttgtttttgagggtttctgataagttgatactcttcttctgatctgcgatctaggaacattgcttgatggccagcctataattaatctaccaccaaagacaattaatttgagccaggtggacttttcggtagaggagcggtctttctacgtgaagcttgaatccgattcccgttctcagttcaagg

SEQ ID NO: 19442 - DNA, 528 bp, Arabidopsis thaliana columbia
agtttcggaatcatttcttgctttctctatctgcttgtaagaatagttaacaagtgagaggaaagtcctttttgttgcttaaatagtttgatttctgttgttgagtttatgcgatatcccaactggtgaaactgtgtttattggttcagacagagataaatggcttcaaagattattgctggcaagccggatgataccgagtatgaaatcattgaaggtgagtctgagagcgctttagcagcggggacaagcccttggatgaattcatcaacgttgaagcttcgacatcgaattggaagaggtcccttcggtgatgtttggctggctactcatcatcagtcaactgaggactatgatgagcatcatgaagtggccatcaaaatgctttatcccatcaaggaagatcaaagaagggttgtggtagataagtttgaagatctcttctctaaatgtcaaggactagagaatgtctgtctgctcaggggagtctctagtatcaatggaaaggtaagtgaacaaacatgtgtg

SEQ ID NO: 19443 - DNA, 607 bp, Arabidopsis thaliana
gctaaaagcaaaaggttaagtgaaccattctttttgaaaaatgtattgcttgagaaatctggcgataccagtgacttgactgctttggctttatcagtacatgccgttatgttagaatctggattcgtgttgttggatcatggctctgataagtttaagcttttcaaagaagttactttctgtatctctaaggtatactctgcctgagctaattacacgtaaggatactaatacagtcgagtcagttactgtgaggtttcagaacataggccctaggcttgtagtttacggaactctaggtgggtcttgtaagcgagtgcacatgacttctcttgataagagtaggtttttgcctgttattgatttggttgtggatactttgaagtttgagaagcagggctcttctagctactaccgggaagtgttcatgttgtggagaatggtaaaagatgaacttgttataccgttgttgattggtctttgtgataaggctggcttggaatctccaccttgtttgatgctcctaccgacagagctaaaggtgaagatactagagttgcttcctggtgtgagtattggatatatgggttgtgtttgtacagagatg

SEQ ID NO: 19444 - DNA, 551 bp, Arabidopsis thaliana
tcatctctcgctcaatcgtaaagacgagctcatcacgccttcgccggaggatacgctccgatctcttggtttaatatccggtgacctaatttacttctctctcgaggctggcgaatcttcgaattggaaattgagagattctgaaaccgtagcttctcaatcggagagtaatcagacgagtgttcatgattcgattgggttcgcagaggttgatgttgtccccgatcaagcgaaatctaatcctaatacctccgtagaagatccagagggagatatttcgggtatggagggtccagagccgatggatgttgagcagcttgacatggagctcgctgcagctggaagcaaaaggctaagtgaaccattcttcttgaaaaatatactgcttgagaaatctggtgatactagtgagttgactactttggctttgtcagtacatgctgttatgttagaatctggattcgtgctgttgaatcatggctctgacaagtttaacttttcaaaggagttacttacagtatccctgaggtatactctacctgagctgatta

SEQ ID NO: 19445 - DNA, 558 bp, Arabidopsis thaliana columbia
tgaggaattctcaaataaaactaattaagttttaagttttaggtttatatactgtgtgaactaaatgaagaaattaatcatgtaattaggtaaatttaagttatgatcaggtgttatagtcgtatgtaatatataaaaggcagaatcccagatgaaaatctccatatttagacattttcccaaaaccttcaacttggtttgttctaatataaaatctccaaattggaaaaaaaaatcgaattaaaacctccagttacatgtttgctaaaactacaactattaaatttcatctactttttttttcctactatacacaaaccacttcactatagtcgataacagaattatcggaaacagaagtacgtatcaggtctgatgccatagtgtttcatccccataagtgattcccaaccttaatcaaaatagccatcagagcgattctgcttatgaatagtctaagtacagccaatgtcggctcaagcatatgctaggctgtggggccaaaaaaaactggacccttatatattgagataatttttttacaagaataaacataaa

SEQ ID NO: 19446 - DNA, 557 bp, Arabidopsis thaliana columbia
gtaataccattgcaggaagtccggcaagattcacattgacctgcaacaaacctcatatgatacaaactatgtttcgtgtaacaacgattaaatagagaaagaaactacgaaagatttttaccgtcataatgtctccagcatacattgccagtggatcatcttttcttttcaccaatcttgtatgcagcagatggagctgccggagaaataaggatatcgttctgttctaacgctgctttgaagtcttttcgaattagtgtcctcacctgtattaacaaccaaacaaaaagagcatacatttatctatcaaaacaggttctatttctattgactgcatttgaagatgcggcttacctgttgagctcgcttgtagtaagcatcgtagtaacccgcagaaagtgcatatgtccccattaaaattctcattttcaccttgaaatcaaaattgtcattgattataatcaagcatttgttgattaaatcagatggagtaaattctgaaatcatacctctcctccaaatccttctccacgggaacattcatacagcttattgag

SEQ ID NO: 19447 - DNA, 594 bp, Arabidopsis thaliana columbia
tatgatcataggaaaattttaaagcttgaattaagcactggtataaacaaagatttacctatgagaacggctgctcctctcattcaaagcagtggcacccacagcacgattcttttggccaatcctcatcaaatcaaggacatctcgagtattagaaactggaatcaagtttgcatcgggtacattaaggccattgagttgagaattattgcgtatgtctaatgtgagaaactggtcaaggattacgggattctcagaggaaacactcgagaagaatatgtaaatatttcaacactataaagtatatgaaaggatatcttctggaggaaccatcactgactagtagatctctaacttgttcattatatatttcgatcatttggactccaatttcataagtcaccacatgtgttcttgcatttgaaagctggaagagatcgcgtagagctcggtagttcacgccccaagttgtctccgtcatcagatctggcccactctgtaaggcaaaacagagacaaaccaatgtcaaaggcagagtaagaaatagcaatgtctgacggtttatgggagtcacgatgcaagcaaatagaaatg

SEQ ID NO: 19448 - DNA, 593 bp, Arabidopsis thaliana
ctccatagccagcataaagaggtagggagataacaggtcatcctaccttaaaccgtgtgtgctttgaaaaaaatctcatgtgatctcatttacaaagactagaaaagttagagtttaaatgcactattggatacaatttatgaatacttttgggattaagaatttttagtgccactatgacaaagtcccatctagcataatcaaagctttcataaggtatacttttgaaatacatatagactcaatattattgtagttgtaaccttaaactctctgttgccatgttaaattacatgagcaagcaaattttgaaggatgtcaaaagctttgcaatatatgactttgtaaagagtgttcaaacaagaaattggaatgaaatatgaagttcttgatgcgttaccgatcttggtgataagcactagagtgcaacattatatttcttcaataaggtactagataaccactagagtggtggctgttcttgctagacaagaaaactttttagacttggttgttgatattgcaaatgaatgattataaatgggaaaagtcagtgattaatctttaagaaaggacctataatcttaaatagt

SEQ ID NO: 19449 - DNA, 937 bp, Arabidopsis thaliana
tgttcatctcggtacaaccaagaggactccattgtgatgaacaaggcttcattggaacgtggtatgttccgttcagagcagattagaagctacaaagcagagttgatactaaagactcggagaagaggaagaagatggatgagcttgttcagtttggaaagacatacagcaaaatcggcaaagtagacagccttgaagatgacgggtttcctttcattggtgctaacatgagtactggcgatattgtcattggcagatgcaccgagtctggggctgatcacagtataaagctcaagcacactgagagaggaattgtgcaaaaagtggtattatcttctaatgatgaagggaagaattttgcagcggtttctctgagacaggtaagttccagatcatactgaatcgagctgtttttcagagaatgcattcttatgatgaatcaaatgttccattgattggcttttacatcttgcaggttcgttctccatgccttggagataagttttccagtatgcatggccagaagggtgttttaggctatctagaggaacagcagaattttcctttcacgatccaaggcatagttcctgatattgtgataaacccgcacgctttcccttctaggcagacaccaggtcaactcttggaggctgctctctccaaaggaatcgcttgtcctatacaaaagaaggagggtagctctgctgcatacaccaaattgacacgtcatgccactcctttctccactccgggtgtcactgaaatcaccgagcagcttcacaggtacattcttcacattgtcacttggtttttagctcgtaaaacagaatattgaattatatgcaatacagattgacatttggttcctagggagtcagatggatgatacattaagggtaggaactaatataataatgtgcctggttgagatgttgaa

SEQ ID NO: 19450 - DNA, 1298 bp, Arabidopsis thaliana
gatcctctgtctccaaaggtgaagaagggctgatgcaacatggcaaatcatgcggtctttatgttttgtaagtccctcaagcttatccatcatcctccttggttcttttggttttggagtaatgttgatcttcatcaataccgagagagcgtcaatgcagcgagacgcctctgctttaccagaaagtactcccttagcgttggccacatcagcagctttctttgctgcttcaaacaacttcaccatctcatccactttcttcttcttcagctccttttctgttttagtcttctttatcaatgaaccatcttcatgtggcttcttcgttgtaacatccaccaaagagacacgccttgtcttcaatgttgagcggttttagattggtctttgtctctttcttaaaatatttctcgtcacaagtctcagatttatgatcctctttctgtttcaaagccaaaaagctgttccttgctttaatcttctctgtttcacgagttaatgatctctgatcttctttcttattcaactccgagagtttgatcgttgtcttactctctaccgcttcaacagtcgtcagagttctctcgtcttctttattcttcaacaccgtaaaggcagtgacttgacaagccatagttcccggttcgtcttccttcttcaactccgaacaccttgttagaacatgcttctccatcttcagacgatccttggtaagagcagctttgaaagagttgtcgcttccatgtgcgtagaatgtcttcaaccatgaatgaaacaaggcttgggctgccttacggattctagggttcctatgacttctcaaagtctccaacttaactattgattcagacaactctatatccttcacggaaagagacagagacttcaagtgattcaacacatcgatgcatcgctcgacttcgcatgggttccgtgtattgtaagtagccttaattgcagcagcagtcaagtcgcataagtcagatctctccttggcaattctcactctcatcatctttccgtcgttcttgatcatcaggtggctagggttttcagtttatgttgaaatcgaaatatgaaagagataatgaacaagagtaaatatataggaggacttgtgagcggtgccttacaaaaaggaaacttgagtaacgtgagattcaaggattagatttggatttgaattttcttatgagatataaagatagaagatataccgagagttgtaacaaatccacatgtaaacaaatcaaaatcattacaatttgtctagtacaattttggtttggatggtttga

SEQ ID NO: 19451 - DNA, 898 bp, Arabidopsis thaliana
gttgttgttgttgttgttgttgttgttgagtaacttcgcgagattattctccatctagcatcatcgtctcaaggtcatcattagcaaaaccggttaattcagcctcttctggctgctcacgatcttcatgtccctctagcatcgtctcaaggctatcagcaaaaccggttaaatcagcatcttctggctgctcatgatcttcttgtccctctagcatcgtctcaaggctatcagcaaaaccggttaaatcagcctcttctttctgctcacggtcttcttgtccctctagcatcatctcaagctgatcagcaaaaccggttaaagcatcctcttcttacactacttggttccgtaagatgttgttggtgttctccgccacctgagtctgatgagcctgatggttaacgagtccaaactcgttgacgttcgcctctttcttgtatcggatccgacacaagacaaccttttggaggtcatcactctagtgaagagaatactccatcttctgtcaatcggtcttgacaagctttccatgcactctcctgtggtacgtgaaagactgctcgtaacccatcacccttttgcatgtgtccgtccttgatctcttttttcccatcgttgcttctccaagtgccgccttcgcttcctcctcttgcggctaccttccggtgtacgcttaatatcttgccacctcgttcagtaagcggaacaaagtagtaccactcgttgttattgaacaaaggattgtttacgtgaggaagaagccaagggtagtcttggtggatgtccatagttgttatgaaactgctctgatttctctccaccttgtttcgaagataaagcctcaccaaccctagatccgtcggacaaaaccgtgatccaaccggaagaatcttca

SEQ ID NO: 19452 - DNA, 632 bp, Arabidopsis thaliana columbia
taagcattggattgatgtcaaaatttgttctttaccttggctttggttgtgaagcaaaagagagcaagggctgaatgagtctatgatgtgatggactaactagaaacatggcctgtgatcgacgcagcatctcagccattgatggagtctgataagcctggacaaagctcgaactgtcccttgaatttcccctcgctgttgctctttgccatgagtgtgagctaagtccagaaagaatataagctcttcccgatgcctcgtacatgtgactactcctcattctaccttgcatttccttcagttccgagtccaaagcaacacaaaacctgtcacatgattttgctgcaaccgtctctgccaaaaccaatctaaaattctcaatggctttaacggctgcctctaaatctccatgctctgctaaagttcttgcttgggccattgcctctgcagctaggaatctgtttctttgcctgaccacttcgatgggaacaactttttcttcagcaacatattctggtcttcgaatctgaagcacgtgactttcaagcgttgtaactcctttgtcaagggattaatgtagagacactcagctttagaatggtgtatgccatctcgtcacagggatgtgatag

SEQ ID NO: 19453 - DNA, 548 bp, Arabidopsis thaliana columbia
ttcttgcccagatagatgacatatgcattggtagaaacataatcatcggaatccccggcccaatctgcatccgaaaaggcatggagattcaatggtgaggtagtgtctaggaaaataccatgcgttgatgtgccggcaagatatcgaagaactcttttagctgcttgccaatgatcttctgtgggttgaggcatgagctgagataatcggttgacggcatacgcaatgtcaggacgtgtaaacgctaagtattgcaagctacccaccaccgatcgatattcagatgcatcgttgagttttgtaccaccatggagagtgagctttggtgaggtgggtaaaggtgttaacaccggttttgcgtcacgcatgttgtgctttgcgagaagatccttgatatacttcctttgcataaggtgcaaacttgttttgttcgggttgcttctataccaaggaagtagtgaagatctgtgggatctttgatggagaaacgttcctgcaaggaagtcagcaccgcatcgatggatgacttgtcgctccctgtgacaata

SEQ ID NO: 19454 - DNA, 595 bp, Arabidopsis thaliana
taccttacacaattaagcaatagattgatggttatgctaaaccgtttttgatacttggttactaatacttattgggcttctgattacggcccaattaaatcgagtgtctaattatacgttccttcttcttcttcgagcaacgacagtccctgagaatccaaatcggaaacaatctccggcaattcaatagtaaatgcgttgctcagtttcctctgttgttcgtccactatcagtagatcctgcgacagcgatagctactttgtgctcaaagggtaaccttcgagaagctttccagagattccgactcaacatcttcacaaacacttctctcttcaccccttttattcaatcatgcaccaccagacaatctcttccgtccggaaagcagctccattgtcttctcgtcgtctccggattctcctccgacaagttcatatgcaatcatctgatgagcatgtactccaagcttggagatttccttccgctgttgcagtatatggacgtatgcgtaagaagaattatatgtcatctaacatactcatcaatgggtatgttcgtacaggcgatttggtaaatcccggaaggtgtttgatga

SEQ ID NO: 19455 - DNA, 470 bp, Arabidopsis thaliana
atgatctcagtgttgaagacttttgagatcagtttagtaacctcgtggcaatcgttgcagacacgtagattcttgaatatacggattggagtctgaggtggtaagtttatcagaccaaaagcaatggcaagtctttcactgtgcagcctaagggaatactctttgctaccatcattggtggcatccactaaaggtgcttgagagcgatccggtaaataaccaattgatcttagcctgtcgtcgatcaccttcaactgttggtatatctgtttggtctgaggatgcgacgtgtctcctgcgaaaaactcgtgggagatgccatttatctcaatagaactgcatccaggctcttttctaattccatgttcactcattagttttctaacgattccaacatcgttccagcggctagctgatgcataaactctagacaacagtacatatgcaccactgcagttaccattggagct

SEQ ID NO: 19456 - DNA, 892 bp, Arabidopsis thaliana
cgctttccatgccgggaaatttgtcggagactgtaatgaaaggctttaggcctgaagctgttccggtttatgctgagctggttaaggaattcgctgtgttcgaccggtggttttcttcaattcccggtccgactcaaccaaaccggttatttgtctattcggctacctcacatggttccactagccatgtcaagaaacaactcgctcaagggtaacattatcaaattctttctttaaattattattttcattagtccttgttaattttcattagtttaatttcacacttgattactgaatttttaagattagtttccatagaaaatattgagataatataaactattataaaattttgcatagttatgtattcatcatttaatttcaggtatccacagaagacgatatttgattcgcttcatagcaacgacatcgacttcggaatatactttcagaatattccgaccacattattctaccgtaatctccgacagctaaagtacattttcaatttgcatcaatacgatttgaaattcaagaaagacgcggccaaaggaaagttcccgagcttaaccgtaatcgaaccgaggtatttcgatctcaaaggtttaccggctaacgatgatcacccgtcgcatgacgtggctaacggtcaaaagctggttaaagaagtgtacgaggcacttaggtcgagtccacagtggaacgagacgctcctagttataacctatgatgagcatggtgggttctatgatcacgtcaagactccttatgtcggtaaccaaatcccgatgggaatactggaccggctcctggtttctttaaattcgacaggttaggtgttcgtgttcctacattatggtttcgccttggatcaaaaaggaacggttag

SEQ ID NO: 19457 - DNA, 1277 bp, Arabidopsis thaliana
ctcctaaattatattttgtcatgtgttggattaagggatgttggtggagagtgcgagcaacactagttgacgagtatccaaagtttcaagtgagagtgtatgtttcggaacatacatgttctattactaaacgctcatcacgttcccgacaagctactcacgaaatacttggattgctctctaagaattacgttggtggaattggacctaaggttctcccaatgcatgttaccaaagtattgactaaacggtttcaaatcaaggtacgatttccaatttcttggctttctttgtttattaatcacaccttgttatcaaccaactaatcactaaagtcaatacattttgatagatggattactggaaggcttatcagacactaagatctgcccgagaaatggttaggggtacactagaaagtggttacgagcaacttccggtatacttgtacatgttatggagggaaaatcctgaaaccttcacgcgacttgaagtggatgaaacacagcgatttaagtacttgtttcttgcgtttggtgcaagtattttaggattccctttcatgaggaaagtggtggttgttgacggtacttttttacagggaaaatacttagggacacttcttacagcaacaactcaagatggtaactttcagatatacccgattgcttttgccgttgttgatactgaaaatgatgcctcatgggaatggttttttagacaactcagcagtgtgattccagatgatgaaagtctcgccattatttcagacaggcaccaatccattaaaagagcaataatgacagtttatcctaagtctagccggggaatctgtacataccacttgtacaagaatatattagttcgctttaaaggtcgggatgcatttggtttggtaaagaaggcagcaaacgctttcagattagtcgattttgaaaggatatttgatcagattttagctttgaatcctgctcttcatgcttaccttcaaagagctgatgtacgtttgtggactcgtgtgcattttcctggtgataggtacaacttgcttacaagtaacattgcggagtcaatgaataaggtcatgtcacccgcaagaagccttcctattgtacaactgttagaagaaattagatccatgatgacgagatggttttcagacagaaggaatgatgcattgaatttgtctacatatcttactcgtggagtagagaagatattgcaggtttcatttctaatacaaacacaatttatacacgtccgtatattggtgatta

SEQ ID NO: 19458 - DNA, 1004 bp, Arabidopsis thaliana
gttttacttcgaggagtactccgcaccgaggcaaagtaaagactcaaaggaaattcacaagcgccttggtttcctccaaagctggtgtaagttccacgacaaggctctcgcgacactcaacaagaagtttaacaatctctaactcaagatcagctgttcttcttcaactacggcaatgccacagaacttgccgagggaacaccatgccgcaccttcaccaccaaggcaatcatccttcgaacctagagagaaggaaaataggagcaagttgaaaaagcgaagaagaacaaggaaatcatatgctggagcaagccactctaccgcatcacttgaggagccactctatcaacaacccgagtaaagggtcgagcatccagctaatccaagttcagcataacccgttctttagagttacacaaaggagagtatggacgatttcgtctcctcctacttcacctgatcactgaggtaacaccacctcaaccattgtatataccatagcatctttttattattttttgtttgttttgtgttttggtcttgatttctttctcagacttttattacacaagggactgtgtaatttaagttgtgtgtgtgtgtgtgtgtgtgtggtggggggggggggtttaaaacatgtttaacattgtgttctattttcttatttcgaatattacatcatctaaggcatagaaaaaccataaaaatttgaaaaaaattcagaaaatgatttcatcaaaaacagagtgtcatgtagattgcatttcattttaggattgtatagagtgtgcttgcatttaagaatgctcatttgcataggggataatgatgatttcaaaccgataagcatcttttgattcaatgaagtaagttcaatgtccaggttgttagttctctgttgcataaccgattgtatctcggaagtaagactgcaccctgctttgaatttgtaacttgactatactactttgattcgaaacttgcttatctgatgccatttgcta

SEQ ID NO: 19459 - DNA, 1108 bp, Arabidopsis thaliana
gtggttattgaacagtgtcacgaagcagatctactccagcatcttgtactttgcgactgcgtctgagatttggaaggatcttcatactcggttttcacaaatcacacctccgtcgactatacaagctgcgtcaacagatacattctcttcgtcaaggtttcatggatctctctacatatcatactaagactcatactctgtggtaagaactatccagtcttcaggtgactgcgcgatctgttgtagcgttgatagctgaaagcgaaactcatcgtgttattgatttccttatgggactcaatagcaactatgatactgtcagaagtcagattttgatgaagaagagcttacctagtttgtctgaggtctacaatatgttggatcaatatgattctcagaggtcagcttgtgctcaaactggtacattggattctacagctttccaagtctctcaacagtcagctcagggcatttctggtggttttcagtttcagcgaaaggacaaaccaatttgcacttactgtggacgtgttggtcatgtcatggataaatgttacaagaaaaatggctatcctgttggtcatccacgtttcaagtcttctaaggctccagttactgcggctaatgtcttggtggatggagatattgaagctaatgcagttgttgacaatgtcataggaaatgatgacctatccacagaacatatgcagaagattgtctccttcctcaacaccagaattcatagctcttctcccacacctgaagttcaggctgtttcaatgccttccctccctactatatcagccactggtccaacacctggtatctttcatccctctatcatttgttcttttaccagtgttgatagaccttatgcctgttctacaaatagcaatctcatcgctattaacgctttgggttatagacacatgagccactaatcatatctgccatgataaaacttccttcaccaatttcaaaactcttgaaaacaccaatgttaatcttgctaatggtggtcttgtgagcattgttggtataggaactgttactttggttagaaatcttgtgctccaaaatgtccttttcattccccagtttaagggga

SEQ ID NO: 19460 - DNA, 1221 bp, Arabidopsis thaliana
tagtaacgtccgccagtgtgctctaaagtatgccaatagcgcggcgaaactgttgatgcaagacctcacgtttagtcagctacgaaccggaccctattccgtctcctcacaaaaagaactgccgaaatacctctccgatctgcaaaaccaacacgatattatcgaaatcctcactgttcagcgtaaagaagaggaaacagcattgagctgtcggcttgttttgcgaaagtgacagaaacagaaccggtgattattttcgaaggtatcgaagcgccggcaacgctgggtttaaaagccagtcgctcggcaaattatcagcgcaaaaaacaaggtttttatgcgcgcttttttctgactaactctgcaccaatgttgttgattgacccgtcacgagatggacaaatcgtcgatgctaacctcgccgcgctcaatttctatggttagaccatgaaacgatgtgccagaaacatacctgggaaataaatatgctcgggcgtcgcgtcatgcctatcatgcatgaaatctcgcatttacccggtggtcataaacctttgaattttgttcataaactggcggatggttcgactcgtcatgtgcagacctatgccggaccgattgaaatttatggcgacaagctcatgttatgtattgtgcatgatattactgagcaaaaacggctggaggagcagctggaacatgctgctcaccatgacgcgatgaccggattactgaatcggcgacagttttatcacattacggaaccaggccaaatgcagcatctcgccatcgctcaggattacagcttgttgctcatcgacaccgatcgttttaaacacattaacgatctctatgggcattctaaaggtgatgaggtgttatgcgccctcgcccgcaccctcgaaagttgcgctcgcaaaggcgatttggtgtttcgttggggaggcgaagagtttgtcttattgctaccaagaaccccactggataccagcgtttcgctggctgaaactatccgcgtaagcgtggcaaaagtgagtatttcgggcttaccacgctttaccgtcagcattggtgtggcgcatcacgaaggaaatgaaagcatcgatgaactgtttaaacgcgttgatgatgctttgtatcgggcgaaaaatgatggacgcaaccgcgtgctgcggcataagccgcggatgcttctcgagatcaacgactgcgcttagcctttaa

SEQ ID NO: 19461 - DNA, 1578 bp, Arabidopsis thaliana
tctttctctctctctctttctctctctctccccttccacgattcctcttatcgattatggcggcggctcacgagaaatcggtgataccaattctgcaaacaaatgagagaagattcttaaaaaattcgatctcgattatctcaaaactttggtaaaagttctatatccataaggtcttggaggtggaggtctctgcaacctgtaagaaaaacaacaaataatgttttggtatccataataacgtgtccatttaaatatatccattcggaaacctttctactgatccatatccattctatatactatgtccataataacaagagattcgattaaccttggtttgtaaagaaaccaaagttctatgtccacaaggtcttggaggtggaggtctctacaaactgaaagaaaaattaacaaacaattttttggtgtctataataacgagtccatttatatatatccattcggaaacatttctactgatgcatatctattctatatataccatgtccataataacaggagatttgattaaccgtggtttgtaaaaaaaccaaagtttcatgttcgtaaggtcttgaaggtggaggtctctgcaaactgaaagaaaaatcaacaaacaattttttggtatccatattatgtccatttaaatatatccattcggaaacctttttactaatctatgtccataataacaggagatttgattaacagaaatctcgatgctacgtaggtgaaacgagttttacccatgagagagagcaaaaatcaaatcaatccgccattgttgaagaagaagaagtttcttagagaattggatctcaaatttatgtcaaaacttagatttaaattgcaaaataaatcacaatctgaaagaaaccaagggctcgtactctccaattaagataatttattctttgacttgagattgaaattacaaaacaaaaatcaaattaccagagccacacatttgctcaaggcggtggaggagcctgtgacggaggtggtggcggatatcgcaagagaggcggtaatgaatacggaggaggtggtggttacgagagacatagcagaggttacagatctggtggaggttgtggtggaaaaggatagggtggtggtggccgtgagggatgtggctaaggaggaggtggcgctggaagttactgaggaggcgtagtggagtttggtaatcaaagatagtgtagtttattgtcactgttagattgttgagagatatggaagatgatgataaagcctataagatttaaatttgaattttgaatattgaggttgtcctctaatatttgattttgattctggaaaaagagagagaggaagaagagaagtaagagatggtgaagaacaaaataaatattgctaaagagaaagagaaaataagattaagggcaaattggaccatttaacaagccaaagtgccttctcttttgaaagtgcataaacgacaaatatttttgtaaaagtgtcccatagtgtaatattctcttataattattacccatactgattataccttaataattttactattttgatataaataacaaatatata

SEQ ID NO: 19462 - DNA, 678 bp, Arabidopsis thaliana
ctcgagactgagtatgagccagagcatcggcgcagggagacgaagcttctgaacaaacccgacgaggttacagtggaggagtatatcagattcttcaagatgaatgacttctggggaacgaggtatccgtgttatgagactttagcccagctggggttactggaggacgtgcagcatttgttcgagaagtgtcatctggagacactcatgtcttacccttaccatgcctataaggaggagacaatcgagtttctttccacgctgcaagtggagatgtatgaagcactcacagactttgagctggataccatgggattaggcttcttgacgttctcagtgaatgaacagcggtatcagctttcgatcaagaagttagaagaactgtttggtttccctagtggaaagggaaccaaacccagatttgacagagatgagcttaaggatttatgggccactatagggaacaatctaccgctaaactcggcgcggtccaagagcaaccaaatccgaagtcctgtgatccgctacttccagcgattggtcgccaacgttttttactccagggagtctacaggcaccgtgtctaacacggacatggagatgatagattatgcgcttacagggattctccgccggacaaaggggaagaatgtcttgagaggtgatctcaacaacgcg

SEQ ID NO: 19463 - DNA, 1141 bp, Arabidopsis thaliana columbia
acactgtgataatgacgtgtttaaaacgacgtcgttttgcagtgttggaatgtaaaattttcaaatttttgcaaaatacggtttcgaacccgtgtcctctttgtctatagagagggtgttaaaccatctcatcccacaaacttcattgattatacaccaaacgttttaatatataaaggtaacgatttttctttaaaatgaagtgtctagccattttatctaacacaactttatcggttagatgccaaacattttagtatataaaggtaacagttttgtgattttaaattaaggtaaaaccctctgtttataccagcaatgtaatacccctgaagatgactagcaatcggactgaaggtcgcgaacgtagaagtgtgaccgtgactttcaaaatctttcgtaaagaaaaatttgatggaataatgggtaaactagcactacctaaagtgatcatagatcaaaggaggctaatcaaaagagttatagagcaatcacgagtgagttcagatttattggctatcgctaagagtcatgaagcttctgttagtgtaccagatgcatcagatgtaggagttaattctaagttcagaagtgttgttgagaacaccaggcagcttctgttagtgtacccccccaccgccccctatctgtcgtatgactcgatttgggcattaggcctggctagccgaacacaaatgtattttgaagtattttaagattaataaaatgagttttcttaaaagccttgtatatctctgatattagtcttgtccggactaacacaacttgcgaatgtggtacgggttgaaaagccttaggccatgttcgagaggaacgatgttcgcagatggactgaccttggtactggaggtgttctgggaactcagtcggattgtctacgagcgtcttaggtaacgcttccggattcgttcttagttttagaacggttcggggtgttacagtcggtccatataaatctctaactaaattgttaatgaaaatcacctttaagtataaatattaagaaaaaaggctccttcattaataattacgcttaaatatatctagtttaatagatatattgtgttaatgcttattaaaaatgtttaaaacttatattcttaaaaattgctaatgtcga

SEQ ID NO: 19464 - DNA, 309 bp, Arabidopsis thaliana
tgttcctctctccatgagtttcaccagcttctgggtaatgtgtaatcccaaaccttcccttgatgttccctttctcaaaggctgaaacatctctcttaccagatcctcaggcagtcctggtgccgggtgtattatcctgaactcgagtttcgactcttttcattctttgtcctatagcttctatccgtgcaattaccttgaatgagacacacaatcctctcaatgcaggcgtgaagcgtatgctgcttaatagtgtctctgaaaggatttgctgaagccttaagttgtctccgtacaatcgtcattgat

SEQ ID NO: 19465 - DNA, 1594 bp, Arabidopsis thaliana
  unsure (1)..(1594): unsure at all n locations
ggttaacgatttgttttatctcgtcaccgggatattgcggccactcatcggtcagttgattacgcagggcgtaaatcgccagaatcaggctggagagataatcaccctgcatgagcggcagggtgttggttgtcgcaggccgtggataaatgctgaaggttgtctcgtgttatgcccgccagcggaattaaaaacggatctttgcgcagaangttcgccagcaagataacgcgtttctcttctgtctcatcaatgaaatggcccaaaccagggcggctggccaggcaacaagtgcgttcataacgctgttttaaccggggcagacgctctgctacccacgtttctggcaaattaagcgccgaggcgagttgcgcacggggagtgaaagtattcagtaataacagcgccacagccgatcgtcgttatcgtgcttttgcagcaactgaaaaaagctgcggcgctcgaagatttccagctgatagcccgcactgccactggcgaaaatgcgggctttgccgttaagggtgaagttgagatagtcaatatcacgcaggatggtcctgcctgaaacgccagtctgttgcgccagctcgccaggcgtgcgcggctgttgctccagcagatcgacaatctttaactggcgttcgtttagcattaatccacctgacggaactggctaaacgcgttgactttctccgcagttaaggtcgtcagaaaaccccgtatcagcgtgagcagagcttcgtaatcggcttttgaaatcataccgctgttggcgtgcagataacgagttggcagacacagcgcgacaaccggacgcccgccgcccatcacgttgtagcgcccgccatccgtcgcacgggttttcatggtggaaaattgcagcggtaaatcgttatgtgcggcacagctttttaacgctgctaccagtttctggttggggaagtagcgcttgtcaaacagcatcagccccagcccctggcccagtttcagcgggtatttaatgttatcaatgcccggaacatcgcgcgctacggcggtatccaacacgatcacgacgtccggtttaatgtgttccgccgaggtttgcgccccgcgtagcccaacttcttcttccacactgccaacgccatacagcgtaatttcgggattattcaccgtctgcaatagttcagccatcattgcgcaccgatgcggttatccaacgccttgccgaccactttatcttcgccccagcaggcaaaattggcttccgggctaataaaattaccaatttccacgccgcgcttttccacctcttcgcgactgttcgcgccaatatcaatgaacatctcatcaaatgacagcggttgttgcttttgcttttccgttaacgcatgaggcgcgacggaaccaatcacaccagggattttcactcccttgtgtgtgcgtatggttaccaggtggttgagcatcgactgattccaccagccgccaatggtggtaaaacgcagaaaaccgctctcgtcgatgtgggtgacataaagccgacttcatccatatgtccgacaacggcaacttttggacctttattccccttacgggcaacaaagct

SEQ ID NO: 19466 - DNA, 967 bp, Arabidopsis thaliana
actgctcgtgcgagcttccgtttctggataagctaacctccttttccggtgggatctgacccaccaattcttcccgactagaatctccattgcagacaacgattgtgaggtggttcgattcattggctgaatcgctctgcttctggggagacttgtccttctgctgctgctgctgctgcttttcaaggtcgtcaccaccggagctggagctactttgcatctcaaatctgtattcccctctccgatttccacaaaccctaggaagccatctgagccacgattcactatgggaccagacgaaaaacagagattcaacttttttttactttactttgtaaatctatatgttttattagttctctgatttctgtcttgtttcgacacaagttagttagtatttaatgtaattgggccataaataaatgggcctacataataatattgggcctaagtaaatggacctgggccgagttccgtctctttctggaagcttaagaaaacaagtttaggtctggacctctagaattaattgtttagagagagaaagagcgagagatgggagggaaaggaaaaaagaggagagagaaaaattacctagctgctcacggcggaccggcgagacttccgccgccgcctgatcgttcgaagcaagatgatgttccttctacgctccgtatcctcatgaactacacttctccttctccccatggtaaaaattagaacgaatagaatcgattttggtgtgtgtgtgtgtgtgtgttgttgtgatttcttctctgtgactgtttgttttgtaatgttcttccttcagattctactaaacaagtcgtagagaagaaggaaaagcttaagaaagctgaagtagttgttcctgcaacggtatagttttctaacttggggttttgtaatttagagatattaatttgactcttgtgctatagaacaactttaaaatgatatgggggat

SEQ ID NO: 19467 - DNA, 540 bp, Arabidopsis thaliana
gagctagaggatctaaaaccatcttccatggagagcacgttgtgacctatggctgcttgcgcattctcaaatctcaggtagacaaaaccaacgctgttcctgttttagcaacagagattcaaagtcgtcagtcagagaccagtctagtctactcttttcgagatgagaaagttacaagaccctgaagctcactcacttgtcaacaaagatatgattcagttttccgaatttggagcattcttctttaacatcttcttttatatcctcatcaaaatcatcttcagtctgccaaacagatacaagtgtatagaagaaatagcttgaggtacgaattgttaagccaaaagaaactatttagcagaccactaacctctgtggatggatcaaacatgtttttaagcagcagacattcgctggggacaccaattgggtcgaaaccagctggtataacaccgggaataatgccgtgacctgcgaggtccagcaacagcaggaaaagacccttgtacaagagcaggagctgccaacgaagagattgtt

SEQ ID NO: 19468 - DNA, 901 bp, Arabidopsis thaliana columbia
aactagtacactcagattctcagtccaacaaccgcttcagaatagcaatagtttcagcttcacaaagaactatgatcttgcttcttaccaacccccaccctccacccgcacctagaagcaagatataatcattgctggaacagattctggatggtcaacagtggatcttagagagacctacccctagatggaatgagagcagcctcagcacttcttgggatgctgtttcaatggaaagtgagtatgagttagtgaagattgaggggagtgacgattttgaagttgcagaggcagtgtcgaacgataccaacccttggtgtcgatcgacaccatcacatatatacgagacatcgggttgtgacaaagcaaaatggaacaggctcgacattgatctccagaatcgctcaacacacattgatagtgtcgatcgacaccaccagtaccaagctgaggaagtgttgacgtttcacggagcagaatcgaccgagattgacagagtaggatcgataccagatagtagtgtcgacgacactcacctggtgtcgatcgacacttgatgcaaactgcaccaatcagccttgactttccacctgttgttaaactagtctacacacctgaaattccttcttcattgcctcaacagtatatgcaagggattcaaaaggaccactacaagcttccatagcataaggagaacaacacgaagacaaatattgtcttagaacagattacagcgctgaattattaacatgctaaggaaactcgagttgtagcacgagtgtcgattaccactcgcgtcgatcgacacacatcactagttgaagcagagttatctctgatagctacttttcaagctgggatcacttctatcagtccaggcactactgtcacgtcacacatt

SEQ ID NO: 19469 - DNA, 544 bp, Arabidopsis thaliana columbia
tagtaacgaccgccagtgtgctctaaaggctgccctatttccgctctctcggcgtgaatgtgcctgtcgtgctgtgtgccaacaagtccgatcttgctgccgatcataccgagacgcaagtcatcgaggacgagatgttgccgttgatgtcagagttcaaggaaatcgattcatgcattcggaccagtgcccgagaacatcgtaatgtcaacgaggcctttttcctttgccagaaagcggtcacacaccctatcgcacccctattcgatgcaaaggaatcagccttaaaaccggcggctgtcgccggttacaacgcatcttctacctcagtgataaagaccgggacggttatcgctcagataaagagataaaggattttcagatgaggtgttttgagaaacctctgagcgaagaagacttggtccatataaaagagacaattcagaaaacacatcctgactctgtgacgccgtccgggatagattgccggggatttattcatctgaacaagatgtatgccgagaaaggacgcgatgaaacagtt

SEQ ID NO: 19470 - DNA, 997 bp, Arabidopsis thaliana
caaacccgaaagcaaagatactggtccacttgtgcacatacccccgaggcccagataatcgaagcaagcttccctcatctcgtttcttgcttcattttctgatgaacagaacacttggtaaagagcattcgcaagggtgttgattgttgctgcaactggctgcaagtgaaatgaatttcaaactatggttcgcttgttgacaacagaaaacgattaatctacaattgatgtttacctttcgcagagtgtaaaatgattcaagatatttgcagagactagcgccgtcactaagatcacgcagcggtctaaggagattacgcaggacaacaatgtcagctaatgcaaccgtcattcctccacccgtcaaaggatgacgcatgttaaatgcatctcccattaacagagcccctggagtaggataaggagaagctggcatgcttctgtttggcatggacttaatatttcctttatcaaccgcagcaatgaaagagtcatagacctcatgaggcatctagacaagaagagaaacacacaaatttatcaaaaatgtaaaggaaaaacgccatgaagagaagtgcacagtgtgaaaaaaggcgaccatacctgaggagccacaacagtcttcaaatagtttttcatttcaccatttgcaatggacggcactttctggccgggaacatcaactaggcaccgcacctctgtgctactaattggatacatcaaaattggtgatggatctgctaagacgacatgtccatggtttgcatatgggagattgcagttctctaggaccaacccgacaaaacaagaaggcacctcgacctgggtgaagataggaaaaatatatcctaattacttgtgaagctaatgcagttttttttttgcttctgtaatatcagcactgatatgagaaacagagatcaatattaaacagcatgttacctgaggattgcacatagagcgacgcaggtttgagaaacaaccatcacaaactata

SEQ ID NO: 19471 - DNA, 1132 bp, Arabidopsis thaliana columbia
gttctaagggaaactccgttttctttggtaaacgggatggaagcagtggtttcggccgaacttaacgtgcccggacttcgccgaacagaggctccactaaacgaaaaggaaaactcagcgatgctcgatgattcgttagatactatcaatgaaaggcgagatcaggccttaatccggattcaaaattatcagcaagcggcactacggtattacaataccaaagtcaaaagcaggcctttctttgtaggggatttcatgctaaagcatgtttttgataataagaaggaagaaggagcaggtaaactcgatattaattgggaaggtccttatattgttatcgaagtggatcggaatggtgtttacagattaaaggattaaaagacaggctagtccaacgtccttcgaatgtggtgaactttaagaaattttatgtttaaagtaacacgcgttttttatgtacataaactacggtgtggtttgatcccgaaatgggtacgtaggcagctaggaaatagtttagctactaataaaatttgttttattcattaaaaaagaaaggagttcgactgtgcgaacatacaaaaataggaaacaaaactacatttattcacagcagtaagtaaagaagacgaagtctcaacatgcgcgcacttcgaattaggaaattcttctcgtcttacagaacacttggactccttgaccagcgaggtcaaaaattggcaacatacagtcctgtatgcgagcaaactcggagactctgagctcgatccaatccccgggatgagagttgagggtgtgaagctccctatatcacggtgacccttcgtagcatttgattgatcttattctggagtttcttcttttctaacgaatgcttctggtgctgaaccgcaagagctttgatgaatgacatcgcgatttcttcatctctgtccggaagccccttgatcagcgcacatggagctcggatttgggacctgaagaagccacgaggtggagaaggcccccttcccggcacgtttgggatatccttgtccatcattccgactcttaaaaaatctggcataaactccgaacattaaaggttgaactccactagctgcagaaaaggaaagataggttatgtggaaaa

SEQ ID NO: 19472 - DNA, 473 bp, Arabidopsis thaliana columbia
tcggtagcggcaaacacaaggacgaacaaacaccagcgaccgccacaacaacaggacctgccactaccgaccaacctcacgagaagaagggcattctcgagaagatcaaggacaagcttccaggccaccataaccacaaccacccatgaacaccaatcatatgacgtctttgttacatgaataaatcgtttgcacgaatttcattagggcttatgaagaatcaatatatatgtctagtgaagtttactaaattttagttgtgtttgcttgcagtttgtgaatgtgaccatcgtgttatcatgttcttgtttatttataaagaaggaactgtattttgctagcatttttttctcaattgacaacggccgctctagtgaataatttccctcagaactctttacagtaaaaaggaaaaagaaaatagaaagtgctagacgtacgagaagcgaccatacgtttttttaaccggatgg

SEQ ID NO: 19473 - DNA, 546 bp, Arabidopsis thaliana
atgacaaacattttagggaagaggtgtgatgtcgaccggtaaagtaaaaggagtagaggcaaatggaatgctcaaacagttaatagcccatataaaaagtcaaaagtcaaaaacattcttatgaaatctaaaacatgttcgcataatacaaatactgaaagtgaaaggtgtcaaagtttccgtcacacacattaccgagacttacaaatacaagaagcgggtaatctagcataaacataaatttgactcaatattggatttgtcaccgcagatgtatcttcatttatgctttaataacgatactaaaaactttgtctcggcacctttaaacgaccttactctcggggaatttggcctcgtaagcctctgtagtctgttaaaacaaaggacaaatcaagcaagattgttagtaatataattgaaatcgaaaacaaatcgaagaaactgagacaacacaagtcatgttattttttttggatccatgtaagtcgcagtaatcatctttccagcaaaccatcttccatggagagcacgttgtgacctatg

SEQ ID NO: 19474 - DNA, 585 bp, Arabidopsis thaliana columbia
atcttgcatttaggttcactctatgagaagaaagaaagggagtaagggttggatgcttctaaagctggatttagagaaggcctatgacagaataaggtgggattttttgtcagatacgcttgtcgcagcagggttttctgaggtctgggtgacttggataatgcagtgtgtttcaggcccggatatgagcttgctatggaatggtgagaagactacacctttcaagccattgcgaggtctgagacagggtgatcttttgtccccgtatttgtttgtgctgtgcatggagagactctgtcatttaattgaaagatccatcaatgctaagcaatggaaaccgattaatttgtcgcgtggggggccgaagctctcacatatttgctttgcagatgatctgattttattcgcagaagcttcagtagagcaagtacagatcgtaaggagagtgttggaagcgttctgtactgcctcgggtcaaaaagttagccttgagaagtcaaaatcttcttctctaagaatgtctccagagagttaggcaaattgataagtgatgagagtgggatcaatcaacctgtgattggggaa

SEQ ID NO: 19475 - DNA, 426 bp, Arabidopsis thaliana columbia
  unsure (1)..(426): unsure at all n locations
taggtcactggaaccaatccgcaagtagctggccatgtacctanagttgcgctcgtacatgatggttttcgtcaaaatctagaaccgcttgatggggatacgtgacagactacaggaagtaatctagaagcagggaagcttcttgatatgtccgctggacgcaaatatcngttatatacaggccgtacaaagggtgattagcatctacctcatgcaactaagttgactgggtatcaaaanggactacaacctgtaccccgattgtgtggatcagattantgacttcgtcaaagatttatgagacgaagactcctccgganagcgaanatactatgccctgtagaacttggccgaccgcntcggtttcacgtaccccgtcatagccgtgtgcattgacaattgtacgttgtcgtggagagaagattc

SEQ ID NO: 19476 - DNA, 449 bp, Arabidopsis thaliana columbia
caaagctaatttaagctgagaaaagaagttattttatgattcacaatcaagttaatgaaattgttacaactcacataggtaagcaactcgtggattactagcttcaacttcattagccacacgtagaatcggagcaatctcaactaaagaagagggaacaacttcactatcaagcatagcctctccgagactaccaacagtctgagtccgcagaatccgcctctgcggtggaggcggatcaggttcccttctttgagccatattttccgacaatcaaactcagctaccaaattaaaatacttgttaaaaccttgagagacttgtgaactcaaacataagcgatagagagagactaggatccaagataatatccagaacagtaagatttactttcacagagaagcgaatttcggattcatccacagagaagcaaacatcactgtacgcgc

SEQ ID NO: 19477 - DNA, 482 bp, Arabidopsis thaliana columbia
  unsure (1)..(482): unsure at all n locations
tnnnnnnnnnnnnnnnnnnnnnnnctaaagcacaccagatgagtggtattacgcagttgttctgcgctgaaaccgtgcatctgttggtaacttactgatgcacacacgcgctgaggtccggccatacccgccagtgccgaagttcaagacgaataccttcttcctgcgccagcagccaagcatgtcatacatggtttgatcgctaagggtatagaagccatccagcagacgctccattgcccgcccgacaaagcctgatgcgcgaccaactgcaaggccatccgctgcggtaaggttgtcgataccaatatcctgaacagaaatctgatcgtgtaatcctgtatggacgcctaacaacatacaaggggagtgcgttggttcggcaaaaaagcagtgaacatgatcgccaaacgccagtttaagcccgaatgcgacgccacaggaccatcgcaacaccacacggcagatagacaacagagggt

SEQ ID NO: 19478 - DNA, 589 bp, Arabidopsis thaliana columbia
tatgtatccacattctcttcttcgccatctctaagcttccactcgaattcttgcactaatcttccaatagcaatgcctgccatgagagatgcttgaagagcaccagcacaaaccctctttcccgctccaaacgccattgtcttgtgaagatctgacgtttcatatttgccatcatcaagaaaccgctccggccaccagtcctctggtctctcccaacgcttcttatccatgttgcatccatatatgtttattgcaatctacacatcaagattttgaaactagactttgtaagtgaacttcaaatgtgaatgacttgagagtaataggtaggtttacctcacttcctgcagggacatgatagcctccgatttgcgtatcctcgtgggcgtacgaaatgggaactagaggagcaggactgtatttcctaagcgtttcatgaaagactccattgagataaggaacttgagacaattgctcttctttgaacttttctcctccgcagacattttggatttctttgcacagacgatcttggacacttggatgcttagcgagctcatagatggccattcagttgtaacaaagtagt

SEQ ID NO: 19479 - DNA, 538 bp, Arabidopsis thaliana columbia
  unsure (1)..(538): unsure at all n locations
nnnnnnnnnnnnnnnnnnnnagtgtgctctaaagcatgatgatcctcaatcttaagcggatcaatgagctggtacgccatcagcatattgattatctggtgtgaatttcaggcttacggtgagtctggctacgctgccacacagattagctaattgaaacgcctttcacccctgccataccttttaataatcgcaacaggtcttctatcgacgttgtggcatgaagctggatatcaatggcgaccacttcatgatcttcattttcctgcaacgaaactaaatcagtttttattttttgctgcttaaaccagtcgagcattgataccgtattaccgttcactaatgtcagctgtaaatggtaatttttgttcatcaggcggaaggttaattgatggaagacttccagcaccaacaaggtcatcactgaaccataaatacccagttcgtacataccgctgccaataaccatacctatggcggcggtccccagatatccgctccgtcgtcagactacaatattttggttacgacgagaatg

SEQ ID NO: 19480 - DNA, 1425 bp, Arabidopsis thaliana
cactgcaagctgaaccgtccaccgggggtcgaaccacccaaacgaaccgttgctgactcatctcaagtccccaagccaattcggttagttgtttagccgagagagagccaccgcttccaaatgaaatgtaaagtaccgactcgtccggctgtttgtttaaccaatccaaaaccggatgattagttttagatggatcaaccggtctagacaaaggaccaattggataaaccggtacaccagcaattcgacccaagagctttgggtcttgaagagatttcaaagttttgggctccatatcatcccatgtattcacaataataccatcacacgttgggaaaaccgaaccgaaaggaacaaattcccggtagagttggctgtttgggtcaaggaatgtttcaagtgtatcttcaaaccgaaccggttcacatccaggcataaccataggttgcttcttgattatgtgctcttcttccatgtctttgtccaacgttgggaaaaacaaagccaccgcgagaaaacgtgcgtttgaagcgatgaagatataagtcaacatgttgaactcaccaccgagcggtatcgcgtccaaaccaaacaagtctacgatcagagccgttggtttgtgttgcatctcctctatctttgaccggatggtaggaatggtctcacgcatcatgaccaagagcttgatcccaaaaaaggctgatgggtcgactaaaccggagatatcgggcgttgggaggccaacgatatcaacaagggccgcgtcgcagcctggtgagttaaggaattgagattgagctgaggctgcgtcggtttcaaggacgaaaatggtgacatcgaagccgtgggaaccagctaagcgttttccgagctcgatcaccgggatgatgtggcccattccggggctagcgaacatggccacatgtggttttgtaatcttcatagcctagatcactgaacgttggccttttttttttttttttttgttgttgttgttgttgttattgtgtcggtttactctctcatagttgcaagtgagttgaatatatagaaccaaaagactttataactcatttgtaagtatctttaaagtcttatctatatatcactttcattttttttgttttatttttgatatcatataccagctttaatcgttttacaagaaaagtaaatataaacatggaagtgtaaatgtatctaagttaattgcatccatatcgtgtatttatttatatagaaaagaattgaccacataagttgtcgcgtgaatgataaaaatgttgaatgcgtcgaccagaagataataatggtaagcttccgacttgtatatgtatatatgtgaattactagctcataggccataatgcatcatatatagtatgtcatgtcatgtatacataaagattcttagatgagtttctt

SEQ ID NO: 19481 - DNA, 427 bp, Arabidopsis thaliana columbia
aaaacaaaaaaaaattcaacgacaagtaaagatgcttcttaaaagactaagcatgggaatatctacgtatgcaaaccttgtaactcctcgatacatcgaagcgcctctcgaaaatccactacttttcctgtgatttgacgaatatataagttgttagattagataagtttcaatttatttgaaaatgcctcatgggaaaacacaaaacaaaaccttctaatggcagccacgaactcttgtctcgtcatgtgcttcatttcctctacttctttctcgtagtttgtaatctgatatacagtcatgaatcaaagatttgaagcatacaaaactagtatcacgacattatttgcaagaaaaatatgaattaacatacggggagattagtagtagttgatgaccccagtacttaagtgcagctagatcatat

SEQ ID NO: 19482 - DNA, 489 bp, Arabidopsis thaliana columbia
tctagaagcatgcctgttgcaaattctgtttctagcactgttccaccacatcatctgtcaattcatgctatttctgcaccaactgcctctgatcagacagtgaaaccttctgcaaagagtcgagatccaagactaaggcttgcgaaacctgatgctgccaatgtaaccatttattcgtactcgtctggcgacgctagaaatctttcaaaagtagagctttctgcagacttggtgaacccaagaaaacaaaaagccgctgatgaatttttaattgatgggcctgcatggaaaagacaaaagagtgatacggatgcaccaaaagcagctggaactggtggctggctagaggatacagaatcatcgggacttctaaaactggaatccaagcccaggctaattgagaacggtgtaacatctatgacatcaagtgttatgcccacgagtgctgtttctgtgagccaaaaagtacggacagcttcaactgatact

SEQ ID NO: 19483 - DNA, 836 bp, Arabidopsis thaliana
cctatgcaacgtcaatcatctgatcatgttaatccttctgattcatcatcgtctgtagagattttgccttctgcaaatcctactaataatgtccctgaaccttctgttcaaacatcgcataggaaggccaaaaagcctgcttatcttcaagattactactgtcattcagtagtgtcttcaactccacatgaaattcgaaaattcctctcttatgataggattaatgatccttatcttacttttctcgcttgtcttgataaaactaaagaaccctctaactatactgaggcagagaaacttcaggtttggcgtgatgctatgggtgctgaatttgatttcttagaaggtacacatacttgggaagtttgctctttgcctgcagataaaaggtgtattggttgtcgctggatctttaagatcaaatataattctgatggtagtgtggagagatacaaagctcgtttagttgctcaaggttatactcaaaaagaagggattgactacaatgagactttttctcctgttgcgaagcttaactctgtcaaacttcttcttggtgtggctgctcgttttaaattgtctcttacacaacttgatatatctaacgcttttcttaatggagatctagatgaagaaatatatatgcgacttcctcaaggctatgcatcaagacagggggactccttacctccaaatgctgtttgtcggttgaagaagtccttatatggactcaaacaacgctctcggcagtggtatctcaaattttcatctaccttacttggtctgggttttattcagtcttactgtgatcacacttgttttctgaaaatctctga

SEQ ID NO: 19484 - DNA, 472 bp, Arabidopsis thaliana columbia
gctatgcttcatggctctctatgatttatattagtctgtctgcattgactcttcgtcagtgaaattgattaagaggaaaactttcttttctataagttcaaatttcaacatagatacttggagattgataatcgggaaaaagtatttggggaggctgagatatctgtgtctgtattattaaaaaaatgtattaataaaggctaataatctctactcccggacctttctgatgttggcaggtggctaaacgctttgtcgataatgccctagattacagcaaagatattgtcattggcagtgggatgcaaggaccttttgaccatttttttggtcttaagaaggatcctcaaagttctcgatgcagcatattcaatccagatgacctgtttctatatgctgttacagagtctagagtgaacatcaaatggagccgttccattgcggatgccgtgaaagctgcgatagagggagg

SEQ ID NO: 19485 - DNA, 406 bp, Arabidopsis thaliana
ctcctccttatacgtaagattgagacatacacaaaacccggttaactgtaagaggtttaatttgaaccggatataaaccggttgaaccagacactcccaccttaactcttttttcctgaggtttggttgctcaaagcaaacaaattctcaatctttcgtttttcaccttcttcttcttcttcttcttcaatggcgttgatacatggttcggttcctggtacgtctgcggttcgattggttttttcaacctcagcgtcaccgtcgagattttgtctcaatgttccggtggtgaagcagggttggaagaattcgtgccggagaagggttttaagagcaatggtgcatgaaacagttcaaggatctcctttggtttacgcagagaaatggagcggctttctgctaagga

SEQ ID NO: 19486 - DNA, 606 bp, Arabidopsis thaliana columbia
tacaaaacacatttctttattgtaataacttgtaaagtggaacttagtaatatttcaaagtcttcttacttcagtagtggtacgtgatttcggtacactgctggaccgagcgctaaaaaaggagtcaaggtcatctacaccaaactgtttattcttcgttgcagcatcttcagcttctctatatttactagcagtgtcagaagcggaggcactacgtcgcatagtacccatggcaaagtcttcaagttcgtctattgaagacattcctacactcttacctgtggaaataatcgcatgactagttagagcacaatgaaaacagtaaacaaaagctctaatccgacacactttcaggtcatcaaagaaattaacctctgttcactttttgtgttggtttaggcggaggcttgagttttgtagaagtatgtgaagtatttgatggttttatcccctgagagctgactgtagcagcaaattcttcaagaggatccacgaacagaccagtagaagtggttgattctaggaccacaaaaggatcagtagcatcaaagttcgacggtgtagtcttgctgaaaaacataacaaaaacaaaatatctcaacaaca

SEQ ID NO: 19487 - DNA, 410 bp, Arabidopsis thaliana
aagagagcgtaacttacgcgttcattctaataatattaggccagctcatctcatcatcaaagaaattcagctcattgtcagggcccgtttggacccgctttcgcggccttctcgcgtgtcccagtctcagtctcagtctcaatctcgttcctcgccgcttgcgacttggtttggattgttctgagttcgtctcatgtctcgtgacttcctctgttgcaggtctctctctaagctgggtcgtcgcttttcagtcttgggtagtccttcccttctgtaagcctttctctgtgttctcttgttggacctctttctttcttttgggctttgtctctgttgggcctgcgtgctagttttgggcctgcgtgcgtgctgttagccgtcgggcgttgtaatgtttaaagttttaaatg

SEQ ID NO: 19488 - DNA, 568 bp, Arabidopsis thaliana
cagtgtgatctaaagacggtacgctgtagctattgacgctgccgtccgcttctttgatttcaactaacaaatcaccgctcgacgacgtggaatagagatcactaatttcaaaagcaccaggcgatacataagtttggtaaatggtgtaaccattttgcttaatcgttatctgggcattgcttttggcgataccacgcaccacaggcgcaaaccctttcaggctgtctggcagcatgttgtcatctgacgccagctgcacaccacgaaagctgacactatcgaaaaaatcgcctgcagtataatcatcacctacggtcagttcgcctttcagaggaataaccgcccgttgcaaatagctgctgagattcttccattctgcggtttggccactactacgactccatgttgaattgttgcgcaatctccatgggcctaaattaacgccactgtttaaattcagaaaatagctgtcgccagaatcactgtctgcgctgctatgaatactgttagcccgctaaacgaatacccagtaatagcgcgttgatccttcatccaacgttcagggggg

SEQ ID NO: 19489 - DNA, 499 bp, Arabidopsis thaliana
acgttatcaagcaccaaaccgacgaagataagaatgttaaaagatattctctctatttgttatgtttcagctcctcatcttaaaaccatacataatcctccattgtaatgatgaacaggctcttgctgcttcattgaaatctgtgattccttcaatggttaatacattgctaagctcgggtttaaaagtgagcgtggatctggatgagttaaacaagaacgaagctcttctcagctgaatggttgaatcaagatttgcagaatctcttggcggctccacatgaacacattcttgtccagtttcttgcatcctacggtaactcattttctcattttgacctatatgaacaaaacgccaagagttgtcctgttttgtaagcctcaaataaattttactctgttggacttttgttcttgatttgagtagtaaaatccattttgtataaaacaagaacaattgagtatcttatcgatatgaggcaaaaaggttcattgattac

SEQ ID NO: 19490 - DNA, 532 bp, Arabidopsis thaliana
gcgagcaagtttaacccggatgttatttttctttcagctggatttgatgcaggtaaacatggtttaagcatttttttaagctatgtcttgttcagaggtgtgtaaccttttcaaactcctcttaacagctattaatgatccgctagggggttgttgtgtgaccccatatggatattcagttatgttgaagaaggttggtgttgaagtgaactccctcttttgtccatcatttgtatttgcgctccaggggtctccatcattgaaaatagcacttcttgctttagctggttgtttgtccctgagctaaataatagaaacttgcatttaatatcattctgtttctccaatgttctctcagctgatggagtttgcacaaggaaagatagtgctggcgttagagggagggtacaatcttgactcaattgcaaagtcttcacttgcatgtgtccaagttttgcttgaagacaaacaaattcaaggacctccggaagcatacccattcgagtcgacatggcgtgtcatcaagcggtat

SEQ ID NO: 19491 - DNA, 518 bp, Arabidopsis thaliana
gaacaaccatcttctcaattctcctctgatctcttcggcttcaacctcgtttcagcgccggaccagcaccatcgtcttcatttcaccgaccatgagataagtttattgccacgtggaatacaagggcttacggtggctggaaacaacagtaacactattacaacgatccagagtggtggctgtgttggtgggtttagtggctttacggacggcggaggaacagggaggtggccgaggcaagagacgttgatgttgttggaggtcagatctcgtcttgatcacaagttcaaagaagctaatcaaaagggtcctctctgggatgaagtttctaggtctcattttttaaccctaattttttccagctttattttcccaaaatcccctttccttgtcttttttgcccttattccggagaggaaaagttaagataaaaatcagaacttggaagagaaaaaagacaatcgattatgggttttatttttgatttggaatcataattgttttgttatagattagac

SEQ ID NO: 19492 - DNA, 475 bp, Arabidopsis thaliana
aagcaaaacttggacacatgcgagtgaagactttcccaatgactcaagattgtatcctccctctaatgccagcactatctttccatgtgcaaactccatcagctgagagaaaccaattaaatgatgtcatatccaagtaaaattatgtagctttggttattttcaatggtagagaagccatggtacgcataatagaaacaatggagaaaagaggcagttcacttcaacaccaaccttcttcaacataactgaatatccatatggggtaacacaacaacccccaagcggatcaccaatagctgttaagaagaagttgaaaagattacacacagcttaccgtcacaaagccttgaaacaaatggttagaccatacaaacctgcatcaaatccagctgaaagcaaaataatatctggtttgaattccttggtcacagggatcaagatgtggttccatacggcaagatagtctgcatct

SEQ ID NO: 19493 - DNA, 511 bp, Arabidopsis thaliana
cagcagcctctaaggcattcctcaaaaccacgtggcagctaagctgtttggtggtttcctagttctactaattcattgtacaaactaaacgcttcagagtgtctcttatgcttacagagtccttctatgaccgtgttgcatgtgtcgatatctaccatttgacttttttccagacaaaacagaacaagtgtatgtgcatcaagtagttttctattctcgcagaggtaaccaagtaattcctccatcttaaccaaatacccgttatcataaagcaacctaacaatcagaaatgccttctctttctgtgcactactaaaaagcaatctgacaacctgcgttgaaagatcaatgttctgtcttatacgtttttccaacattagcgttaccaagcagaaagactcgttagcacatttccttttcgcaagttctgcaagtacagaatggaaagtggttgcaacaggaagataagagctccttagcatcctttgtagggcatcgtgagcaagaagag

SEQ ID NO: 19494 - DNA, 516 bp, Arabidopsis thaliana
acattagtagttatgtcttttctttttaaaaacatattttagaataaaccatatctccaaccgaaaactccaaactctctccgacgcttatccgcatagttcttttgtcgattttgagcttcttttatcttaacctttaagattttgattttttccgatgttcatgttattaaccacaagtctacaattaaattattatatttttttaaaaatgattcttgcgcgagaagctacttagtggactcggaaggagaagggaaattggtagaggttttaatttgcaaaacttataataatataatagtagtagtcgtaacaaatggtttagctgattattcaacatggaacttttcaaagaatgtttcagttttagttgaacagacaatttttacccttgtcgtaacaagacaaataacgatttttccgactctcttcattcgatctctctccctctccctctctcgatcggaaaagtttgaatctccggcgatcttctcaagatgagtacaacgagct

SEQ ID NO: 19495 - DNA, 514 bp, Arabidopsis thaliana
  unsure (1)..(514): unsure at all n locations
taaacattacaattgtcggacttttcaaattagctagcaaccaaagtctgaccatttccacttgaaattaaataagatacaacaaccataaaatctcatcacatctctctaagtataaattataacacattgatcaaactctctctcattccaacaaacaacaacaatcatctctttacttctctcttcacatcatctttcttgaattctttatatacacagtttaaagatgcaaatgctaagaagcttgagcacgaggacaagaagccgtcgtggaggatacgagagagtgagtgatgattcaactttcagtttactcggagcaaagctaaggagatcgacgagtgttccttactacgcaccatctataaagcttggagctggtggtgtccgaccattcttgaggagcttctcgtcagaaatcaaagaaagtcaaccaacaggcanatttagtcaccaatctttagtcttttctacggaaagaagaagaagtcgacgacgacgaagcctgagt

SEQ ID NO: 19496 - DNA, 576 bp, Arabidopsis thaliana
gccagtgtgctctaaagcccgccatcgcgctttctgggggaatagtgaagcgtatggcactgcaaccaccgcattttcgcgttgactggcaggaatttgccgcattattaagcgagcgcaccagactggtgatcctcaacactccgcataaccccagtgcaactgtctggcagcaggctgatttcgccgctttgtggcaggcgatcgccgggcacgagatttttgtcattagcgatgaagtctacgagcacatcaacttttcacaacagggccatgccagtgtgctggcgcatccgcagctgcgtgacggagcagtggcggtttcttcatttggcaagacctatcatatgaccggctggaaagtgggttattgtgttgcgccacgcccgatcagcgccgaaattcgcaaggtacatcagtatctgaccttttcggtgaatacccggcacagctggcgcttgctgatatgctacgtgcagaacctgagcattatcttgcgttaccggacttttatcgcagaagcgcgatattatggtgaatgctttaaatgaaagccggctggagattttacagtgt

SEQ ID NO: 19497 - DNA, 1071 bp, Arabidopsis thaliana columbia
tgacgggtgttcctttgttttcaaaacctcttccactggttcgacttttgtgttttgcttgagggcaagcaaaagctaagtctgggggagttgatatatcctggttttcactaattttatctatgatttaggtataggatcttgagtccttatgttatttctcgaggctttttagtgtcttttcaggtactctatgcagtgggacaacaatggagataaggagacattttcgagcaagagctaaggaaaaggaagctaaggacgattttggattcaggaatcagcgaggagtgtcgatcgacacactcttggtgtcgatcgacaccagtttcggcccagcaaaagttctagacgcttttgagtttacagaagaggaaattttccccagaagatttctctatttgcattattagtccatggacgtttttagggtttatatacaatgtttatacctaagtttttatcatccagtttttatcatcaagtttctttcaggttctattgaagcttttgcaaaccctgttactgagagacttaagctatgcatcgattgtttttagagattcatacagttcttaatacagtgaagagatcccttcttttcccttctatattttctgtgtttatgctttcatactcaaatatgttgcttgtttcaatcaatatgtctcaataatctgcttgttaggaatagggtttctcattagggattcatatggtttgctaggttatctgaagaatcggcctatctactaacatgaataatcgaacttgttaataatgcatatttatgttgataatttctcggcttctccggttattcttagcaatagatatagggagtttcgcggaaccgcaccggttcttccataattagagtttgagtttgagaatggttcgataacaacctagctttcattcgatcgactaaccaacagtttcctgagaataccctgttcctacctctttatttaatcgtttacaaccaaatcatcttgctgttttcttactttgttctcttttatttcactcatacctgctagcttaatctcgcattcactcactgtttga

SEQ ID NO: 19498 - DNA, 1130 bp, Arabidopsis thaliana columbia
gcaggatttacgaaacaatctaccaaagccaatagcgagacaagcgaatctcttggtcgagtctacaaatctctagaattcgtaggttagacatacatttgaacgtcttttggacaatggacgtctatgatcgaatctccacattagccagcggaaaccgcataggggccaagcgaatccagaagggtataaacttaaacactaaccacctaactaacttagagattaccctaatctaattcatcctcaaaaaccctaatcactactcaaacaacattctcaagaacacaaacccagatattactaaaatcataccaaaatgtagatctaaacaagctaaacaactttactaaaacaactaaatgcaaaaacaaaatagattaagagtaattaaggttttaagattcataaacacaaagattggacaaaccccaaagtgatctatttatagtaaaatgttgaaaccgtagatttactagaagacaagagacttgaggcggttttggcgaatacgcgaccttggggataaagtaaagagggtgctgcaaagtctgcgcctttgtgtctatgctccgagtgatcaattggtcgagtagatgcttcagcctctcctatctgtatgctcaaatgtctggatgagtggggaatgaggaggatccgaagacgctttgatagctcaacaagtcttgtaggggtggtcaccctgttcgagtaaatggatcgagtagtggatcgagtaggaggggcgagtagatcaatctgctgcttcatctgaggttgccttgatcgagtaggagggtcgagtaaactgcagcctcctccgtggcatcctggatcgagtaaagaggtcgagtagaatgatgcctcttctgtagctgcctggatcgagtgaatggatcgagtagagtccttttaagctccttttgcacctgaaaacacaccaaaacatgcaatgcgaatgcaagatgatcctagatgcctaagtatgcaaaacaagctaaaatggtgcaaaatgatatgatacaatgagcaaatgcaaagctaaatgatgataaacatacacctaaaatgggtaaaatacagtgttatcaactctcccaaacttatctcttgcttgccctcaagcaaac

SEQ ID NO: 19499 - DNA, 841 bp, Arabidopsis thaliana
tttctgttaaggattattggcaatttgaatgcgtgcgagacgtttccgtggggccgttacacctttttggaatgtatggcaggaataaggaaaatgatgaagaacatgaatggtttcgtgaaaccaaaagctcaaccttgctttagtggattcattgtgcctcttgagataagtaatttatgatcattatatgagaataaggtgtaatgtacatgttttatgatattaacattgttttgttatttgtagattctggcttatgaggctattccacagcttggactgaaatttaagagtcccttgcgctccgctttgaatgactgtccaaggatgtgcaagcataagtttaaagaatgtagcacgaaaggtgtcccgttggaagttatatataaagagcttgggaatagtaaggttagagtttctgtatttacttcattgtgtgtctagtctctcatgagattgattgattgctaaatgaatttcttttaacaggattttccacgcattttggtacctgcctatcatgagaaatatttgttgaaaaatctcttaaacaatgatgttgatgatgactgcggtccaatagatattgttattgacagttggagagagcgagtattagtagagaagaagaggatatggtggaaaggaatgtgtgagatggacatttcttctagatgtattgtaaatgatatttcggatgaggaagtccatgagattgagaatgaggtccccgagaaagatgtccccctgactgctgtccctccttgattccctgatttagatacagttgtggcatctataacctcactgacgcagatgatgaccaaaggcttttatg

SEQ ID NO: 19500 - DNA, 935 bp, Arabidopsis thaliana
tcaaatacttgtgtccgagatgaaagctcgtattgcgatatacatagagtcacaagacatctgaccaaagactgcagtgtccttaaaaggcatctcgcaaaattatgggccagtggagacctctcaaaattcaacatggagaacttcgtcaaacaatattatgaatcaagggataactcagaggctcaaaactctaaaagaccaagagcggctggcgaagaggaaccaagaacttcaaagggtaaaatcaatgtaattcttggaggatctaaactttgccgtgattccgtcagcgcaatcaagaaacatagacgcaatgttcatctgaaatcaagcttaagtgaagaagtagactttcaaggcacttcgatattattcgaagaaaaggagacacatcatctcgaaatacctcatgatgatgcacttgtaattacgttggatgtagccaacttcgaagtatcgaggatcctcattgataccggtagttcggtagatctaatttttcttagcactttggaaaggatggggataagcagggccgacgtggtaggaccgccatcccccttagtggcttttacaagcgaatcgacaatgtctctcaaaacaatcaagctaccagttttggctggaaagatctcgaagattgtggattttgtcgtttttgataaaccagcagcctacaacatcattcttggaactccattgatctaccaaatgaaagcgctcccctctacttatcaccaatgcctcaaattcccaactccgagcggagtggaaacaattcggggagatcaagaagcttcgagaacttgttatttagctagccaccgattaaaaattcaatagcaattaacgaagcccgcaaagaaaggaataatcccgagattccctagcggacagaaagtggatgatgtcgtggtcgaagtaggggatcc

SEQ ID NO: 19501 - DNA, 1375 bp, Arabidopsis thaliana columbia
ctaattgtctgttgtgtagttaatgaaattgaagtaaaactgaaccatgcctagattgctctactcgaccacactatcatgatctgatacaattctctatcaatttgaacctgattctgatttttaattttcatgtctacatcaaatttgaacccatggatgccctaaaatacttggatttttttactcattttaaccactcttgttaatccaagtagccgactctccttattagagcagttaactcgaacccaaacctaaattttctttcaagccctataccacttgtgagtgtttatgaggtcttattccgattaagcttggtagaaagtattaggttcgtgataacactgtattttactcattttaggtgtgtgtttatcatcatttagttttgcatttgctcattatatcatatcatttttcaccatttaagcttattttgcatacttaggcatctagggtcatcttgcattcacattgcatgttttggtgtgttttcaggtgcagaaggagctaagaaggactctactcgatccattcactcgatccagacagctacagaagaggcatcatttcactcgacctctctacttgatccaggatggtacaaaggaggctgcagtacaaaggaggtacttgaccctcttactcgatcaaggcagcctcagatgaagcagaagattgatttactcgcccctcctactcgatccactactcgatccatttactcgaccaagggtgaccatctctacaagaattgttgagctatcaaagcgtctttggatcctcctcattccccactcaaccagacatctaagcatacggataggagaggaagaagcatctactcgaccaattgatcactcggagcatagacacaaaggcgcagactttgcagcaccctctttactccatccccaagatgagtattcgcccaaaccgcctcaaatctcttgtcttctagtgaatctagggtttcaacattttattataaatagatcactttggggtttgtccaaaagatctatgctttatctttcagtttttctttgtgtttatgaatcttaaaaccttaattactcttaatctatttcgtttttgcatttagttctttaagtaaagttgtatagctagtttagatctacattttggtatgatttcagtaatttatgggtttgtgttcttgagaatgttgcttgagtagtgattagggttcttgaggatggattagattagggtaatttctaggttagttaggtggttagtgtttagggtaatacccttctggattcgcttggcccctatgcgattttcgctggctaatgtggagattcgatcatagacgtccagcatccaaaagaggttcaaatgg

SEQ ID NO: 19502 - DNA, 993 bp, Arabidopsis thaliana
gataatcatactcaatatcaatctcctaaatccacgaaacaaaatgtcatgaaaaaaaagtatcgagaaaataattttcatctaacacaatttaccaatttacaagaactataatatcccaactagatgaatatttagctcatcaaacgatcataaagcaacaaatgcctcaacgtcgttacttcgcctttctgatgatcctcgtcctctgtacacgtgtctctatctctttcgttcattccctcatcgccaaacgcgtacaccacatcccgcgattgcgtttgcgtttgctgctggatacacgtgttttgatctacgctgtccatcatcatcatatcgcgaacatcatcttccgtccatcctgcttccctcagcttccaaaacgcgtcgtccaaacacgccgttaacccctcaaaacctaacgcgctccaccaatcgcgcgtgtaatcacgcgcaccacaaatctccatccctccgccacatcgctccaaaactccactctccgtggtcgtctccttcgtcgtcgatcctccgtcggcgtttctgatcgaccgattcccttgagaaatccgactacgtcgcaactcaattccctaactccgtcgccgtcgatttggaaaactggatttcccgccaaatttggcgtcgtcgaagggacgtaaaaatcgccgtatacagggacgagtaccggagcgatctcaatcaatttcttcacgagtgacaaagcctccgcgtcatttccgggtcggatcccccaagaatcgacccagaatccatttctgacgacgtgttgagacagattaagaagagggagaagaagattattccggttcgacccggttcgccaattgggaaaattggtacaaccggaagaccggtttggagaatcgaacggagatcaagagggaaagagaaaccatgagaggattaacggctgagatccttgattggtaagccaggtgaacgtggttacggtttgagatttaaatggtt

SEQ ID NO: 19503 - DNA, 887 bp, Arabidopsis thaliana
gtagctggtcgactgttcgaccagctgggcggttatccagacggttacttgggcagttatggtcgaacggttacttgctcaaagggtggataagggcgagcagttacgggcgaagatatacaactcttcggaaagatgcaaggaacggatgtgttgattcggcgggtcttaattgacctactggaaatcggttggactgatgtgcgatcttcccctctccgaatcctctctacggatccgagtaatgtatggcctatagagcattgcatggacttgcatatgactaagtaaatgagattacttatggctctatgactttcaggaacgaatggtgatcgtgggaaggacttggcttaggcgcgagagactcaaggtcgtgatgatgggtggtgatagttcggatagtctagggatcgattatatgacttgtaatagcttatatgcaaactcataagttgtttactctattcgtctcatatattgaatcatagaatcatataaaacggattacactaggaatgaacctcataaacggttaaggccgagtcacttagtggcttggggcgggagatctcgtccggacttaggcagtctagatcggggcctttcaagttggtatcagagcatgcttggttctaggactaggtgttgggttaaggggtatcaccactcgttgacttgagaatctcgcggtagttgttctttactcttttgcgattttactatgagttatgtggattaactttgaaggtttcgcagatgagtaagagcagcaaaacgggaaagagcaagaaggacaagggcattgttaaggagactttggttgaggaggaaacaatgatcaacaagaaaaccagtgtcgggacaatgcttgatgagacagacgg

SEQ ID NO: 19504 - DNA, 928 bp, Arabidopsis thaliana
aattgatttagcatgtcaatcacctgtaaactgaggaaacgaaactactcaattatcccatcctcgtgaattctttatctaattgatttctttgtttactctgttgttgtttgctgcatcttgttagttgttgcttagtttttgtatttttctcctgctactcgacctgatactcgaccacccagttgtctagcaacagactgtgcaatcgagtatccctgttatattttttatctgttactcgaccagtcactcgaccacacccaggtctatgcaacgagttgtgttggtcgagtgttttattatttctgcttgatttttctgtttcctgcatgttcacttaggactactagaacactccaaaacctgttattgcttggcttgactatgtgaactttgattgcatcttgattgctagcatcacacctatttggattgacaacctaaaatactacaacgacatgattggtgttttaggataattgactaaaaacctattatcaattgggcgccattgccaattgggtgtttgtttgttatatttgagatttcagacttgcttagatcaagttctttttcaattttcatttatgttactaactgtgtgtttttcttgttgtcttcttgatccaactacacctctgctgtatgcaaacttgatcaacaggcaaccagaacctcttgttcaacgataacattgaccacatagcttgcgaactcagagaaaggagaaacactgtcaaccttgtaccccaacaaccactctaaatggcggacgaacaaaatcaacagaatggccctacaaacattggtgctcgagatgcaccaagggatcactgccagatgaaaggaattacacctcctgctgtaacacccccgaaccgttttaggactaagaacgaatccggaagcgttacttgtgatgccc

SEQ ID NO: 19505 - DNA, 1053 bp, Arabidopsis thaliana
tcaaagaactcaaagtcgacttgtggatatgtcttcacattaggtggtgcaacagtatcttggaaatcttccaagaaaactatccaagctagatcaaccatgagttcatagctttagataaagcctccaaagaagcagaatggcttcggaatttttcggaagatatcccgatgtgggaaaaaccattgctagcattgcgtatacattgtgatagtcaatcggctatagctagggcacaaaataaattaaacaatggtaaatctcgccatagtagaaggcgacacaagaccattagacgattgatctcgacaagtgtaattttgttagaatacatcaagtcagccgataacttagcggatcctttcactaaaagcttagcgagagatcaagttgttaaatgataacactgtattttactcattttaggtatatgtttatcatcatttagctttgcctttgctcattgtatcatgtcattttgcaccattttagcttattttgcatacttaggcatataggatcatcttgcattcgcattgcatgttttggtgtgttttcaggtgcagaaggagctaaaaagggctctactcgatccattcactcgatccaggcagctacagaagaggcatcaattcactcgacctctttactcgatccaggatgctacagaggaggctgcagtttactcaaccctcctactcgatcaaggcaacctcagatgaagcagcagattgatctactcgcccctccaactcgatccactactcgatccatttactcgacctagggtgaccatctctacaagacttgttgggctatcaaagcgtcttcggatcctcctcattccccactcaaccagacatctaagcatacggaatagaagaggatgaagcatctactcgaccaattgatcactcggagcatagacacaaaggcgcagactttgcagcaccctctttactagatccccaagatcgagtatttgcccaaatcgcttcaagtctcttgtcttctagtgaatctagggtttcaacattttactataaatagatc

SEQ ID NO: 19506 - DNA, 1072 bp, Arabidopsis thaliana
tgtatgaaccactatttccagagattcgtgactatgtaccaaggtattggttgcaggaagcgttttggctttaacttgttgattcgtaatgcctgttaggttagctctcgtcaatggtgattgagtctgggactggtttaacttgagggtctttgttgcggtggcacttagatttggttatcgaacttgtcgtttaggaataatttattgagcatgtcaatcacctgtaactgaggaaacaaactactcaattaccccatcctccggaatttttcatctaattgacttcttgtttactctgttattgtttactgcatcttgttataccttttgcgtagtttttgcaatttttgcctgttactcgacctgatacacgaccacctagttgtctggcaacaaactgtgcagtcgagtatccatgttacattttctgtctgtaactcgacttgtcactcgaccacacccactgcctggcaacgagctgtgttggtcgagtgttttactgtttctgcttgaatattttgtttcctgcatgttcactttggactgctagaaaggatacaacaattttaagactaataaccccaacctctcttaccgcagcacaaacgttgctgatccacaggatcaagtgtatcctccatagcaacaacaaggtcagaacaaaccctttgttccctacaactaaggttttgttccaaagcaacaatttcaagggaactaccaacagcaaccaccatcagggtttgcagcacagttacactgacatgaaactaatgctacaacacctgcttcacggacaagcatctggctccatggagattgctaagaagatatttgagttacacaataagctggactatagctacaatgatctaaatgtcaaggtggagacactgagtaccaaagttcaatacttagagggaaattccgcatctacttccgctcagaaacagacaagccaacttccaggaaaagcaattcagaatccaaaagaatatgctcatgctatcaccttgcgcagtggaaaagcacttccaaccatagaggcacctaagacagtcactgtagt

SEQ ID NO: 19507 - DNA, 534 bp, Arabidopsis thaliana columbia
tgcgcctgcgactcaaccgcaacagcaacatgagcagaagaagcaatcagagactgtttcatctgctgaagaagatgctttgaagtggaacaccgattgcgtttactttctcgcttctcctttaacctgcaagaaggtaattgatttttgattattgtttcgcttagatcttatccagttttctgcttcatttagggttttggatttgagatctcaagtttctttcacccgatttcaagtttctctgtgtttttgtgtccctcgaagctatctatacatacttcacttctccatctgcttaattttggtgcgagatttagatctggtgatttcgaacctcgtgattctaagtattgttgtttcttagggcttcttgttagctagattgaaaattacatatacaaagctttataaggatgttctgataaaggagattttcatgttctgtgaatatgatttttgctcgatgtgtatgtttatgctgaagaacgattcttatggtttctccttttttgctacagggactgaatgcga

SEQ ID NO: 19508 - DNA, 1533 bp, Arabidopsis thaliana
ctcattgctgagaaacaaggaatcacaaagtaggacacaatatgaagcgaagtctgcaaaataaaataaaaaacaattgtaatgcttgtgaaacaagtaatatggtaaaatctaggtttttactttttacacaaaaatgtttacagcaaatagtgaaaaaaataacataattgtttttgttgctcaatccttaagatgcgtcgagttgtttccttactttataatattcatgattcttctactttattctattattttttttcaaatctgactttattctttggacaaattatttgacataatcctaaaagaatagaatattaacagatatgacagatatgagtttgtgacagatatgattatataaataaatattaaagcgattacagaatttgtaaagaaatcaaaaaaattgtgattcgaaaatagagaaactcacattgagttgattggtataatttcgtcgaacggtttcgctctcgtcccagagtttatcaaagaagaggaagcgtcgaagaccatacttgctaacgaatctggtgagacagaggaaagagacggtggcgacgctgcttagagaaagctgaacgacggagtcgtaaggtcttgaatggtaactgtcgcaatcagcacaagcgaggaggaagtgagagatcgccggaacgacgagtgtgaagacgatgaacatggtccaagagagaatcgctgtccatggactagagtgatctacacacatccaccttaggtatttgcggaacgtgtgtagctcgtcttgttggtgtgaacgcagcgattgaagatcttgttcgtgttgttgttgttctcatggtttatcagcggctctttcccgacggcgatgtcgatgtccgccatcgattaggaaaagctgctgcgggagagaatgaatcagagtttttaagagagagagatcgcgtttgcgtttcttttgactgcgattggtgatgcgatctttgaatagaagtgagatgggaaacgctatttataagtttgtgttaatttttttgtttgcgtgtaaggtgttgtctaaataggaaggagttagtgagagataatatttggagtataaaattaagggtcaatgtcaattagtcagagaaaagtgttaattgcctatattttgtttccaaataaacagttaattgtgtgccattttactaagtcatttaatgcaatcatacaaaaatgaatgtaaatgagactatttggacaaattttgcgggattggatggctaaattaactagatctagtcttaattaactactagtatgattgctttcaaatcaaaatagtagtcataattaactagatctagttaatgttattcacaaaacatgaataacttgtttgtgtcaaaactacaagcacatacttgatgtagaagctagtttaagcataaggtgaacacaggctgtggcgtggggacccactaacccatgtgtgttattcagaccaccgttgaagcatcgccacgcgtaccgtatgtctgttcctaaatacccataccatcttct

SEQ ID NO: 19509 - DNA, 478 bp, Arabidopsis thaliana columbia
tacgagattggaagggaacaaacaccataaccaaaataagagagaaaatggcaaacttttaattttatccgtcatcgtagctaaactggtatagaaccaaccattgttcaaaatagtactaaccaaaaaacaccacaaaatgggcttctttaaaaaagcccaacataaaaagtcttaacagatcaaaaaaaagcaagtaaaagagatagagataggagaaagagagaggtcaatgtccaacaaattagtcgacctcctcgatcttaggtccagcaccgcctgaagcagggggagcatcatcgtccataccagaggcacctggaccaccggcttcaccaccagctccttggtacatcttggcaatgattgggttgcagatgctctccaattccttcatcttgtcttcgaactcatcagcctcagccaactggttaccctcgagccattgaatcgcctgctcaatagaatcctcgatctt

SEQ ID NO: 19510 - DNA, 538 bp, Arabidopsis thaliana columbia
cccattccaacacacacattttcatatcaaactcaaaacactatttccttaatttctttcacttattcttcatttcttcgtctaaattcttaaccaagcaatcgagatggccaggatttcctcagacccgcttatggttgggagagtgatcggagacgttgtggacaattgtttgcaagcagtgaaaatgacggtgacctatgattctgacaagcaagtctacaatggccatgaacttttcccttctgtagttacatacaaacctaaggttgaagttcatgggggtgacatgagatcattcttcactttggtacgcattgctttattgacctatatcgtcatataaatcatatatatagtaaatgcataaataacttagctaggtgatttttatttttcgttaaatgtctttttcttcccgtctttatgccataaatagaaacttttttcctctctaactgttagacttatttgaatatttctgtaaaacacacaaaaataagattttaattatttatattatctactatgcagttat

SEQ ID NO: 19511 - DNA, 489 bp, Arabidopsis thaliana columbia
  unsure (1)..(489): unsure at all n locations
aagagaatgtcaggattgtgagaatcaattttggcaacagccatcttcaaatggtccatttcctgaaacaccagagatagccttcaataatgcagaaaatttaaccgcctaaacctctgatgtgacagaattatgcttttcctttcctttcagtcgaaggattcatgtccatggttattgggaaaaataaagaagatgagaaacgattcagacctgttgcaacaaagtgtcaaaactagacagctggttagagatgcgctgatactccagagctcctccaaggattagcagacgcggcttctcgatctttgaagtcattcgccgatgagccacatttttcttacaaacaactcctttcacgaccatactaaaaaaataccatcccagttcaatcagtaatacagtgtttaccaccaatcgacagagatataaacctcacggaatatcacaacaaaaacatgaagctaatatngaagtagaccagtatga

SEQ ID NO: 19512 - DNA, 663 bp, Arabidopsis thaliana columbia
  unsure (1)..(663): unsure at all n locations
gagaattagttggaccgaagtgatttggcacccatctcctttagtagcatatacaagcgagtgagtcatgtctctcgggacaataaggttaccagttctagctgggaaagtttcaaagatcgtcgattttgttgtgttcaataggccatcaacctacacattatcctgcgaagaagggaattgttctggaagcgtcacgaatatgttatttaacttgccatcggatgaaggttcaatagcaattaacgaagcctgcaaagaagggaattgttcctaggtttccaagcagacaaaaagtagatgatgtcatggttgaagtgacactggacgaagatcaacccgacaagagagtttgaattggagcaacattgactgacgaactaaaagaagctttgttgctacttttgaagaaaaacaaaacctcatttgcgtgatcagcggaggatatgcccgggatagatccgagtataatttgccacgagttgaatgtagatcctagtttcaagccggtaaaacaaaagcgaaggaagcccggaccagagcgtacaaaggcagtaaatgactaagtggataactattaaagattggaccataaaggaagtcaatatccggaatgggtgccnacatggtcgtagtgaagaaaagaatggaaagatagggtgt

SEQ ID NO: 19513 - DNA, 1863 bp, Arabidopsis thaliana
ctcttctacaccatgctgtcctctgtggcaacaaggcagccgtcagtgtcctccttgactgtggcgccgatccagaagctcctatcaaaacttcacgaggcattgaactcagaccgattcatattgctgcacgtgacggatcagtggagatcatacaacaactcgttggctttggctgcgatataaactcgaagaatgatgtagggaacacagccctgttgatctcaataaaacacaaacatccagagtgcgtcaaggttctcgcccttgatggtgctgatttcggtttagtgaacaagtttggtcattctgctgtttcgatcgctgagtcaaacaagtggtctcttggattagagcgagtaattcttgagctgatccggttcggtgttgttccacattcaagcaacgcttcagtattctcgcctttgctatatggggctcaagcaggagatgctgaggcgcttaaagcgcttgtaaaagctcaagacatctacctagactatcaagatgaggaaggcttttcggctgcaatgctagcggccatgaatggccacgttgaagcatttagagtcttagtctacgcaggcgcagacgtgaagctgtataacaactctggcgacacggtagtctctctgtctgaacagaacggtaaccgtgacgtgatagagaaggtgatgctcgagtttgctctcgagaaggacagcagaaacatggcaggcgggttttatgctttacactgtgctgcacggcgtggagacgtcaaagcagtgaagcttttgagtggaaaaggatacagtctagacatcccggatggagatggctacactgcgctcatgcttgcagccagagagggccatggacatatgtgtgaatacctaatctcctgtggcgcaaactgcaatgctaagaacggaagaggggaaaagctgctggatctcgcgactggtgatgcggagaaggtgatccgtaatgagttgtctcggaggtttgtgatagaaggaagcagtgtgatgaaacacacaaagggagggaaaggaaagaagcatgggaaaggattgagaatgttggaatcaagtggagtactaagttggggaaagtcacggaagaggactgtggtgtgcaaggaagtagagatcgggatgagccagcggttcaggaagaccgtaaggggaaaggcgatggagcggaggaggaagggatttccgggtagtgactacggaaaacaaggaggttcattttgtgtgtgaaggtgggttggtgtgtgcagagatgtgggtgaggggaatacgacttgtgaccagagagacaatttgtggaagaactcagactcagaattagtgttgtttatgtatgtatataaagaagttttgagaaagggagcttcattttgaaggtagtgtgcttctattgtgttggggatgtttatagttcttgggtttggtatctgcagtatatttgtgaactgtgaagtagttcgagttgcacatgaatgaaaactaaaacatctcagttgatttgagattctccaaatttgattattactttgtccaaaacaaagactattctaaacttacatggattcacaggcttagatccagcactaaaattcggcatgtgatacctggatatcaaaaaacaacatgaagttcctgtctctttcaaaagaacaaaagttacaaaatgtttaaaaaacattacatcacacaagaagtcagcacttttgtttaccagtcaccaactcaacaagcaataaccaacagagataaacagagaagctttgaagttctaatcactattgtaaccaccatcatcgttatccttatcttcgtggtccttcaccactcgttctatgaactgtcttcg

SEQ ID NO: 19514 - DNA, 556 bp, Arabidopsis thaliana columbia
ttcacaaaacccggaatatctcggtataatcatcatcccaacagaccgtttaatctcatctctcaatttcgaatccggtacaatccaaccggtttgtctcttatacgcttcctcaaacccatcactaaaccgcttaatcccttcctccgcagtcatcgtcacatcatcagaaagtgacgtcatcatctcctccccaaacaatctcctcaaacttcgccacatacttcttcaccttcgcttcatgcttcttaacccaatcctcactcaaaaccgtcttcaaattcgaagatcggactttaacaacaacgtaattaacgttattaatcaaaaacagatacgagagagctacgtcgttatagagacgagacttggcgtcgattttacagagtaagaacaaaatcaacctcgagattcgtgatttcaccggtgacgaatctccggagtctttttcttcttctggtgaaggtaacgacggtttcgagatgatatcggagagtgtatcctgtaatcagcgaggaagacgatgaaatcattacataccttgtcaattgatgaa

SEQ ID NO: 19515 - DNA, 341 bp, Arabidopsis thaliana columbia
  unsure (1)..(341): unsure at all n locations
agnnnnnnnnnnnnnnnnnnnnnnnnctaaagtcggagccaggtttgtcacctgtcagtaatacgacatcgcgttcttcagcggcgtgttccagcgataacctgtaagcatgtgactaaagcctatatacggaaagtttctgtttaaatccacaccattagcattggcccgtaaccctaactggcagccgtcagattcgcactcagcaccacatgatgacggcgccaagaaggtgtcaacgtccgcatagcaccggagagcgtgacgaccgccgagttttcatcaccgtgagtgccagccagactcgtcccactttcgcggctggctgcaggggcaggaaa

SEQ ID NO: 19516 - DNA, 353 bp, Arabidopsis thaliana columbia
agagctaacttctccagttccgccttatccacaacccatctatcctcttcgtcctttaacatatcaattcgatttctcctgcgttgaatgatagcaaaggtatgaaagaagctcgtgttcttgtcaccatgaaccacccacttctcacgtgacttttgataccacaacatctcctcttgctcaagcaccatgtctagctccttaattaactcagcttcttgcttcaacagatcatcagtttgcgcttgttccagcaaatcctggatgatggttatatgcttcagtagcttctccttcttcaaatggataccccaaaaacctctttattccatctttaaagagtaattctcagt

SEQ ID NO: 19517 - DNA, 1531 bp, Arabidopsis thaliana columbia
gtggaacaaacttgtatgagctcttacctaattatacgcaaacttgcttctacaaaataaaggaactttgttgagaatcttccaagaggagtacatgtgaattttctgaaagcggaaagaagcttgcaccgttgggccctagaagaccttcagcgaatccacgccgctgaagagctagcctctgaagaaggcggtggtgtagaaatgcatgtcttggaagatgccggtcattgggtaaattaaactaactacgcatctgcttctacattgcttcatctttgttattctattactgaacccgtaaaccagtattccggttgtgtccgttcaggttcacacggataacccggatggtctcttcaggatcttgtcatcttctttccaggttctcagagcctagaggtgctgaacggtcttggttcggctctttttctgtgtaatacttgtggagaagttaggtctaaaaacagttgacagatacaatatcatatacatcaacacatgtgtccgtgtaatgttctgtgtgacataagtaattcagaagtaacatcatatggctgtatcatccggtattattcttgactcgatgtcctttacattgcttttctttttttgtggttcacttggtcagagaaagttctaaagctcaagttcactctacactctacacaccaaaccgacctcacctcttgttcctccatccagtttttattacaactcttggatattaaactgtgaaaaccgaggtgggctcgcaggataccgaggtgggcttgcaggataccgtggtgggcttgcggtataatgaggtgggcttgcggtatacctaggtgggcttgcaggaactcgaggtggtcctccttcaagcataagtttcatttgtgaagaggattcatccacaggcatacctgacccgaccccaacaagggagcttctacgtgtaccctcagtagacagtaacaacttgaatgtccatctcagtacattcggtgtgaagactcgatagaggagaaagacatcgtaccagtttggaaacttcacatatgcatctcccctacaagctcctgccacaatcatctttgcaaattcctctagcggtccaccatttgcaggtacctacagataatgtaagtaagtctttgggaattttttagttaatgcaatcatatttatggttgtaaaagttttacttctctctcttccttccattgcatctcagcaccttcttctagcatgaactttcctccactcatctcactgccaatccacccgtgagtcgcgatagttataccaacgtctccatttagctcgaaacgcagcgtctcatagaagttgactaatgctgcttttgcagcctacacaaagagaattaacgttatgtatgctcttacgagatagaagaaagtaggagcggtaaacatttgaagtactaacagaataaagactcatccgtggtagaggcaaccagttttcaaccgatgcattcacgactattcggccattcgtctggtgaaggtatcttcccacatcc

SEQ ID NO: 19518 - DNA, 492 bp, Arabidopsis thaliana
catgctgatggcctcgcaagggcagaaaatggcagcgatgttccataatcagggcaacccggtttttgattatgtctggaacacggtgcgtcgtcgctttggcggtcgtctgcatgcgagaaatgacggtattaaaccattcatccagtcggtacgtcaggggtactggggatattatttacccgatcaggatcatggcccagagcacagcgaatttgtggatttctttgccacctataaagcgacgttgcccgcgattggtcgtttgatgaaagtgtgccgtgcgcgcgttgtaccgctgtttccgatttatgatggcaagacgcatcgtctgacgattcaggtgcgcccaccgatggatgatctgttagaggcggatgatcatacgattgcgcggcggatgaatgaagaagtcgagatttttgttggccgcgacgagaacaatacacctggatactaaaaattgctgaaaactcgcaaacggggcgaaat

SEQ ID NO: 19519 - DNA, 1350 bp, Arabidopsis thaliana
tatattacagtctcgaaaatcaaaaccgaaataaaacaacaaaaagaaaccaaccgtgtgtgaaccgttcgaatacaacctcaaagctggccaaggaaattgtaccaggagaaaagatgatcaagccctagctgtaggggagggatgaaacgctgttccgcaagcgatccaaagtcttttcctcccacgaggaacggtgcagccagggaccttggtccattccctagtcacagcattgtaggttatcagacggttcatctgtctggacctcaaggacaataatatcagacaacctttgttgcccagacaattcatcctaatgtgctttccgtaaaactccaagcaccatatgtttggcattctgtcaacctccttccacaacagtgtcatcttctgcagctcccatatgcaaacgcaagtggcagcgtttttagtcagtagacccaccagcatcaaccgctctccgcacgcagccagcgtgtgatcgctcaggtctggtgggccaggtataatgaactgtttccatttcccagagaccatgtcataggacaatatcccttcgggatctgttaacatgaagtaaagtgtgctgtggatagccactggctgtgacttaaagttgagcaacaccgggagctttatgttggacgggatggtcctcgtttggtcacacattactcagggaatcatagacttcgtactctccttcacatcaacccacaagaccttatacccatgactggtggagtttccattcagagtcattcctaccgcaacacgagaccagaccttgaacgacctagcagcaactccctgaaagacttggtaagcgggttgctcacgtagaagttcctatgaccaatgtcgaggaagcacactagacctcctgcagaagccattggcaaaacaatactcttcttgggtagtgctgggataatcggatggtgccatttcttcaaagaagggtcgtacacttgtcctgagttgacattctcgtgggttatggtgtagaaccatgggatggtctgaggaagctcagtgaagcatctggagaagctatctgaatcaataagagcattccatttacggcaaactgcacggaactggaaaaaagtagccattggtagtctggaaacaacgtcttcaaagagatcttgagggaattcctgccatatttcttgatccatgttcccacttatctcatctacttccgtacatgatttcccttgagtccgttcttttcgagttcgtttgacgggaggcttgacagtttctaacatcttgaagatcccaggcctctttccaccagccattacaatatcacaacaatcatcagcagaagtatcctca

SEQ ID NO: 19520 - DNA, 642 bp, Arabidopsis thaliana columbia
gtaacagtatatatatatacacctgagtgtgacctaatggcattatgagcatgggacgaaatggtcttgcacaagcatttgctcttcttgcttgtctagtgtcctttgcactgctttgtagaactcaatccaagaagatgagtatgaatccatggcgccaaacatgaaagttggattgggacttgcagggcaagcggtgaccatatccaaaacagaagtggcaggtttgagctggtgagggaagttgaaggccaagttatcgaccttatgctcatagattttgccatttcggtcgagtttatagcgagaagtaccctgaaactctccctttgcctcccatgggactctaggtacacctttaagattccacctgatgagaatcatgttctctgatggttgccaaaccctgaagatctcaagtgagatatccctgaagagaatcttgccatgaaatctaagtgcccagaagatcaatttgtagttgtcaatccagagaacgtgttcattggatccactaatgttatatcatccctgaaagaggaaacacaaatgctttcattgacaggtttaaggaaggaatcacctaaaggagaagaggaaacacacctgtaaaggtcgtaattgagactttggtgaagagag

SEQ ID NO: 19521 - DNA, 338 bp, Arabidopsis thaliana columbia
gttatttcgagatagagagagagaaaaaaaaaaaaaaaaaaaaagagagagaactcacaagctctatatatgccttagaggaaagtagaaaaccattactccaagttttggaatatcacacaaaggccccgcacagagtttccataactgctcgtacatataactcttggatccatcaactgccgaacaaaaactaaaacattataaccaaaacaagttttcactaaaataaaataaatagtcaaaatttcttacttatgcctgataattcaggttgtgcattcacaatgttgccactttccataagctcgtatctaaagatcggtataccagaatat

SEQ ID NO: 19522 - DNA, 545 bp, Arabidopsis thaliana
tttctcaacatctgctagaatccacacacacaactcattagtggcatcagcgttgacattattctccacatattcctcgacatctataccctttttgtaataaagctcttgaatgtcgacatcatcctcccaataaatcacagctaatttgcccttgtagtttatcaatcgacaaaacctttttacgtcaataaaggtgaatttttcagacctaacatcaaagcaaactatcatataaccagacgttacgtgattaccattaacgcgactccaatccgacgtgtcacctaagtaatacaaaaccccattgatacataccccttcactcttaatatcatgtcgcaatgaacattttatccttctccacttcagatctccagctccaaatgtaataactctactatgaccaggaccagatggataaaccatggacaatgccttgtattgcttgtcaattgggtcaacccgaaaaagctaaacgcctttctgtaagtataccgattaggtaagatggcataccgtcctgtagtggggttcatattaga

SEQ ID NO: 19523 - DNA, 500 bp, Arabidopsis thaliana columbia
tcaatcatccaatcttcaactttacatccacctcttccgtttacctttgctttaaaagaatcagcagtaattttgagtttcttcatctcaactaatcttccgaaaaagggatcctgctcaggactaacttccactacatagaacctcatagtgccctgtgaccttgatgacacctcactcattcttaactcttcatctgttgtgattgtcactaaatctccttcttggtccctgtactttatatgaactgctcttaagcttgggaaacgctcatgaacaacttccctaagtttaaagagagtgcaatttataggcaactcagccaatcttatatcgtcagagtatacgaatttcacatccttgtttacatcttctacacctataaccagaagttcttcctcaattatcactttttcctgttccttgctcgtatcacttctcttatccgactgtttccttttacttcattttaactttccttgcttttcagtaaacattgt

SEQ ID NO: 19524 - DNA, 575 bp, Arabidopsis thaliana columbia
ctggtacagcaagatacatccatacctgtaggatgcagtatatgttattgttaccacagccaattatgtaagcatgcaaaaagtaaaatggtaaagagtttatggaatgtaccgttttgcggtaccatttatgctcgagatagagggaaacaccgtggatgactaaaaggacgtaaacagttagaagtaagtgatgtgaataccagaaggcattatatccggttagtttgtcaaatggcttcggcaacttagttaagtgtccgcctgcatcttctactggctaatgtgaatgcaattaacataaaagcaaccattataattccagtgattcccacaggagtattcaccaaaccaaagtatgtgggtctggtcacaccaaagtacttaaccaagtatcttttgtaatctgtatcagtagatgctagaatccttgggaagtcacaggcgaggtggctggttgcatgaagaagcattgcactaatgattgctacagagatcgtctgcgtttaacaaaaaccggaaagtcggattcagctgaagcatagtatctttcttatgaaaggcaagacaaaaaa

SEQ ID NO: 19525 - DNA, 856 bp, Arabidopsis thaliana
ggttactcgatcaagaacgtgcaactgaacgtcaattttcaatgcttgagctatgacctgtgcgtcgaacccgctccacaagtttttctgttcttgttgttgctgtgaaccgccaaagcctccctgctggttgtttccggccaaatggaacacctatagcaaagaatcaacaaatgcaatacataaatgaattagttaaactgatatggtagatcttctaatagcggatgtgcgtctttgtatatagtatgagattactctagggttgcggtcgagttggttttggtagttggcgatgtcgagaagagcgatgatgacaagtggctgttctcctgagttgtagatccagtgggcagagcctggagtgttggcaaagacgtctccgcgtctcacatgttccaccttctggtgcatgtcacggaacccttgttgtccctgctgtccctgtccttcccatggttggccttgttgtccctgtcgtccttgttgtccctgttgtccctgtccttcccatggttggccttgtcttccttgttgtccctgttgtccctgtccttcccatggttggccttgttgtccctgtcgtccttgccatggttggccttgttgttgtccttgcatcggctgcgagtccatgaaggtctcggcacatccagggaccactcttccgctgatacccgttcctgtaaattaattttaggtagagaggaaaaaaaagagttatcatatggtgaatcgattatatcttcattaattagacatgatatatacattaattttattggaagggtaattatcatgtatgaaccttgaacgacgtaggaaatttttggggaagtgaagaaggtgggcaagt

SEQ ID NO: 19526 - DNA, 587 bp, Arabidopsis thaliana columbia
ccagttgataaacgtagaagtggtccttcatctctaggtccatctctagaaccaaccgcgttgttgcaattgcgtttgaagcaacacaagaacatcaatgctacaaaaacaaacgttaagacagcggtagaagcaaccgcgatgataagtttcatcacagatatcatccttcttctcccgttgtggaggaggacgaggaggacccggaacactttgactaggagcaacaacactcggtgtctcctcacttgggctgggactcgattcatccggtgtctcagctggaggttcatttggagaacttgcaggtgctaaccaatcataactacgaggattcggtgcaggacctggcgcaaaacttggcccaggtcctggcgcgaaactcggtgcaggaccgatagctaaatttggagcagagacactaaacttttttggataactgatcagcttccttctcggattttgatgaatccatgtttgctctgcctatcagaaaatgacatcaaaaccataagaagcaaaatgtgaggaaatcaagaatagcttcaaacgtgtttcttgaagacaagaaagagaccacgagaatg

SEQ ID NO: 19527 - DNA, 611 bp, Arabidopsis thaliana
  unsure (1)..(611): unsure at all n locations
nnnnnnnnnnnnnnnnnnnnnnctaaagctttgctttcatcatgatgtccggcagagtcgcggtgacgctataacgaaagttgccgcttaagttctgtaccttcagcgcagtcataatgtcgcgggtattgggaatgacgtagcccagatcgggggtgaaatcgccccaccattgcaggtcatccagcgaggaatcctgacgcagactgagcatgatttcggtgccatcattggtacgataaccgccatagaaacggttaattccgccctcgaaaccaccccagctatggtctggcacccaggcattgccgtncgtggtcggcctgcacggtccagccttcgccgtaaatcaggccgaaccaggagccgtacttcatctccaggccaccttcaatataggtaccgtcgctgtatttatgtttattctcaccctctaaatccatatatccaccaacccctaattcgccgtaaaaacgaaatgaaggagaagatgtcgaggtaattgcgggtgtttttgtgtcgtcatgttctgccggacgtgcttcttctcctgccgcagaaaaggcgtcgnaaacggcagacgaagtaatgctctcatggtgcagtgatta

SEQ ID NO: 19528 - DNA, 903 bp, Arabidopsis thaliana
gctttaatcaggctgcaaccacatgatcgttatacaggttagcgtcgtcataatcgttatatgactccagctcttccgcgtttaatcccggcggaacatgatcggtattgccatcaaacttgccctgattttccgggtagcggtatttgtatttgatatgcgtacccagcagatgaacaatgatcagtttcttcggcgcagggtcattcagcacttcctggaacggcttcagcacgttggtgtcgtattcacgcgcactctgcgtacgttgctggttcatgtagtactgcttgtcggtctggcgcgaaaataccgtcagcatggtattgcgggcggtcatcgtctgctggttggtgatccagaaggttttataacccgcctgtttcatcatgttcatcagcgacggctgcgtcagatacagatccgggttcttttcattggcaaaggtcagcgcctgttgcaggatttcaatggtgtacggacgagacgtaactacgttattaaacacggtcagattcggatcggttttatgcagcgcatccagctccggcgtggtttcacgcggataaccgtacagactcatgcgtccgcgctgggtcgactcgccaatcaccagcactaaagtgcgcggttcgttacccgattcatctttgaaattagccagtggcggcaaggcattattttcattcagtaactttgttagcgagtttagttgctgacgatactgataatagccggtcaggaattgccacggtgcggcaggctccatacgcgaggccaggttatccaacgttttctcaaacggcttgtttttgataaacgtattcatggcgatcggatgcagaatcaagccataaagcagggcaaaagagacaacataacgccacggctttggaatataga

SEQ ID NO: 19529 - DNA, 856 bp, Arabidopsis thaliana
gaggatcgatcccccagaggagtgaaaaaattttaaaactttctgttgcacctggagaccttgcactcgagtatatcggtcgagtatgagtgatgtttaaaacccaaaaaaatttaaatcatcattttactcgaccaacagaagatacatagtcttaaagggagtttatccctgcgagagattccgcatgtcctagcgaggcattcatcatttgagtctcgtgaatctgggagaaagaggagaaccacactcactcgatctagcagcaggagcagacgacttttgcagtctcgtagtttacgtgaccgcgatgctggttgtagtagaagaagagaggtcgagtatcttcaaagcggtgctggccgccacagagctgatgaggttgagtacccacatggtggagctgacacagaacagggcggctcgtctatggcctgggagcaatcataggcagccattgacgaccaactccgttcattcttcgacagaggtaagcacctcacttcactattgtactatatcatctcttgtgatttgttctttattttgtttatgtgattggatttgtcttgtatactctcttccaagtttagtcacacagtggactatgtgatttaagtttgggggaaggctcaggaagtgtgtgttgccattgtttatactcttgagtcagcattcatctaaggcatagaaaaacaaaaaaaacaaaaatgtgaaaaatttcagaaaatgatttcacaaaaacagagtattcatgtagttgcattacatttaggatccagtctagagtgtttcatttaggattgttgcatatgcatatgggataatgggggatcctctaatcttctagatcgac

SEQ ID NO: 19530 - DNA, 857 bp, Arabidopsis thaliana
ggctcggccaaagccgatcggaaaaggagagaaacagtaaccgccgtgaaagcagccttagcatcctccgagcagatattcaacagcttattaacccatccgtttccaccattcgagactttatcactcaactccaacttcactttaggatcacagacctttcctcctctatcaacctcagcaatatccgttgataacgtcgccggaatactacaaggcatccacttggaacccctaaggaacgggatgacagaagaagtcttaaagggagagatcccgagaccggtcatacccgaaaactgtggagctccagtcaaattcatgagagagatcatacccaagacaagtggactcttgcagccttcttcgaggatttccctcgcaatggtgctatacattgatgaagctggtcgagcacgagggcctgagcttggaccccatgtgttggatccgggagatttatcaacaatatctggtatctgattgtggccgcagaacctgggacgaacccatgtttcgaagcatgatctaacgtcgccggtaccgacacgagtcccggcggatgaagcaatgctcctagcaacatagctggagtaggtgaaggtaaccctaatcgccataaatgcagattttgaagaaagtaagggtttcttaaggaagacctagaaaggaataaggaattggaagaatcgatctgccggaaagagaaacggagagcttgttccgccggcgagatcgagtaattgtttcaggcggggaagcgaagaagcgaagaagatggagatctccagaggagaggagaaggttttggtcgaaagcagagagagtcttcttcttcttgttgttggttgagttga

SEQ ID NO: 19531 - DNA, 448 bp, Arabidopsis thaliana
gtcctataagcagcagggcgttgaaggtgtggaaaaactcttcctgagatcgttctttattagcaaaaaactgaatatcgtcgatcagcagtgcatctacggaacggtagtagcgtttaaactcttcgatcgcgttgttttgcagggctttaaccatgtcctgaacaaagcgctcggagtgcatataaaccactttggcattcggcttgcgcgccataatgccgttacccaccgcatgcagcaggtgagttttcccagacccgtgccgccataaaggaacaacgggttataggcaccgcagggttatccgccacctggcgagccgccgcgcgctgccagttggttagatttaccttcaacgaagttatcaaacgtgtgtttgacgtttacgttagaacgataggtcggttctgccggggccgggacgttatccaacctgagcgcgtag

SEQ ID NO: 19532 - DNA, 869 bp, Arabidopsis thaliana
attgatctttgtcaggttgcagagcctatcgaattcatcaaggtggtcgagtggatcctccattggcagaccatggaatttgttcccctgaatcatcgagatgagaccactcttaatctcgaagttgtttttctggatagcaggaggtgcaatttctttcctctgacggtgatgacgtggtgcatctccagcaccaatgttggcagggccattttgttgattctgttcttcagccatttcgagtggttgctgaggtacaaggttgactgtgtttctcctttctttgagtttgcgagctatgcggtcgatgttttcattgaaaaggaggttctgattgcctgttgatcgagttcgtatacagtagaggtgtacctggatcaagaagacaacgagaaaaacacatagttagtaaccgaaaagaaaattgaaaaagaacttgatctaagcaagtctgaaatctcaaatgtaacaaacaaacacccaatttgcaacagctccaaattgataataggtttttaagatcaattaatcctaaagcactatcatatcgttgtagtactgaaggttgtcaatccaaataggtgtgatgctaacaatcaagatgtgatcagaagtcactaagtcaagccaagcaataacaggttgtggtgtgttttagcagttctaagtgaacatgcagaaaacagaaattcaggcagaaacagaaaaacactcgaccaacacagctctttgcagagcactgggtgaggccgagtgacaggttgagtaacagacagaaaataaaacacagatactcgactgcatagtctgttgtcagacaactaggtggtcgagtatgaggtcgagtaacaagaaaggactgatgaaat

SEQ ID NO: 19533 - DNA, 1181 bp, Arabidopsis thaliana
cttcttacacaaaagacattcccctaaaaactctcttgttcttgactcacttctacttcaaaatctctctgttcttcaaaattctttgtcacaaaatgggttgctgtctcagcaagaaaccttccccttctcttccctctagtgttaaaccctcagatccaatcaaacccatggaaccagtgattgagcctttggaggaagaagcaaaacccaaatctgagaaactgaatcaagaagaagaagaagaagaagttgtggtgataaaacacacaagaagccatgaagagagatccaagaagacagaatcagataaagattctccagtttcttctcctgtggcggctgagaaatcgaattctacaccgcttgtgagaatctctggctgtactaaagaagaagttgatgctatattgatacaatgtgggaagctaagtagaagcaactctgctgctaaaacaagaagatactctggttctaaaagaagctttgattttgaccaatacgagagaatccgcggcggcgatgtgccgggatcgattagcaccgaatattgattccttgcaccgagcctcggattacgtaatttgtttggacaaatttagttcctttcgaaattcggatttgtaccacagtgctttcttcagagccgagagagccgccacatcgttgattccttctactttggctagggtggatcggaatttcgcgaggaagtctcgaagtggctcattaggctggtgagatagtgaccatagatcggcgtctgatgtgccgggatcgattagcaccgaatattgctttaggaagagcgtcgatagctcctgaaaactgtccacagaatttccttcgagtctcgagaaccaatccagggctggccctttcaagtgctcgacgaacaggtgacagagaccagcgtctctttcttctggtctgaattgggctcgggccacggagatgatgaacgactttaaatgccctttcgggtcggaagaccgttgaagtactcgattcttagttttcctggatctgagattatcgcgttggagatcttatgtgtgaacggtgtgttgtgggattcttccagaatgcggtcgatgtttggtgccgaggagactgcgttatgcatttgggatctcacgagcttcatctcgttctctgccttgcgtagggatagcttgatg

SEQ ID NO: 19534 - DNA, 937 bp, Arabidopsis thaliana columbia
agttgttatgttaaattaattactaattatgtattacttaacttatgaagtctaggtggcaagttctcatgtgcttatgtgtcaagttgtggaagagagttagcctcctttcatatatatatgattattgtgttcaaatagtgtgatttaaagctttgagaaacttataatgattgagtttattcaatcaatgtatatatatacataaaaatcacgagtatcaaataggttcgacaataatcgtaaattgcgaccttcgttttatagacagaattgagtcggaatgaagtagtgaaatagagactatattatgactgtgggttctgaaatccacactagagatttgtaattgagattatgagaaaggagggctagaacttcactgaaaccttgagagttatattgctaagaacgaatggactttttgtattgattatgaaaaagcttttacaatgtgaaaggagattacaagtgtaaaagtatgtgtgtgaatgtaagctgaattgaacgtctcttccaagtcgtccttgctcccttatataggtctacgcacgtggtagctccgtccgggatctgcggagatcctcctgaatattcggcaggtcagttccgagatatcaggtctgctccgtgaatatctcctcatcagttcctaggttattattcgcttatctcccttcatcaggtgacccggcttatctggcccaagtacccattcgcgtatgtgggctcatcagttgcgtaggtcctctacttggtgggctttgtgggctggcttggtatttttgcaggtggattcctggaggagaatccagctccaacaatgactgtttttttacgtcctaaaattgcgaagtatttgcttacgtcttttgtctagtcgctaactaataagtgtacatttttcttgttttgagcatccatttgtcatcacttt

SEQ ID NO: 19535 - DNA, 911 bp, Arabidopsis thaliana
caccttattcctaaatatgccaaacccaaatatacctgatgattggctagcgaagatagccaagaaaatggctgacaaatgttggtggtacctcagacctatgttgaaatccgggcctcatggaagaaacatagtctaccgaccggatgtcctgaaagatgcaaacattttcagcatgtgcgacgatcccgatgacttctacgcagctggccacgatccaaatgacatcaactccgaatgtcgctatagacccttctttaaacggtgcttagaggctggtaacctgacggctatttaccatgaaggactgcgtctcgttacacatgagtctgacattaaggcagctatcctacatttagagcgaattgtccctaggtacgccgctgcaacccttgcctgcgcaattctttacatatgtgccggtaatgctcacatgggtggtgtctactttcggctcttcggaagcaaccattatgctttagaatcagaggatacacgtgacatttgtgaagaggtgctagaagaaataaagaaatatggtaatactttaaaatatacatacgctaaaagcttttcgtacccggaatgtggtgacattcgtactcctgattgcgcgatgatgtgttacatgagatcgggactcttcaataatctttgcaacgaatgttacatctggtggtgtgccaaacggattagccagattctgtagttctcacattcgtaacgatcttgtcatatttataagtgtttcatgcaataatatgtgagctctgtacgttgattatcagtagtggaagtttgtttttaataattaacactttttatgaatcccagacttactaactcaaagtactataataagaaacatggataacacataagaataataaaataagaaaatatctacgtag

SEQ ID NO: 19536 - DNA, 1592 bp, Arabidopsis thaliana columbia
gtcgatgaaaccaaccagttccttacttggtatgtatctctttctaatataagaatctcctcaaacaactatattccacatgcctaagtcactaccaccaccaggttaggagatagtggtaaaaaacgccaactatcgcaagctcctcctctaatgtaacaaaactggagacagtcacaatcaatgaaatataccagtttctacataatgaaaaccacatgttatattcaaagtattctctctttatttataaatcacattaaccaccatttcttactgctttaagaaacctaacattaccaatgtaggaagttagcttcacttgctttgctacagttgtggacatacaaccacaatatggatggtactacatctaatgcaacatttgcaacaataaacttggaacaggagacacatcaatgtattgcaaccattgcaaagaatacaacaacatttgccttatcaggtttgacaactatgaacgacctaaatgaggttatattcatacaaaatgatatagctcaaattgccttaagcctactccctcaaataagagatcgtcgttagcacttaaaggtctaattccacaaagctctcggatcacacaatagactaaggttatcaaattaagctaaacaaaataataaagaaaataaaagaaagaaaagcaagcaatagcagatgatggggatgtaaaataaaataagaaaacgtcagggttagggtattctcaggaaacaaacggttagtagatctagtgatagctaggttgttatcaaaccgttcttaaactcaaactctaatctaagaataaccggtggggttccgtgaaactcactatgcctagagcgaagattcccgggggcgttccgtgaaaccctattccaaagcatgcatgctaaacgagttagataagttcaccttagtagagatgccgattcttattacacacctattaaccaggctcatcaaataatagttccgataaaagatacctatggcgggtatatcgattatctggaatcaagttctacttagctactttagaactagtattaagaacaattaaagatgaacaatcctacagataacctagcaagaggcaatctactaaatcatttataaccctaatgagaaaccctaaacctaacaagaaaactattcaagcatgatcatcgaagaacagaacatgtttgaataagaaatcaatgatgaatatatcaagagaaaagagttagaagaatcttctctaaagggagtgtctacagggttttgctccaagaacaatagagaaagacaataacatccccaaaacttaggtctaaacaatgacctttaaaactatgtatatatatgacctaaaacgtgatgggctttctttagaaataagagaaagttcagagtcgaatttagaaatctgcaaaacttcaataagttgcatatttgaattgacaggggcagtgttgttggatacgtatgagatttttagtatgtggatttcttctgcagcataaaatctctgttttcctccaaaatactacattatctccaaatgaatcccaaacatgtaaagacttgaacaagactatgaa

SEQ ID NO: 19537 - DNA, 835 bp, Arabidopsis thaliana
caataaaataataaccgaagcatacctggaacgatgcctcgcgctcctgacctgacttcacgctcgctatcaactcctagatgaggatcttcccttcttcgagctcgctcgccgaaggatccttgcttagacgttgctcgtagagagcaaccaacttgtttatagcagcaatcgcctgccgaaaaaaaacagaaattaaaactggcataaaaatagaaggagacagtaatcgattatgacatggccctccttcgccatcatgtcagcataagccgccgcctaggccatgttcttcacaccgggaacctgacagttcctccctttgatgtgtcggagcaggttcgccaacccagccttgtcctcgatgatcggatgatcacgatcgtgagtgtaagaccaatggaaaggcctgtttcctgcagatcctccacctaaattggacgtctgcctcacctcctgagaccggttcggaccttgagaggaagacctacccctacctcttgatcctcggcctctgccttgggaccttcccgatgatcgcctgtctacggacacagcagcctccgggttagcagccaagggtttcaccctctcttctcttgaaggggcgacctcctgatcaatcacgatcagctcagctgtcaggcgcaccaccggcaggagccgagctctctttgaagaagacggtgcaccgtaagccctaacagcttcagacggctcagagacctaagcggccagctaattgctatttgcccgacccgccgcaagagaggtctggcgttaccgcaggacagtgaaggatgagacgttgaggcttgagtgtgtgaggcagcaa

SEQ ID NO: 19538 - DNA, 1175 bp, Arabidopsis thaliana
ttttcacggtcaattcccaaacgtctaccttaactaataagttagatcgttacataccttggccaacatgcggatgtgattccttagatcgtttgtcgccttattccattcgttccacgattcagatccgatcgtgtattgatggaccaatctctatcgttacttagccatacaaccaaccaaccctactggtctaagtacaaagataaaagattggggatcgtacgattcccttggttcacgatggcccaatcaagctattggctcattggtccatccgttctccaaacatacgtccctccggctacatggtcaacgattgagccctcggcttatcgaactatccatgtttccgatccggttgtttaacactacgaccgcccatggtttactaaccgtctacccgtccggtccatggtggtctgtaaaactttcggcttaacgatccatccatgcggtccgaacgatatccttatcacacccaagggtccgtggattcatccaccggatcatcgtaggctagcccatgaaatccttcttccgtcggccttaggtttgcttgcgtgtccaacatccgttttgtccattggttcccaccgtggactttcccgttggttatccattgagtcaccatttggtcttacagatctccgatcggtttcaccatggctgaggagatagatacatgaaggcagccgcgatattgatcctatatggtgaatcacgttccttacccattcttggtgctttctccctttaccggtaagattgcatccatgggcgacccttgggtgtgttcggatgcacttatccttgtgcttcctcgaacacttttctcgatccatcccatccgacgatcggtctgtccgacccgttccgtcagacgatcggcctgtcccatccgacccgtccgacgatcggtctgtccgatccgtctggccgatccgatccgtcttacgatcggtctggccgatccgtcttacgatcggtctggccgatccgatccaacgatcggtctactagatccgattcgtctctaagacgaacggtctaccctctccatcctctacactccatcgaaccgttggatcgggaggtagcatgtgcatcagttcggtcgagttatactcgccgagccgcatcccctttccgaccaacaactctaggatgtgttg

SEQ ID NO: 19539 - DNA, 1202 bp, Arabidopsis thaliana
ggtatggaaagaagttttgcctttagattctctgtatattgctggattcgcattctgtcttttagattttaataatgttcgtgacaggataaaaaaaaaaggaatatgtcttgttggaattacattgaaggatcgggtgttgcgaattggagtagggttcattttacgggacagatatataatttgatgtttaggatcatagtggagtcttcgaattatgcgttactactatctaggggtagccccgttgttgcattgcttgaattcattaggaaaatgcttgctaggtggtttgaatctaggaggaaaaaaatatctagaacggttggcgacatacccattgctgttgaaagggaacttatgaagcggtttaaaggtgctttggggatgtctgtttcggcagttggcagttgggattttgaagttgttgcaaaggacggtgagcagttccacgtctctttagaacagcagtcttgctcttgcttggagtttcaagcaattagaatcccatgtacacacgcaatggctgcgtgtcatgataggggtttggagttcagaactttggttggagagatgcataggctcccaatgtggtcaccaacggtccaagctccaatcctccttgtacgcgatccatcggaggttaaagtccctgaggaaataaggtcactgtgtttaatgcctcccaaaacaaaaagacctgctgggagacctcctaagttgcggattcattcggttggggaatatgaggtcagttacatctttttcatcaatatatttctatataatccaaaggcaacaatcctttttcttttgcatgtagggaaataacaagtccaaaacgcctaacaaaggtggacgatgtgggggattaggtcacaatcgtgttacgtgcaagaccccccttggatgatgctatttaaacttagaaagatttggctagttttttgttattaatgaaggagcttttttcggtgttgtttttgtttttggtatcggggtagacatttttacccaatatgttttaacaacaatggtctaattcctaaacttcttttgaagttgcaagtattactgatgaatagatactactttttgtgtattattcaagtagcatctggcgaggtatttcagttcaatcagttgttttcacatcttcaccaatcgtttatctcatttaggtatacagataacgttgtaca

SEQ ID NO: 19540 - DNA, 604 bp, Arabidopsis thaliana columbia
gatctgcatagcagcacgatgctcacggcttttgccacctcctaacggaccactcttgccttgaccttggagcctaacaaccgcagcagccgctttagccgccgcaaccgctgcgtcactgcagcagctgtcgcggcagaaccgcaattgcatgcgttctacgctctttttcctcctctcccgctgcgtagaaggaccttagccacgcagcttctttctcggagatgttaggtggtatagtctcgtagctgtcgcataaagagcggtcaaggcggttagaaatagtgccggagtcggtgccggaacaagaggaaggtttgattccgaacaaacccttgaaccacctcgttgctcgacccatttttgtctctctctttactctggtcaattttgtgagattctttctcataatggttttagtttggtttcacttgtaaatacattttttattttagtctatttttttattgaccaacacaaaagtgtctattttaaaatttacaaatctgtaaataaataaaaatgaaagatacgaccaaatattggtacgattggtcgtaatagggtccatttattagtgttttatactttatcgtatagtgat

SEQ ID NO: 19541 - DNA, 466 bp, Arabidopsis thaliana columbia
tatttcccaaatcctacacctgctcacatctcaagctcaagttttgttttcccgggaaaagtgacacaaacaagaacttaacaagggagaagaaaaagcttatattcatatcaacggttgacgttggaaagctattaagatttggttttctacaaatttgttcttcctgaaacgtcacgagacagagcttacaagaagagaaaacagaggaaatttcgttgcattttttttacatattgattcgattaatggattcaaataatcatctctacgacccgaatcccaccgggtcgggtcttcttcgttttagatcagctccgagctctgttctcgccgcttttgttgacgacgacaagattggtttcgactccgataggttgctttcaagattcgtgacctctaatggcgttaacggagatctgggttccctaaattcgaggataagtctccggtttcgttaacgaac

SEQ ID NO: 19542 - DNA, 243 bp, Arabidopsis thaliana columbia
tttcagcaacgtatgaagatttctcgtctctttctgatagacttacacttattgatccattgcagggcacataggactccactatgcaagtccaaacgtggcaatttcaaggatacatatcccgatgatttgctcgcacctgttttgagggtctgtcgctatctttgctattctgttgttggtttttatttccgttctacgtcgagttatagatagttcgtccatgacataggcattgataga

SEQ ID NO: 19543 - DNA, 468 bp, Arabidopsis thaliana columbia
tgggatatgatcaggctggtaaaactcttagtgctagaaaatggcacgctgcgtttactggagatggacatttggatatggaaagagttcttcgccgtatacagcgaggggtaagtctatcttggtgtgataactcatcttttggtctatggctttaatgctcactaggctacattttcagggaattcatccctcaatcaaaggagaggtttgggagtttttgttaggagcttacgatccagacagcacttttgaagaacggaacaagttgaggaatcacagaaggtacttactgaatgcttactggtgtattgtttctgctcttgacattgcacttcgtagctaattttgctgtacttattatctaagggagcagtattatgcttggaaagaagaatgtaagaatatggttcctcttgttggtagcggaaagtttgtcacgatggcagttgttgcggaagatgggca

SEQ ID NO: 19544 - DNA, 479 bp, Arabidopsis thaliana columbia
ctcaatctcacgtcaacgaccgtcgccgtcaccggaaggaaacgatttcatcatcttctacaatgatcccatacgcaacaatcgaagaagcgtcgatcgcattatctcgaaacctcacatggctagagactctctggttcgattactccgccaccaaatccgattactacctctactgccacaacattctcttcctcttcctcatcttctctctcgttcctctccctctcgttttcatcgaatcatctcaatccacctcagatttgttcaatcgctacaaaatccaaccaaaagtgaaaaactcattctcatcgatgttcaaatgttacaaagacgtcatgaagatgttcatcctcgtcgttggtccattacaactcgtttcttatccttcgattcaggttaatttctggaatttggcttctaatttcggaattgatgcgatttaggttgattttgtttttcgtgtgttgaacagatga

SEQ ID NO: 19545 - DNA, 543 bp, Arabidopsis thaliana columbia
cctgggcaatttcaagaaatacaaagatttgtgtacctcctctgttccaagtagtgtttgcttcccatgttcaagtgatacaatcttaccatctttctcgtaatcaaacttgacataaacaacaccagagtcaccttgtccaacataaactttctttacattgtcataagcaccaccgtcgtcccaaacatctccaccacgaccaccttgagcttccaatttggtcagaccacctgataccggcggagtcagcggtgtagtcgacggaattatataaactccaacagaatggatcaaatcacttgaacttccatgaaatccaacgattttgccacctcctagctcagcttcttctccagaggttagtccaaaaggctgagaagtttccccttgaatgtcttaaagattagagccgttacgatctctatcggtgatccaaagagcttctcgtagtaaattttcactgatgttatgtaatcttctggataaccacaaactagcaaaaaaagcaaaagacaccacaaatgatcagttaatgttgat

SEQ ID NO: 19546 - DNA, 573 bp, Arabidopsis thaliana columbia
tcccttgcttttcttggtggcaaggtatgtatcttttcagggcatgcatatagtctcgcaagaacttctcctggctgaagttaatcaactaatgttgcaggcatttggtagaactcctcttattagcattagtccaaagaagacatgggaaggagcttttgcaggacttgttggttgtatttccattaccattttactctccaaatcgttgtcctggcctcaatctcttgtcaggtactcaaatcctatagaattcctggagtctattatgtctttattctgactggttcgatttaaacagcaccatagcttttggagttcttaacttcttcggatcggtctttggtgacttaagtgagtcaatgatcaaacgtgatgcgggtgtcaaagactccggctcactcatccctggacacggtaatgacacgtcaaaccagaccggaacttgtctatcatgtgctctctaaccgagtcctctgtaattgcaggtggcatattggacagagttgatagttacattttcactggtgcattacctactcgttcgtaagacttcatggagttcgattgtat

SEQ ID NO: 19547 - DNA, 434 bp, Arabidopsis thaliana columbia
cacaatcttcggatcagcaagacaaatatgtgactgaatgaaaaaacagaactctcacctccttcgtgcatttagtgggagatgcttcacctccagataaaaatctgtgctcaaacgacaagagtctcctgtgactttcaccattgtcatcatcctcctttttcaagttaggagcaggacacgggagcatcgtacgagcaacatgtgaagggatacaaatatccaaaatgtaggtttgtccaaatgtcagaagcaaagagatgaatccaagaaccatcagctctgcaacacaaaagaaacaattcacatcacgaacttaatgttctgtcaaagcctttggctaagtaagcacacatgttcaaaattccaagtaatcagaagaaattttcacctgctttgatcttctccagagcgtcaagaagagctgtcttgtg

SEQ ID NO: 19548 - DNA, 522 bp, Arabidopsis thaliana columbia
aatgtacaatggtcacacgggcagaccactcacagctatgatattccttggaccaacatattaccaaagattgaagcatatggttgatgacaagattcactcgcgtggacgaggtccggtgcaaatcttaacaagacaaccagctgaagggcgatcacgtgatggtggtctccgttttggagaaatggagcgcgattgcatgattgcacatggtgctgctcactttttgaaagagaggctgtttgatcagagtgatgcgtatagggtacatgtgtgtgaagtctgcgggctcattgccattgcaaatctgaagaagaattcttttgaatgcagaggttgcaagaacaaaacagatattgttcaggtaaacataaactgttgtgcaagtggttcatattcatgtttatctctttcatgctcatttgtctgatgtcatttcatctaaatattctcaggtatacattccatatgcttgcaaattactctttcaagagcttatgtcaatggctattgcaccaagga

SEQ ID NO: 19549 - DNA, 507 bp, Arabidopsis thaliana columbia
ggagcgcatcggagatcgacgttggtagctctgacactaggatggggctcatccctagcggcaccagttctgtgcttgcctcgccggcccactcggcaatacgctggaccccagtgcggtgctctcctggtggcctccatcgcctggggacctggtgccgcctgtgctacatggaactggtggatctgctcctccagcttcctctctttctcctctgcctcgagctcatgctcggccagcaactcgccccgtcgggtgagcatttcttccctgaagacgagatccgtctctcgcctggcgaggtccgtctcccgcctgtccaaggactgctccttcgccttaaggttctcctcggtgagggcggcgtcgctggccttgccctcgatctcttgctgccacttttgcagcctctccacagccttgacctgatgggcccgctggcgttccagagtctggtctatggcattcagcttggcctggtactctgttgtgaaggtctccgctgag

SEQ ID NO: 19550 - DNA, 536 bp, Arabidopsis thaliana columbia
  unsure (1)..(536): unsure at all n locations
catgttgttcagcttttgttgcttttggatctttcttcttcttcttgctcttcttgtctttcttgtctttccagctctccactctgttcttccaaattggattgccatattcatcattcagttcttcaggaagaaacaacaatccccaagttagttaaactattaataacctcaccaaatgtatacaaagattttggctttgtttcttagttcttaccactgtctattgttgagactgtacttatatgtctagcatgaatccctgaatcctgaaaaagtcaagataatgttctcaaatttgtaaaatctaattaagacataaaagcaactaatcttagctaagcacacaaacctgagaagtgttattggtctgtgttggaacaatggattgagttttagatgtctttgtctcaacatcatcaaacacattctctatgaaagcaaaacaaaacaaaacaagttataaatactctttaaccagaaaatcaaactttcgaatanagtttgtaaatttataattgtaccatcgtaaggat

SEQ ID NO: 19551 - DNA, 484 bp, Arabidopsis thaliana columbia
gtaacttacgttccaaatacgaattttgagtagttgagaacgtaataagccatggcaaactcaacttggttgtctggaggataaacaggttcgatctcacgcacgacacagccttgagacctcaagatctctctatgttcctcaggcacatcaggtaacatagcaacaacaagaggatacgcacttttgaccttacgcaaaccctttgctagtcccaccactcccttcacgtagtctccatttcctgccaaaaacgtcacataagctctccttggaggtgcttgatgcgccttttcggataaatacatcgggtttacggaaatctcaggggccattttgagcaaagaaaaagtattggggtaggttatagaagataactgaaaagttttcttgagtgtttgagaagtaaaagaacagtttgatggacttgtaaactttttagttactttggtctttggcttgtgagtagttctacgaggctaca

SEQ ID NO: 19552 - DNA, 586 bp, Arabidopsis thaliana columbia
  unsure (1)..(586): unsure at all n locations
nnnnnnnnnnnnnnnnnnnnnnctaaagatatcgaccttggtcgtcagcaaataaacatccgcgaacatgtagaacatccagatggtgcgcagtgtcaccaccgtcgccaggaccggcataattgcgggcagcgtgacgatacgaaaccgttgccaggcattagcgccatccatctctgccgcttcgtacagcgatttgtcgatggtctgcaaaatcgccagaaacgagataaaggcatacgggaagtagcgccagatggcgaacagcaccaccagcacaaagctactgcccggattatcgaaccacagcggcttcctgctcttgctgttcctggcgttcgcgaacgtcgaggatctggttgttgatcagaccttcttcgatttcgcgcacgcgattacagtggttttatcgttttcttccggtaccagcggatcctttccgcctacctgcatctgacgagcgcgaccgggcnngaccagtaccaggtcaaaacggttaccaattttctctacagcgtcctgaacagttacgcgtgccatacttaaaaagctccacaggtgaagaaatgactgggcatgatactga

SEQ ID NO: 19553 - DNA, 618 bp, Arabidopsis thaliana columbia
tcacatgtgctactcccacttcaatgacatcatacactccatcatcgacatggatgctgatgtcatcaccattgagaactccaggtctgatgagaagcttctttccgtgttccgtgaaggagtgaagtacggtgctggaatcggtccaggagtctacgacatccactctccaagaataccatcttctgaggaaatcgcagacagggtcaacaagatgcttgctgtcctagagcagaacatcctttgggttaaccctgactgtggtctcaagacccgtaagtacaccgaggtcaagcctgcactcaagaacatggttgatgcggctaagctcatccgctcccagctcgccagtgccaagtgaagaaaagcttgatttgaacaaggaaacgtttttttttctctaaaatggttgtgttttatttggtttaataactttcttaaaaatatttttagtcgaaggtagatttgatgcatatggtttctttcttgttgagagagagaaaggctatagcatcctttggatttgatgcaatgtttgtgattttctttttgtcccaatatatttctctgatggaatgtcttttttctaaagtatcttgaaaaggaataagaggattg

SEQ ID NO: 19554 - DNA, 572 bp, Arabidopsis thaliana columbia
tatttggtcttgagtggagttaaacgctaaaaaggcaaaggtggcattgagtgatgtatgtacatcgaagcatgaaggaggattaggccttcgttcactaagagaagcaaacaaggccagttgtctaaagctcatttggagaattacatcgtcaacttcactttgggttcaatggttacacttatatttgttgccgaaaggttctttttggtctattaatgagaactcgaccttagggtcttggatgtggaaaaaactgctcaaatacagagagttagcttctggttttatcaaaacagagatacaaagtggaagatcaacttccttttggtttgataattggtctcatcttggccgcttgattgtggtcacgggacagagaggttgcatcgacatgggaatatcacttcatgccacagtttctgaagcagtaatgcaacacaagaaaaggcgacaaagagttgatatcctaaaccaaatagaaaaagccctagaaggctctcgttctaaaaggctcatcgaaacagaggatatagtgcgttggatgggaaaagggaacatatcaagacaag

SEQ ID NO: 19555 - DNA, 563 bp, Arabidopsis thaliana columbia
agttcttgattcaatctatcgaaaaaatccattaattgttgttgaactttgcccatattgcatttccctggtaacagaagtttcatacacaactgggtagttgtgggaaagaaggcaaaggaaagcacaaaagctgttgcttcaaacctccattttgatcatcagtgccaacattgtgaaaaggtgatgtcttttggcaaatcagcggtctcttatatgaatcagtgaacttatattcaatataaaacctgcaggcatcgataaatcattcattagaaaggctgcttgggtacccgtggatagaagagaaagtgcggcaaggttcactgtctctccatggtggatactataattttgttgattgtacgttcgagaaatggacagtggattatgcagcaagcagaggtaagaagaaggaaggcagtggaatcgctgttaaagaccggtcagtttggtcttgacttacgactatctcaatcttcatagagtttttttcataatttatagagaacatcaaccccttttggttgggattacatgtgtttgtccacttgtgtgttgaa

SEQ ID NO: 19556 - DNA, 1187 bp, Arabidopsis thaliana
tcattacaaatgagcttaatgaagcaacgatgaggctacaagaagctgctgatgacgaatgctctctccgaagtttggtgattctctcaggatggaactagaagacttgagaagagaacgcgaagagctgcagcagaaagaagcagagagattagagattgaggaaacaaaaaagttggaagctctcaagcaagagagcttgaaactggagcaaatgaaaacagaagctattgaagcaagaaacgaagctgcaaatatgaataggaagatagagagtctgaagaaagaaacagaggccgcgatgatagctgctgaggaagctgaaaagagactagagcttgttataagagaagtggaggaggcgaaatccgctgaagagaaagtccgcgaagagatgaagatgatatctcagaagcaagagagcaagaaacaagatgaagaatcatctggttcaaagataaaaatcacaattcaagagtttgaatctttgaaacgaggagcaggggaaacagaggctgcaatcgaaaagaagttggcaactatagcagctgagcttgaagagatcaacaaacgaagagccgaagcggataataagttagaagcgaacctgaaagcgatagaggagatgaagcaagcaacggaattggctcagaagtcagcagaatctgcagaagctgcaaagagaatggtggaaagtgagttgcagagatggcgtcaacaagaaaatgtacaacttgcttagtgatgatttcattttgtataaaaccttgttttgttttccaaacattcaaagatagaaaaaaagacaatgaaaccttgacggcttttatttaacacaacaacaaagaacagtacaacaacacacaggacaggtcaatcatttgttcaaggaattattcatgatcttcaagattccaataactgagaaggaagactactaatcagcttctgtctcaagaaatcctcataagcctcaactatgagatgatcatcgtcccacttatcacggaaagtgtctgattgtgtagcaagtctgtagtatccgccatttatttcctgatatctccattgttcaccgggcggtgcaccaatttgctctgctatccaattaaggtaatcaacctgacctccaccaagtcgatgtgtgtatctcttaggttgcccgaaagcctcacgctttgcatagt

SEQ ID NO: 19557 - DNA, 536 bp, Arabidopsis thaliana
cgccagtgtgctctaaagatcatcgactatgagggacgatcatacttcttctaccacaacggggctcttcccggcggcacgggcttcacaagatctgtggctgtcgaagaattcacttacaatgccgacggtaccattcccgagttgagcatgacaactgctggtccggcacaaatcggaaccctcgacccatatcgccgccaggaagccgaaacgattgcgtggtctgatggtatcgaggtggaagcctgcagtgagggtggctttaatgtcgccaatattgacaacggggactatattaaggtggcaggcgttgcctttgatgaaggcgcctctagtttcactgctcgagttgcatctgcaggcaatggtggaaatctcgagctgcacctggacagcaaggatggaccagtcgtcggtatctgttctgttcatccgactggaggctggcaggtgtgggaaaatgtggattgccagttagtaacagtacatctactcacgatctgttccttgttttcacggcgacactaccgggt

SEQ ID NO: 19558 - DNA, 550 bp, Arabidopsis thaliana
caactaaatagcataccgtcaatggaactgtctcacagtagacgccctattgataaatagacgtaaagttcaatatcttctgttaatcaaaattaaatttaccgaggcccgatagacagcgccctgcaaacggctatgccatgtttttctggagtcttcagaatcaaacatcaatatgagtgcatttacatcctccataacctagagacaggatatatattaaaagctgcagagccaaattttcattgaattttacaatcatcagaatgagatcgtagacccttcaatgatgaaaacacacaatgaaaacataaaaagcaggagtaaaatttcccacaatttaaagattcaactaaatgagatgtaaaccttctcactgatccgtgaagcattacgaatggacaagacatgttctactcctccagcaagctctacgggaactttgtatatatgcttccgcgtacgtacataatattttttaaaaaacactagcaagaaggaatatgcaacaaagaacggacagatgggataggcaatgtacaaacaaata

SEQ ID NO: 19559 - DNA, 585 bp, Arabidopsis thaliana
ctggtggtaagcccatttggatgaaacatgcggaagatgcaaaaatcaaagacgaaggagagaaagacgctgcggcaaaagcagcttttgaagctacattcaaaggtgtagaccaaactacacatttgattgaacctgttgcaccggtaccggaatccgcaccggaatctgatagtgattcagatgatgatgatgatgatgaatctgattacttgtctaggaaaccaattggtcctgtggatccgagtaagtctacagcttctggtgctggtattggtggtggaacggcttgtgttccgtctacgtttgttgttgtaactaaggattctgatgggaggaaagttccaaatggtggagctttgattagagttaaagtgtctcctggtgttggtgttggtggtactgatcaagaaggtgtggttaaagatgttggtgatgggagttatgctgttacttatgttgtgcctaagagaggaaactatatggttaatattgaatgcaatgggaatgctatcatgggaagccctttcctgtcttctttaccaaggtaatgaatcttatcgttccattgatgtgcgtttatgt

SEQ ID NO: 19560 - DNA, 615 bp, Arabidopsis thaliana
gatgttgtggcaactacccacattaataacgtggtggtcgaaaatcagcctaccaattaaagtacacatttttatgacgagttgatgacccatcagtgcccattaaataatacgtacgttaaaaaagatgaagaaaagaagattctagcatgcactatcaaatgataaaaagaaacggtaaaaactatgtttttaactgtcagattcactatataaaccacggcgacgacaagtggtatctcatcaaccaaaacaaaacataaaaaacaagtggaagctttaaaacgagagggagagagcaaaaatggcgacgtcgggaacgtacgtgacggaagttccgctaaaaggatcggccgagaaatactacaagaggtggaagaacgagaaccatgtcttccctgatgctatcggccaccacatccaaaatgttaccgttcacgaaggcgaacatgactctcacgggtctatcaggagttggaactacacatggggtatcaattacttatactttctctatatatacaacatattatttacactatatatatctatcacaatattatggtgtatgtgtgaactagggtttcgtagtatatagccaatatgaattatgat

SEQ ID NO: 19561 - DNA, 1545 bp, Arabidopsis thaliana
  unsure (1)..(1545): unsure at all n locations
acaaccctacacatcattaccatgaccaccatctccttattcaaatcagaatcattatcgccgtaaccacttttgtcattttctttttttatatgtcggtaaagaaagaataatgaaataaagaggtgtaagtaagagtcaacaaaataatttaagagcttgtgtgaattgataaaaacactccttttctgttcttggttttatatgaaatttataaacaaactcgagtgattacaaagaacttataaaccacttatgtggcatactaaaatttaacaaaaaaaaatgttttgcgaaaaataagaagattttgttcatcttttttggtaagatgccagtttagctaaagatatttttcatatataaaaatgacaataaacacattacaaaagacaaaccccacacggctctctctagccaaattacttggccacgaccataaacacaaaacaccgcttagcttctaaaatctgaacatcgagaaaaaatgagttggtggtgggctggcgccatcggagctgccaaggtaaatttcaattcaatccttcaaatcatatcctccgatcttcatcttcaactgattgaaaatcatctctttaatttgtgtactcgcagaagaaactcgacgaagatgaaccatcacaaagcttcgagagcgtcgctctcatcatcggcgttactggaatcgtcggaaacagcttggcggagattctccctctttccgacacacccggtggtccatggaaagtctacggcgtcgctcgtcgtcctcgtcctacctggaacgccgatcatccgatcgattacatccagtgcgatgtctccgacgccgaagacacaagatccaagctttcccctttaaccgatgtcacacatgtcttctacgtcacctggaccaatcgtgaatcggaaagtgaaaactgtgaagcaaatggctcaatgctccgtaacgttctccaagcgattatcccatacgcgccaaatctccgacatgtttgtctccagacagggacaaagcactaccttggccctttcaccaacgttgacggacctcgtcacgatccaccgttcactgaggatatgccgagattgcagatccagaatttctattatacccaagaggatattctgtttgaagagatcaagaagatagaaaccgtgacgtggtctatccacagaccaaacatgatctttgggttctctccttatagtttgatgaacattgttgggactctctgtgtctatgcagcgatatgtaagcatgaagggtctccgttgttgtttcatgggagcaagaaagcttgggaagggttcatgacggcttctgacgcggatttgattgcggacgagcagatttgggcggcggttgatccgtatgcgaagaacgaggcgtttaactgcaacaatgctgatatcttcaagtggaagcatctgtggaaagatctagctgagcagtttgggattgaggagtatggatttgaggaanggaagatttgggggtggtggagatgatgaagggacagagagagtgtgggaagagatggt

SEQ ID NO: 19562 - DNA, 1289 bp, Arabidopsis thaliana
ccatatggcctaaccgagtggactgtggagggacttgaccaacgagaagacaattttccaagaaatattgtcaatctagaatcataaagaagtacctggtccttaggctcaaaagtccgagtgaggattttcttgtcgtggtaagcttttgtgcgttctttgtagagctttgagttgtcataggcatgaatttgtatctcatcaagctcattcaactgaataagtctcctttctccagctgatttgatgtcgaaattcaacatcttgactgtccaagctgctttgtgctctaattccactggaagatgacaagctttaccatatagaagatgaaaaggtgtggtcccaagcggagttttgaaagctgtccggtaagcccacagtgcatcatctaacttgtaagatcactcctttttcgctttacccactgttttctcgagaatctctttgatttgcctgttggaaacttcaacttgaccgctcgtttgtggatggtagggagtagcactcgatgctgaactccatactgtaaaagcaatttcgtaagaatcttgttaatgaaatgcttacctccgtcactaatgactatgcgtggcactccaaaatgagggaagatgatacacttgaagagtttcatgacaaccgctgaatcgttcttcggactagctatagcttctacccatttggagacataatccacaactactaggatgtagagattcttgttggaaggtgggatgggtcccatgaaatttataccccaacaatcgaagactttcacttcgaggataaatttttgaggcatctcattacagttgcttatttttccccttctctgacaagggtcacttgcgatatgaatttctgagcatcccgaaacattgtaggccaccaaaagcctgcttgaagaactttggatactgtcttgaaggttgcaaaatgaccaccatgacaaaaaaaaatgtcaaattcttgagtagtctacttcccttggaatgccgaaatactttttaccttaagtgaacggaatgacttaaaattcatacgggatttatttgtctatgtattgttccattcgatcttttaggtcctgcgtcacctcgatagttatgccacaatattcttaaagcttatatgcgatgtatagacttctgcaaccatgacatatttgtctacgttatataaaaataagccagagctgggacaatgtgatagtatatcaggaacctctgttgcagcaatgcatctctcctatacactccatcagaacaatgcttatagggagataa

SEQ ID NO: 19563 - DNA, 1045 bp, Arabidopsis thaliana columbia
tctatgatggatcaaatagcaagtacctatggtggacatacctattatctaatatcaagttctagttagctactctataactagcattaagaacaatcaagataaagaactctacagataacctagcaagggggcaatctactaaatcatctaaatccctaatgagaaaccctaaacctaacaagtgaattactcagacatgatcaaagaaacacaaatcatagtctgaataaggaatcaataatagcaagaaaaagagtaaagaagatcttctccaaagggagtctccacagggttttgctcccgaagtacaaaaaaatagagaatatcctttccaagcttagatctaaacaatgaccctaaaaacctaattatatgtctaaaacacgtgatgggccttcattaaacataggagaaagttctgggccgaatttggaaatcttcaaaacatcaataagttgtgtctcgaaattgccgtcaagtaatggtttcgctcgacacctaagttcattttcgtctccggattgtttctgcagcttaaattctctgttttcctccagaatgttccattatctccaaatgaatcccaaacatgtaaagacctgaaaaggactagaaaagacactagaaataacaaatagactctaaaaactatacctaaaacataattaaaaattgtaaaaagagggttatatcaactcctgcaaacttagcttttgcttgccctcaagcaaaacataaaagccgaacccgtagaagaggtttgaaaacaaaggaactccaaatattctctagtctattgccttgataattctaaccaaatccatatgcctagcagttctaatcaaatcctaaccaatatgtacttctctacaagcttacacaacattctagattccatacctaagttccacaattatatccaccaggctttcatcgtcgggtctcatcaaacaagctaacattcaaaatccttctagactcattcctgtactataccatgataaatcgaccatcctttatatttttttttttgttttctttc

SEQ ID NO: 19564 - DNA, 544 bp, Arabidopsis thaliana
gacttagatggtttattttgattatctttgtattttgctttaccaaaatgattcgactaggtttatgacatttggtacttctatttgttaattcatttctatatcactctttcttttgcattgtgtaattttataaattcttaatatatcgtttgttttctcttagacatcttctaaaccacgctagattcacatttttgactttattaccggttagtcaacgtggacttaaaatcaatttaataacactatataagccaaagttataaacaattaaaactcttggggttagaatgcaaataatgaacaaatcgatgcgtataaatatctcccgataaagccctagaatccaaggaagcgccgagagaaagacagagaagagagtgacaatggtgaaatgtatgaagccaggaaaagccgtgatccttttacaaggacgatacaccggtaaaaaggcggtgatcgtgaaatccttcgatgacggtaccgttgagaagaagtacggtcactgtctcgtcgccggattgaagaagtcccaagcaaa

SEQ ID NO: 19565 - DNA, 649 bp, Arabidopsis thaliana
tgatgatgacgatgacgatgagcagcttcctctttcgctaaccttgggctcaacatcgtattcctctcagatccgtcctgtgaagtcaccggttcctatagctccaccaccggaattccctggacctgtgacaacgtggccaacacctgctgattttctggcgacgcggtctatggtgcctgatccccctccgccgtctcatcagatacctttatggatgagcaactattttcaacagacaccgaatccgcctcagctggttactcatttcttcccgccgtcaggtttagctccaccttcgtcaaatctaactcctccgccggtgaagagaccagtaaccggttccgttcgtatttatagatcacgatcaaccgtaagtaagaaatccgatacgatttctccgccgtttccatgggcgactaatcgccgtggggagatacaaagccttgagtatctcgaatcgaatcagatcacaaccatcaccggagaggtacaatgtcgacactgcgagaaagtgtatcaggttagctacaatctaagggagagattcgctgaggttgtgaagttttatttgacggagaagaggaaaatgagggacagagctcataaggattgggcgtatcagagaacggagatgtgactttgtggg

SEQ ID NO: 19566 - DNA, 517 bp, Arabidopsis thaliana
taacgcccgccagtgtgctctaaagatcccgctgatcatcatggctatccttgcgttcccgatgacgttttttgctcaccgcggcctgactcgcttcgtactgtctggtaaaaacccgggcgaagacatcaccgaggttgtagaagaacactttggtattggcgcaggtaaactgattaccctgcgctagttcccctgctatctactcgatcatgctggtttatagcgtggcaatcactagtaccgttgaaagcttcatgtctcaccatctgggtatgacgccaccgatgcgtgcgattctgtcgctgatcctgatcgtgggtatgatgaccatcgatcgcttcggtgagcagatgatcgttaaagcgatgagtagtctggtattcccgtttgttggcgtactgatgctgctggctctgtacctgatcccgcagtggaacggcgctgcactggaaacgctgtctctggacactgcatctgcaatcggaaacggtctgtggatgaccatgtggctggc

SEQ ID NO: 19567 - DNA, 556 bp, Arabidopsis thaliana
gtaacgtccgccagtgtgctctaaagcagtaaattcagcgacatcgggttttgccccatatggctggttgagctgtcggcaatagcaaacaggtaaattgccgccacgggagcagccacatggtttcgattaacatgccggtttgcgcttcaacggcaatcttcttgcgtaccagaccgtagaaggcaaaactaaatgccagtcccagcgcgataataggtagcgaaccaaaagtccacagctggactaacacgccacatatcgccagaatcaccgccagccattgcatccggcggaatcgctcgccgaggaaaatcatccccagcacaatgttcaccagcgggttaataaagtaaccaaggctcgcttccagcatatggtgattgttcacgcccagataaacagtagccagttgccaccaatcagcacggcagagactgccagcataaaaattttctgtggcgtctgaatcagcgtttttaaataggaccactggcggcaaatgctcatcagcaccaccataaagaaaaacgaccagatcacgcgatcgtcagga

SEQ ID NO: 19568 - DNA, 613 bp, Arabidopsis thaliana
tcggtttctgacaaactcacaacctctctgagcagtttagaacgttctgccaagctcagttcttgaaacttttggaatgatttaacctgcaacgctatcgatttagcgatagattcattgaaatgagggagttgcaagaaaggagcaatgtcttctgaagatgacttccttgcactaagaggaacagcctgcaatcaaacaactataattaggctgaaaaatcttttttttttttggcaaatgtaaagttggaaacatcttaatacctgaacaatgcattgagatagctccattactccaagtgcaggacgtaaccatccacgcccttgttcattgcggggtataacggccatctgtaagaaactcacaatatcatatagtttcgcgttgaaattccctatgcttaagcttgaaacctttttcacatcttatgtaaaattaggagattcaagtcatcatcaactttgtaataacctttattttatgcaaaaaaaataaagactatataagaccttaatcaaatcttcaagcaggcgaggtgcaactctagcacatgcctgaaatcacgttgcagagtcggagcaggactgatgattccgagttactgttctgt

SEQ ID NO: 19569 - DNA, 558 bp, Arabidopsis thaliana columbia
gttaataatattcaacctcataattaagttcgatatcttgttcgatcctatcaagttctggcagaatctgcaaaagcatccgagaaacataaaacaacaaaagttaaacggtgttaagggaattgtcgtaagcactatttgatgatgctcagacaagatagatgtctcgtagagtaagtaacagacaatagttacctcggagatcccatctaaattataactgcgaaaactgtcatgactcaataaggaaccagagaggccaaattctggaaaaccagagaacagctccaaagagacaggagaattgagattgtttgatgtttcagtctgagacatctctgctgccgtgacagaggataaaccgtctctaccactccctctaatgcgactattatttctatttgccaatctctgactcccaactgaagcaacatcgttgtcatcatccaaaatgcagtgtctagcccgtctactatcagaaacagaacctctcggattaaaactacgacgtctcacttcaactggtggaggttctgttacattcttcccctagctgag

SEQ ID NO: 19570 - DNA, 715 bp, Arabidopsis thaliana
ttgcttgaaccaaaaagaagcttgtacaatcatgaaggaaacgcacgatggaaacggaggtaatcattccggcggatgagccctggccctcaaattaaaaaaggacagtcattactggccaattatgctggcggactgcgaggcttacgcagcaaagtgcgaaccatgtcagcgacctggcccgatgaagaatgtgccacctgaaacattgccttcggttacggcgccatacccgtttatccggtgggccatggacatcgtgggaccaattcccccttcaggatctaagaaatttctgttagtcctaactgattatttcaccaagtgggttgaggcacaagcgtactacgaagttaaatcgtcttatgtcgttgcatttatttggaaaaatattatctatcgacatggtcttccctacgagatcgtaacggacaatgggaagtagttcgtctcactcatcaccaggaatttcctcgccaagtggaacattcgcctcagcaattcgactccgcgatatcctcaagggaacggacaaaccaaggccctgagaaaagaaattgggcaaacaagttggaaggcgtgctatggtcataccgacctactccttgaagacctacgtcattatctcctttttccttagtttatggcatcgaggcaatggctccgagcgaggctggaattctaacgttacgttacgagatcacaatgacttcgc

SEQ ID NO: 19571 - DNA, 774 bp, Arabidopsis thaliana
gagtatcgcagtggtctgatcaggagtgatgatgcggaactactcagcaatgtcgacactcggtgactactctatcttaaccttaggcagcatgattgcactgatgtcccttgtcagcagcgagacttcatctgatttaataccattggcaacaagtcgcgtgagatacctgttgagtggagcaggagatgtctcagaaacatccttaagaagagaagtgaggatcttctccatcatggttgtgcacttagcagcatgaatctcctgcttagaacgacgcttcctcggataagggacaagcgtggcataggtagactcgggatgcacaccttatatggtgtagtccggacccagtgtcgatcgacattagaggtgtatcgatcgacaccctcgtgaggaaccgttttggaaaacaatgttccatacggtgtcggtcgacagcaactctgcagcagtgagttctagctcttcttcagtattaacttctttccacacatcatctccatctctgattaagatggcattacagctcttccttgggttaacatcatgattaccaggaagaaagccttcttgtctcttaatggattgggcagtttgagctacctgtacatttagcttcatgaagtgagagcacagattgtcgatctgcccattaagatctgtgtagacagcatcaaacttgccaacaaactccacaacaagcattgtatggctctcaagaatctgtccaagcatggattccattctggtctctgatgaggggggttgtgc

SEQ ID NO: 19572 - DNA, 1506 bp, Arabidopsis thaliana
gtacgagctcgaattcgtacatcatagttcaattaaattattagtactgcaagtatatgggagcaaggaaaggaacaaaaaaaagaaaaagtattgggaagtacactacagcgagttgtgtaaaaaagctcagagacgaaagccagtcacgaaccgattgattccagcaaaatcagagactatcttcaaatcagagaaacagtctttgagatcactggtcatcatgtaatctacgatcatcttgctttgcttctctccattagtctgcatcatcataaacaaataggattaatctttcatggttgatgtgattattagtagatacgcaaacatcttccaaccaaataaacatataatgaaaattgaccaatcaagactttgatctttgagtggcaatcataatcttcttagaacgccaaattcttactgataaagtgaaagcaacaataagcaacaattgtttcttcggactcatacacaagaacgattatcttaaatctcttttcaatactaacatttccggttttagtatcagagacaaagagaaaaacatagtaaacccaaacgattgtatctttctactaaatattttggagaaacagagtgaaaataaggtaggtacctcgaaaacgaaaaagccaccaggttgaagcatccgagaagccccatgacagagatgaaaaagactatcagttccatcaataccaccatccaatgcaagtttcggttcgtgtctaccaacttcagcttgtaggcctggaatgtcatcacttggtatgtatggtggattactcacaagccccacaagttttccttcaagatctttcaaaggctcaaaccaagatccttctctcacttcaatcatcccctggataagtccaatttcatcacaatggcaagaagtaaccaaagctgaagaatctcatacatatatcaaaattcacaaccaccatgagaagaaatcaaactgaaaattcttcaatccacaatatactgcttttatctaccaaatcctctaatccattacaactttgatgttgaaaattcccaattccatgaatacaattggtataatttgtcatgattagctttagcaaaaaaatcaactaacctcaaggctgtatctctgcacattgtggccggcgacgcgatcgccaccggactgagatctgtagctataactctcccacggcttcccaagactttagcaatgccgatcgcaatagcaccacttcctgtcccaagatcagcccaaatatctttcttaaaccattcatctctcgttacaagctcctccaccatatcgacgatcagttccgtctccggtctcggaattagaaccccttcctcaacgcacaacactagatctctccaatgctcgcatccgacgacgtactgaaacggccgacgcttctcgatcctctgcctccataaatcgtaaagctcctccaacgacgctctcaatttcacattcttctcgccgttgtccgcgatttcgcttctatg

SEQ ID NO: 19573 - DNA, 1225 bp, Arabidopsis thaliana
agatgaagaacatcgccaaggatccaactgttcgagaaagagttgagtacactattatgagagatcctgttggtccaggttcagttaagctggcatcatatgtaggcacattggtacgtgaacatgttcctatcacaattgaaacttggaaggatgttagtcaggatatgaaaactgttccctggaaatctatgcaggtaaattcttcttttcagtttcttttttttgattagttatgtaaaggtttatttccatactttgtctgatggtaaatgattgcaggcaaggtttgagcttgatgaagagtttcaaagggttgctgttctaaagcaaatgggcagtctgtggaggtcatacaagtctcggactgtcaaggatattaatctggctcctaataatcagcaaaagatgaatctgagaccaatgaatatttccccaatagaatggcggaaatttgttaaaatcaaaactagcgcacgctttaaggtaatgagttggaattatgaccatttaaaattttatttgtcaattattaacatgtttagttggtaggttgtgagtgataaatacaaagaaaggaggaggaatcagatacctcatactacaagtcgtaaaggaatggtgagattagcagaagacatggttagtaaattgacatgtatgttgtctcttccggtaagaatgcattctcatagactttgaatgatattttccttttgacacagaaacttgaaagtggagatccatcagaagtgacaaggctaaagttctgggtaaagtcccgtaccaaaaaggatggtacgccggtgaacactaatgctgctgaacagattgtaagtaatcactgcaagagtgtgaatgatttcctttcccaatattattagatgacacaaatttcatattctgtagagaaaggcggctgagctggttggaagtgatggtccaccaacgtcagcaaatccagaagaagatcacctctctcaactcttaggaccagacaatccgggaaggctgagagcaatgagtagaggcatgagtaaaacaaaactagcttgcctccaagtcaagagaaagtgcatgactgacatggaagagaagcaagttcttttattgaaaaaggtcaatgagttgcaagatgaacttaccagaatgaagcagagacattgcgcctttggtaactgcagatttcacacattcttagtcagcttattgatgagtcatgttt

SEQ ID NO: 19574 - DNA, 1048 bp, Arabidopsis thaliana
ccccatgttaaaaatccaaaacactacaactagagcagactatataactgaacaagagtttatctacacagacaaagaacacgagtaacaagagaacatgattcacaacagaacctattagttcatgtcaccaaatgctaagttaaacaatcaacaaatgttccacaatagttcatgattcacaacagaacaccatatagaacataacaagagcacacacagtatagatattaacaagattctacacaagtacaagaaatgcagatcctaaatgtctaaaccgaaaacatgctaagttgaacaatcaacaaatgttccagaatagttcatgattcacaacagaacacaatatagaacataacaagagcacagacagtatagaacttaacaagattctacacgagtatagaacaaaggcagatcctaaatgtctaagctgaaaatttgctaagtgcaacagtcaattatgagagcatgattctacacaattatagaactgaacaaggtcattctgaaaacatgcaaagacatctaagtctactatgttccgacaacccataacaaacattcaattccaaaaaccatcattcacaactatgttccacaacaagccattctttataacagaacacgagttatacattacacaggctaagaacacgagaagaaattagaggaagagaacataccactcgttttttggtgtgggaatcggagacaagacacaacaccattgttccctgtttggcactgagagtatcacttgcagagccaccgccgagtcttcttgtagctccagcaacgtcccaagaacttcctcttagaagttgttcccttgagacaaagggtggctgttagctggagtgtctggatttggcgactgaggagaaccttgctgagcaggctctgttggcagtggattgtagtggacctcttcagatagaggcggtggatagttgtatacgtgcgggggggggggggggggccaacctttaaaggccttgttttttagccgggcccatcgcgggaactttgacccttggccccc

SEQ ID NO: 19575 - DNA, 1270 bp, Arabidopsis thaliana
ccttttattacagagttcccaatggttggttcctcaagagcagaaatggagaatttattgaagggaaattataaaatccgcagaggaagaagacaactctaccggaaaattggaaagacaaacattaacctaaagtttagtccaaaatcaatagtttcaagatgcaaaaactcattggttggcaaatttgatgcccttctcgatagaggatttgagttctgccttgagggcttctaagccttccttttcaaagtctgagagtggccctagatctagcacttcctccactccgttctttcccagtcttacctgccaaatcacaaagagacaaggggttaaatgaacatcatgacttatataatcttggtgattttgatatggttaatagtttttggtactcttacctttgaggcgaagaaaggaagctcggtgatggtagattggacgaatgagcattccaccacatttggaacactgttgagtccctttaagcatgcatcagcaaagagtgctccgcatagcttccacagaaagcagatttcataagagaacaatcaaaagacataactcaaagaataccagaaagaggagatagcacaaaacaatttgtgatgtgacaatatcagaaagtgtgtaatggcggtatctttcaaccattgcggaacccaaaaagtgacatttatgaacttacgccattgacaatgtagctgaaccctttccagcttttgcctccacgacttctgtccctccgtcctgggtacgctttgtgagggccctgattaaatcatccgacaagttggcttgagggctagcctatacatacattaaacaaaacactttgagaacaaaaacagaccaaaatgataagcagtatacaagaaagagaaaaggcgataggtaacctgagaaaagagaggaagaatcgtgatgccagcatgaccaccaacaactggaacattaacctctgcatatgcaagcattcgaatctaaacatcagaagctataacaacatataccattaatatcttgtttgaagcagatagataactaagtggtaagtattcagccaaagatcctaggaaaaggccaagaaaagacaataagaggaacctgcaacattgacatccgattttccagcatagaaagtcctagccctgacaacatcaagagtggtgcaccgaataatttcttctcatcataggtaccagcttcttaaaaatctcagctgcaattggaacagtggagttccagggttgctgatcatgttgac

SEQ ID NO: 19576 - DNA, 889 bp, Arabidopsis thaliana
gtcatcactttgcatgtttaggataggtttgcatgcatgttgcaaatttgtgttgatttcaggtgatttggagctgttgacgagctaactggaagaagcggacctgatcatgtcaaaccacaatagaccacttgaccccttggtcgagtaggggacttctcgatttcatctcatcactcgaccccctagcagagtaccaccacgagagatactcgatcacttcactcgaccccctggtcgagtgtcttcacctccaccacctgaccaccactcgatcacaccactctacctggaagtcgagtatcaccatcaccaccactcgaatacctactcgatggcgagcttcagagtcttctccattccgcactcaaccagacactcgagcacaaggaagaaaagaagactcctgctattcactcgacctctcactcgaccacctgggtcgagtacagttcttaatccgtcccaatactcatcgttttgagtattagggttttggaatattttgctataggtagcatgtactttacattttcgaaaacaagtttttatctaggttttattccgcagacgttgtgttctagatctttttgtaatccggatttctctttatttattcagtatttagtatgtagtatttgttcttgatttcgtttattggttttcatcctgttatcattctgctattacactgttgttatcatgttttcatcctgttcaacgtttatgttctctacaatgatgtctgagtagtgaataggtttttaaggatgggttacagtagtgtagaattctcagtatgctaggtggttgagtttgattgatagacccttctggattagttgtcttaatcctattgctttctgatcactggaatttgagccagata

SEQ ID NO: 19577 - DNA, 721 bp, Arabidopsis thaliana
acgtggaaatatgaatatgagtatgaacgtaccccgccagatggaaggtttgtgaatgagcatatctaccaccagagagagttcagaagtgggcctgacaggactacgaggatcagttctaaaactgttctagaggaacatttgcctacgaatgaatacaacaattccagtaatccagtaacggagtactcttctactgggaacagattgaagcgacatggagctgaaccagatagcattgagcgcaaacattcctatgctgattatggggattatgggagttctaaatgtagaaaactttcagatgattgttcccgctctcttcactcggaccactactcacagcattctgctgagagactgtacagagattcatatccatcaaaaaattcatctctggaaaagtatcctagaaagcatcaagacgcatctttccctgccaaggctttttcagacaaacatggacacagcccttcgcgatctgactggtccccacatgaccggtctaggtaccatgaaaacagggatagaagtccatatgctcgggagagatcaccatacatctttgagaagtcttcacatgctcgtaaaagatctcctcgtgaccgccgtcaccatgattatagaagaagtccaagttactctgagtggtcactcatgatcgctctaggcctagtgatcgcagggactatattcctaactttatggaagatcccagagc

SEQ ID NO: 19578 - DNA, 213 bp, Arabidopsis thaliana columbia
tgttgcattttgcaaatcaactacttgaacaaggtaataacaaatattggttgattgtcacatttcaattttttccgactaacaaatcctgttttcatctttggaggctctggataatttcaacacagcagtcatatctccagtgtactatgttatgtttacaacattcaccatcttagctagtatgatcatgttcaaggtaaaagccagttt

SEQ ID NO: 19579 - DNA, 604 bp, Arabidopsis thaliana columbia
ggtatacttggttgtgtcctctgtgttgttggatctacaacgattgttttacatgctcctcacgagcaaggcattgaatccgtcaagcaagtatggcaccttgctaccgaaccaggtatagaacaataaatgtttttgacaaaaagtaagattcttattggactgaaacatactctattgcttgaatgttttaacaaggtttccttgcatattctgctgtggtcttggttgtggtgcttgcattgatcttttactatgagccgcgttatgggaagacgcatatgatagtatatgttgggatttgctctctaatgggctctcttacagtatgttttcatctttttctttagccatcccttagtatatatctctacttgcttaagtaagtgtctcagtatctcttgcgtgttaggttatgagtgttaaagctgtggcgatcgccataaagctgactttttccgggatgaaccaattcaagtacttccacgcatggatcttcatcatagtagtgacatatgttgcattttcaaatcaactacttgaacaaggtaatacagatattggttgattgcacatttcaatttttccgactacaaacctgttt

SEQ ID NO: 19580 - DNA, 875 bp, Arabidopsis thaliana
ttttctctgccatcctaatatagcactcagtgagaacttaaaacctgggagattcaagatcctttgttgtctttgcatctttagcaacttctgccagttgagaatcacaagcatgaagcaggtccatctcaacttgtccagtaacaacataacgactaaacaaaagccacgtaaaacagaggttatgcagcatttgattgattccaagaattacccacgtcttctttatatgttccattaggtcgtcaacttcctcaaccatggacgtcgcatcattagaatcaaaacacgcttctaaaagcaattcataaagcctgagattaaacggagatccatcagcccagtgacaagaatcagagaaagacccatcagatctagttgcaagagacatgaccgctgatctaagactttgcatttgctcattattccttccagtctccaaaggccgatctaaagcaccatgaataatctgtcgcagtcgttgagaactattcgtcttatcaagaggtacacgaggatgcaacaaaagacctgcctcaagaaccttcaatgatctcttcagccaagcatcatattcttgctgatccgtaaaatcagaagactttagctgctgtaacaactctaaaggaagaactactgactcaatcttccttccaacctgaagaacaaacacaaaaacaaaaactcattaacttaattaaagccaaaaacttccacagcactggaccctctagcagttattactaagacacaaatgtcacaacacacattcttatccacaatagttcccaatttaagcaatttaagatctatcccagataagtcaatggcaacatttatatcacaagatgatgaaattgaacatgttttgaact

SEQ ID NO: 19581 - DNA, 497 bp, Arabidopsis thaliana columbia
gatactcacgtcactgttcttgatttctcccacgctgatgcttctccaatacaatgtgcaagtttcaaatctccgaattatggtaatgattcgttttgcggcaagaatcttgctgtgactttgtcaggacaagttttgatcgttatacacagtgggggtgtctacaagatggatcctaaatcattagaatggagcagaaccaattctttaggagacgaagcatttattcttgatctaggaataactgttgcagccaaagatggagttatgaaaaattgcatatatttttatgctgacccgccttatcgacctaggaggaggtttgtacgcaatgctgaaagcggtattagcgtataccatattacaaccaagaaagtggtccaagtgtatcaaccagctcttactgcttcgtctccaatatctttctctactgctcgatggttcttaaatagttgcttcaaacctaaatcaagtcttgtctcttggtaaagtttgga

SEQ ID NO: 19582 - DNA, 521 bp, Arabidopsis thaliana columbia
ccagggaaaggtattctcgctgctgatgaatccacaggaacaatcggaaaacgtttcgtaagcattaacgttgagaacgttgaatcaaacagacgtgctcttcgtgagctcttgttcaccactcctggagctctccaatacatcagtggtatcattctcttcgaagaaacactctaccagaaaactgcttcaggtcttaactctaaaacctcacaagaactttcaccattttctggttcatatatctgttctgatttgtagaagaagttgattctggtgtttctgatgtgtatagaaggatctgtgaagttattgtttatatatcttagtttaggttaattcaatcactatattgaacaatgcttgttcagatcctatactcatgattctagtattgatgtggttggtttctgatacagggaaactatttgttgatgtaatgaaggaagctggagtgcttccaggtattaaagtcgataaaggaaccgttgagctcgctggtacaaatggtgaaacacaac

SEQ ID NO: 19583 - DNA, 1507 bp, Arabidopsis thaliana
catattctgcagaagaaatagacattgcaatactaaccttgtgtttctgcataaccaaacaatctgtactgagttttttcaacaactctggcggaaatctgcaaacatgaattaatatatgagaataatttgaagtctttataaacagaaacctaaaaaaggatgatggaaaagctatgcacctttggaataatgttccatcgttattaacattatcaacaaactggagacttgatgcattatcctctgcatcaaatctttcaagaatgtctctgttctgttacaatgacaaaggattggagaggtttaagaatagaatctgcaaatcccaaagcaaaactatattgttgtattctcagatcctaattcatgaaaactatagctccctggctaccatggagggaaggaagattctttacttaaacagagattccagtactcagcaaaacctagaaagacttcaatctctacacaaggaaagaagaagaagagagtcacctgacttatgataattgacataagctcgaatccgaggcaaatgccatatactgggaaatgctctccagcatcatttctctccaaagctttctgtcagagacatatatattggtattagtattctgtgagcaaacaaataagtggtaaacgaagatgactaacttacagtgaagatttttttgacgatctcgaaataatcatattttttagcccaaccaccagtgaatatcacaccgttgaccaactctagcttctgcagatccaataatgtaattcaccaaaaagataacttaaatcaagcaatccaattcttcagcgcaagattttaaaacataataagacagacctggaagagcacttcttcaggttcgttgtagatgagtgggataacacgagcaccacctgcctcagcgaacttcacatacgaagcagcgatgtacgtcgagctcgtatcattggtcaaccgaccagacgcaccatctccagggtgactcaggataccgatgacaggtctgtagttgaggttcggatccggcgaggagcaaaccggactccgagaaccgtcaaatccggattcactagggagcaaaatcgactcagaagcctccttggccagacctatatcgttccaaagcaagaggaaaaacggtaaacaaatgtaacgccacatctcggagcaagaagaagagtcaatggtttgaaatgagaagtgagggagagagagtgacctgagtaagaattgcgattcagctcttctttatataaacaattgttgtcgatcatctgattcttctgcccaagttgtatatctcaaattactctccttgcacattcttccataaccaatccaccttctttctaaattatttgtaacaccaaaaacgtggatatgtattttattttttattaattacgaatttacctgtcagagtggggcccatgttttcagaataaaaaaatggttctagaagccagcgacgatgatcaccgatacactcaaacctgaaat

SEQ ID NO: 19584 - DNA, 598 bp, Arabidopsis thaliana columbia
tttctcttttatctggttcccctcagatttctttactatcttgttcctcttactttcctctatttctttggtattgccatctagtgagatcttaacatctcacaacttatatggcaccttcctctattttctatattttttcaaccgcataatgaacatgacaccaacaatcagaagtagaaacccaaccaatatccacaggtgtgaaacatagaattaccagatttagcatcagtctgacacatcttgtatggatactaagagagagggtagagtctagcatgattcttgagaataggtagataatcggcaataaatgcaacattgtttacactagtaaattgacatatttagcaataaaaatgtatatataaatgttaataaaaccaataaaagaaatctatttcacatttaatatcatgcgattgttgtaagatgtggtagcttagccgatcttccaaatatgcaagatctagctcatatttttgagcatgtgtagtttaggttcaaaataatatcttagagaaaataaagttggtaattagaatattattagaaatcactcacacacatcgtgtgggtttattggtatcatata

SEQ ID NO: 19585 - DNA, 1427 bp, Arabidopsis thaliana
ctcaaaaaatatttttaaatacaaaatttcgcgcctaataataataggtcacgtacctaagtaccttggaaactcaagtctacatgtatgtatggaccacactggtctgactattgaactaataactttttttttagtcaaaataatcgatattccacttcgattggtgctataaatagagagcagaaccaagcagaaaaggaatcaaaccaaagcagttttctagttctttgaaaaccaaaaagagtacttcaatggctactcattcaaggtttatatacgtgcttcttcttctttcatgcattgtttttgcattgcttgggggtagttgtggagatagtgtggagaataacaatgacgatgatgattgttcttcccggagttggcgtggttgtggtagtttctacggaaaaggtgctaaaagatatggcggtggaggcggaggaggaggtggcggtggaggaggtggtggtgaaggaggtgatgggtatggccatggagaaggatatggtgctggagctggtatgagtggctatggtggtgttgaaggaggtggatgaagaggcggcggagaaggtgatggcagtagtgcaaatggaggttctgggcatggaagtggatccggtgctggtgctggtgttggtgcacaactggtggagtaggaggaggtggaggaggaggtggcggtggcggagaaggaggtggttcaagtggaggatcaggtcatgggagtggttctggagctggagctggtgctggagttggtggatcatctgggggagctgggggaggtggaggaggtggtggcggagaaggcggtggtgcgaatggaggttcaggtcatggaagtggggctggtgctggtgctggagttggaggagcagctggtggagtaggaggagggggaggaggcggtggtggagaaggcggtggtgccaatggaggatcaggtcatggaagcggatccggtgctggtggtggagttagtggagcagcaggtggaggaggaggaggaggaggaggtggtggtagcggtggtagtaaagtcggtggaggatatggtcatggtagtggttttggtggtggagttggctttggaaatagtggaggaggaggtggtggtggtggaggaggtggaggtggaggcggtggtggaaatggatctggttatggaagtggtagtggttacggttctggtatgggaaaaggtagtggtagtggtggcggtggtggtggtggtggtggaggtagcggtggaggcaacggaagcggaagtggaagtggagaaggatatggaatgggaggaggacctgaacaggcaatggaggaggagggggagtgggttttggaatgggcattggatttggtattggcattggaggaggaagtggtggtggtacacttatcaaacgaatcttacgggtgat

SEQ ID NO: 19586 - DNA, 543 bp, Arabidopsis thaliana columbia
  unsure (1)..(543): unsure at all n locations
ctaactttggatacaacagtagtcttagatcaaggttattattaccttcctacgtacactttttccaagaaaacaaaggtgctcagaatagcaacgagaaccatgctgagcgggttaaacgcgctcacaaacacaggccctctctcctttgacgcccatccaataacatagtatgctaaccctgagactagtccctgtagtacaatcaacaatacttcttctctcagcaaaacatacacacaaactggaaaatgtaggaacagattacaagaattgttgtactccgtagattgaagctaaaagcgtcacgtccgggttgattttccagaccgacatgtttttcctttcccatatcaatcccataacagtagcctccaacatccccataatgcacataagagctgttagcgagagtcagctttatattgagccagaatctttgcctgagaaaaacataaagtcctctgtaaccataagtactctgtgatatcacatttttgttcactagagatatattctcaatgttttacntcgagaaatatg

SEQ ID NO: 19587 - DNA, 1439 bp, Arabidopsis thaliana
  unsure (1)..(1439): unsure at all n locations
aaatggatcagaagcaaaatcggattggtctgccaagaacctgttctgttttcgtcgagcatcatggagaatatcgcctacgggaaagaaaatgcaacgcttcaagagattaaagtagcaacagagctagcaaatgcagcaaagttcataaataacttacctcaggggttagatacaaaggtaggagagcacgggacacagctctcgggaggacagaaacagaggatagctattgcaagagctattcttaaagatccgcgggttttgcttctggatgaagcaacaagcgcgctcgatacagaatccgaaagagtggttcaagaggctttagatagagtcatggttaaccggactacggtggtggttgcgcatagattaagcacggtaagaaatgcggatatgattgcagtaattcacagcggaaaaatggtggaaaaaggttcgcattctgagttgttgaaagattccgtgggagcttattcgcagctcattcggtgtcaagagataaacaagggtcatgatgcaaaaccatcagacatggcttcgggatcatctttccggaattcgaatttgaacatatcaagagagggatcggttatcagtggtggaacctcgtcttttggaaatagcagtcgtcatcattctttgaatgtccttggtttattcgctggactagaccttggtagcggtagcaaagagtaggccaagaggaaactggaacgacgagtcaagaaccgctccgaaaagtatcactcacccgaatcgcagctctaaacaaacctgagatcccggttctccttcttggaactgtagtagcagcaatcaatggcgcgattttcccgcttttcgggattctgatttcaagagtcatcgaagcgttcttcaaaccagctgaccaattaaagaaagattcaagattctgggcgattatatttgtagctctgggagtaacttcgttgattgtctcaccgtctcaaatgtatctgtttgcagtagctggaggaaaacttatacgacgaattcagtcaatgtgctttgagaaagcggttcacatggaggttagctggttcgatgagccagagaactcgagtggtacaatgggggcaaggctctcgactgatgcagctttgattagagctctagtaggagatgcattgtctttagcggttcaaaacgctgcatctgctgcgtctggattgattatagcgttcactgcgagttgggaattggcgcttataatcttagtgatgcttcctcttattggtatcaatggctttcttcaagtcaagtttatgaaaggattcagcgccgacgcaaaggtctgttcatggctttctagggtttatttcttgtggatcaagaaacttactctggttttgaataactttgcagtcanagtatgaggaggcaagtcaggtagcgaacgacgcggtggggag

SEQ ID NO: 19588 - DNA, 537 bp, Arabidopsis thaliana columbia
caaactctctccttctcaatccaaatggcgcgactattccctccctcaagctgtcaaattcgtagctaagaacgggactgtgatcgtatgcgccgttagctatccttacttgccgtttctcaacaattggttgattagtgtttctagacagaagcatcaggatcaagttctcgtcatcgctgaggattacgctactctctacaaagttaacgagaaatggcctggtcacgccgttctcattcctccggcgctcgattctcagaccgctcacaaattcggttctcaggtataatacatctacacagagttttcatcttctcgatccaattttatctctagcttccagttcatgaaatctagctgaaaaatggctttgaaatctgagaatccatacttagttttgatcagtgattcacttatcttgaatgttcgttgattagcttgtttagtccctgaggtttcggttttaagctgtgttttggctgatcacatgaataacaaaagatagtgaacttgtggttaatatatatgcttaag

SEQ ID NO: 19589 - DNA, 517 bp, Arabidopsis thaliana columbia
ccaaggtcagaaaaagagcaatatcttacaatctcctgaaaatctctcatccctggaggagtgtagggagagttatcatagtttgaatgctctccaccttcaagaatttcattgaaatcaccacagagaatccatggtttgttacgaatcaacggcgagtcgtgatgagagcgaatatcttcccacaaaatacgtctctcctccacaaaatttgaagcataaataaaagaacaaaagaattcttcttctttaccttccaacagaatcgaacatgttatcatttgactactcttaaataccggagttagtcgagcattgtccctccaaacaacccaaatgcggcctaaccgatgtgattcataattagttatagacgaccaaccactaaaaatagacgaaagtagttcagctgatctgccctccttgactctcgtctccagaagacaaccaaattgcatagaactgtgattccccaacttttgataatggaatgtttagaagatttatttagaccacg

SEQ ID NO: 19590 - DNA, 577 bp, Arabidopsis thaliana
ctctcagtggtttcagtgtcttttcaccaccatatatttctccagatgcgacatagatatatgtgtcgtttgtaaaaccaagagcgcgcacacttaagcccacttcatgaggtgtaagagggcatttcccacgctttctttcttcaagagggtccagatcctgcggtgattggctagtgagattttgtaactccaaacaacttctccacaagaaaataaaatttgggtgtaatggtcttattttatgatattatcaagaatgtaacaagatatataaacatatttcttaatataagaagcgcaaacacacatatcaagtttcagtttattgcataggtagagccgtagaggaataacgcagagaacttggaaaattaagaaagttatgtaaaagaacatattgaactcacaggcaatgtgtcccatcgttttcttatttctgctagctcagctctctctttttcacccccaccaaagtcacaaccagaaaaggctagcatgtcaggctcaaatctgcagttcgtaaaagtatggttacataaataacatggagatgaagatgtcatgcttataacat

SEQ ID NO: 19591 - DNA, 748 bp, Arabidopsis thaliana
atattttattttgttggccaaattaatagttggagaatgaaaggtctatgttattttcgtattaatttaccttaaaacaatcaaacttgttaatcagcttatggctgcttactagttaaggattattctacttatatgtatgaaatggactcaccaattaacttggaacatatgtacaaaactacaaatgttgacacattaaaaatgaaacatatattgcagggatagaagttgtggagaggctatcaacaatgggaatagcagtgaatttggtaacatatttgatggagacaatgcatctcccaagttcaacctctgccaacattgtcactgatttcatgggcacttccttcctcctatgcttgctcggtggttttctcgctgactccttcctcggccgtttcaaaaccatcggcattttctcaaccattcaagctctggtaagactctatctaaaatcttatatatagttttaaaaaggtcattgtgattagttggttttaccatctagtagtagatgcgtctaagagaataaataacctgtatttttctccaagatctccgattctaaaactactattataagcaaattatcaattagagctctattaaaaaaattcacttagaaaaaatcaaacaaaatgttcgctatcaaatctgctaaggtcgttaacttagttggagtcttggagacggttttaatatcttgtatacagggaactggtgctctagcggtacgaactaagct

SEQ ID NO: 19592 - DNA, 523 bp, Arabidopsis thaliana columbia
atatatatatatatatatataaatgtaaacttcctcataagtaaattaacaagaatatatatcaaacaaaatctagaaatatattaatataaataaagctaaacctttacgaagaagaaagactctggtgattgattctccaaagtctaaacctagtaaaagccaagtctcattcctcgggtgaactcaacaaccgacgatggcagaactaaggttatcagaaactcgagacttaactaggatcgaaagaatcggagcacactcacacatacgaggtttaggtctcgactcagtactcgagccacgagccgtatccgaaggaatggttggtcaaatcaaagcacgtaaagccgccggagtaaccctcgagttgatcagagacggcaaaatctcgggtcgggctatacttatagcgggtcaaccggaacggtaaaatcgcaatagcaatgggtatagcaaaatcacttggacaagaaacaccattcactatgattgcaggaagtgagatcttttctttagagat

SEQ ID NO: 19593 - DNA, 557 bp, Arabidopsis thaliana columbia
gtaaagaagctgcacatgactcaatgacgccatggcttctcagctttcgcagccaaactaaccaatttccaagtgaatcaactctcaggtacttacttatataagacaaaaatattgattaggatgtagaatagttgtagtttgattttttttttaattgccatggctaaatgaaattcttatcttgttataaaaacagaattacctgaagttgttcatgtcatacccaatagattctacgagttacagacaactaggacttgggattacttacaacacacttcaaaacatccaaagaatattctaaaccaaactaacatgggagaccaactcatcatcggcgttgttgactccggtaaaccgggattcttgcctcttaaatcgattttttttttttctttctaaagttacactaaactggtttggttttatacttttaaaacaggaatatggccagagtctgaatcattcagtgacaatggtcttggaccaataccaaacgttggaaaggaagttgtgtgtcaaacagagttttacggctcaccgtttgcacagaa

SEQ ID NO: 19594 - DNA, 497 bp, Arabidopsis thaliana
  unsure (1)..(497): unsure at all n locations
nnnnnnnnnnnnnnnnnnnnttaaagtctcatactgcagagaagaggtgtcgatggacactttagcggcgaatttcttgaagttcagcggcagtttttcagaccacagaatggtcatgttcggttccggagacggacccatggtgtacagggtgttcaggaaacggaagctgtttttggtaaccagggtacgaccgtcgaggcccataccaccgatagattcggttgcccagatcgggtcgccagagaacagttcatcgtattccggagtacgcaggaagcgaaccatacgcagtttcatgaccaggtggtcaaccatttcctgcgcttcttgttcggtgatcttgccagctttcaggtcacgttcgatgtacacatccaggaaggtggaggtacgaccgaaggacattgcagcaccgttctgagacttaacagcagccaggtagccgaagtaagtccactggatagcttcctgagcgttggtagccggacagagat

SEQ ID NO: 19595 - DNA, 481 bp, Arabidopsis thaliana columbia
catacttcacagcgccagcgtagaccagtttcaatgtcaagatgacacgcattgcaggtcgtgacaaaggcaggagcggttgggttatgtagatgataaaggaccatcatggacgaatgttttgcccgcctcaatgtatcatactgataatggttcccttgacaaagactcagaaatgcttgtctagtgtcgaacaactcgctttcgagtatttcatctttgtctcttgtatctgcaggaatatccataatctcaacctgcgatatcaataccaccaatattcacaaaactgatcatagacaaagctaaagaccactatcctcaacaagaaaatgcaactcactggatacaacgcatgcttatccttaacattcacaggatgcctttccctgtcttcacgtctctgctcagcctcgtaacacctaacaagaagactgacattttagattcagaggaacttaatcagtaacaaggacacata

SEQ ID NO: 19596 - DNA, 927 bp, Arabidopsis thaliana
tgctaaagcttcttagtttggttcatatatatgtaaacccctagcagcttgcatgatcacctacacttcatgatattttgttaaactgattacttaacttacatgtccgacttgttttggcccttaaagattttggtttgtatcaaaattcctatttcaaaaattgctgacaatgcttgcttttgcatcagaaggcatggtgatgatcgacttctctaatagctgacttgtttctttttgttcttgaactgtgtaatgcaggaagcttctgtgactgaggtctgtgaagcctttaaagtggctagaggtatggttcaagcgctacaggagaacgctggaaggttttcttccatggtttcggtattctgtgagaggcttggatggcatgatttggaaggattagttgccaagttccagaaccgtgtttcatttggtgtcagggctgagattgttgaacttactagcattccatatataaaggtacttgcagcttccaggaacttatagcgaggatatgaagagtgatgttaataaagatggtttttggtgttgaataaatagggttcaagagctagagcgctgtataaagctggcttgcgtacatctcaggcgatagctgaagcgtccatccctgaaattgtcaaagctctttttgaatcttcagcgtgggctgcagaaggtaaattagttttcttagacagtttaaattgatgtatttgttgccttattgagatctctcaagcttatataaacatcgataagttaaatgtttgtcagaaagaatattgtatcatctttcatctaatgtgctcagagttaatatggtgtatcaggtactggacaaagaaggatacacttgggattagccaagaaaatcaagaatggggctcgcaaaattgttcttgagaaagcagaagaggcgagggc

SEQ ID NO: 19597 - DNA, 1324 bp, Arabidopsis thaliana
tcgttcatagctttggccttttcgggacctaatttgcgacgtttctacttaatgggccggtagtcggatcgacgttgagttcgtgtgaggttacctcgaggcttattcctcgtagcttgaccatgcgaacgtgtttttgttttccttgaggaaggttatgagatcctctcgtatcgctggatcgaggtcatgggctatttcaacgcatcatttaggatcttattcgtctatgcagacctgcgttgttaacgattttcgaggtctgcgttgagacgggtcagaggatctaactgttttcatttctgcgagtttatcctctaactttaataccacgggatcgacttttttgatatgctcgtagccacccatgtagcattgtcgggaactgcgttggctgcagtttacgactgctatccccttgttggaggggaatttaatgcattaatggtaagtggatgggacggttttcatggcgtgtagccatggccttcccagtatcgcgttgaaaggagctttcttatcgactacgaggaaggtcatgagttgtctcactcctcttgcgacagtggggagctggatggtttctaaagaaaaggtggtatctccagcgaatccggtaagtggcattttcctgccttgtagcttaaaatcgaggtgtcccatttttttgaaggcgtcattgaagagtacgtcaactgagctccccgtatcgacccttatacgggagagttcgtagttgcttacgtcgattcggataaagagagcgtcatcatgaggtttatcgaggtcagtggtttcgctttcccaaaatgtgatctggtgatcagatcctatcatcgggcttttgccttttgtgtaggaatctactttcctctgatgagttttgatcgagttgatcgagtagttgcagagctgagatcctcccatgataaaatcgatgcgtttcgaggagaggtgctgggttacgtttctaccgaattttgggaggcgtaatgggaacctcgtgtttttcttttgtggggcgggatattcacaagaactttgaccgaccattcagttgttggtcacaattgatgcgttagttttggtgttggaaggatctatttccgtccccgcagacggcgccaaatgtgggttctgaaatccacactagagatttgtaaatagatttgtaagaaaggagggctagatattcacaagaactttgagatttatatcgttaagaacaaatggacttttgaattgataatagaagagcttttacaatgtagaatgagattacaagtgtaaaagtataagtgtaagtgttaagatgaatgaatgt

SEQ ID NO: 19598 - DNA, 877 bp, Arabidopsis thaliana
ccccacgatccactgagattcataacaaatcacttcaatgcccaaagatattaataaataataataacatggggccaatttttggactcgaagctaacttctgaatacagccacactatgggattgtaaaatgcaaaatatcacaggggtataatcgtagttccaagataaactgcctgttcagacatatgaaagatatgctttgtcagagtttcagaacaagtctttcccatgctcaccacttcacctctctctctctttcttctccactgtaacctcccaattcaaaaacaattataaaccaaacttgattaatatatatttcttatcatcatctcttcgaaatgcaagatattcatgatttctccatgaacggagttggtggtgggggaggaggaggagggaggtttttcggtggaggaatcggcggcggaggaggtggtgatcgaaggatgagagctcatcagaacaatatacttaaccatcatcaatctctcaagtgtcctcgttgtaattctcttaacacaaagttctgttactacaacaattacaatctttctcagcctcgtcacttttgcaagaactgtcgtcgttactggactaaaggtggtgttctccgtaacgttcccgtcggaggtggttgccggaaagctaaacgttcgaaaacaaaacaggttccgtcgtcgtcatcagccgacaaaccaacgacgacgcaagatgatcatcacgtggaggagaaatcgagtacaggatctcactctagcagcgagagctcttctctcaccgcttctaactctaccaccgtcccgccgtctccgtcaccgcggcggcggaagttgcttcgtcggttattccaggttttgatatgcctaatatg

SEQ ID NO: 19599 - DNA, 607 bp, Arabidopsis thaliana
ttattaaccggtggaaacatcgttttttcccctgtggtttgaaattgcagctcattatgcaatggtcaactgggatttttgtgctggtattatgtttactccgaagaaaccaatttaatgcagacattgccctgaagttgggaagcagcttctcgctaattccatttgttatagttgttgtaagttaccttctcatacagttgatcttcccttatctcacctgaaagcaagatttgaaggtttcttctgtctcttgcagggtgtctgtacagtattagcaatgctggcaacgttaccacttgctcagcttttcttcttccacattcttctcattaagaaggtttgttcccatgctcagttgctcacagacatgccaagctttgtcctttaactattcaattaaccaaagtaaattttctctaacagggaatcagtacatacgactacatagttgcgcttagggagcaagagcaagaactagaagctggaggcggtcaacagagtcctcaaatgtcaatgatcagctcatttactggactaagcagtgcaagctccttcaatacatttcatcgtggggcatggtgcacacacacgtttgttcttgagg

SEQ ID NO: 19600 - DNA, 536 bp, Arabidopsis thaliana
  unsure (1)..(536): unsure at all n locations
ccatttgaataaatgcactgtttccccaacaataaggctgatgagatagcatcagaagcccacacataaacccatctccacccgttaaaccgatgaactggagatgaccaggagtcccatagaggattgctgagttcgatcagtagcaaaccacaagatgagacccatcagacttcagaccacagaatacagaaccaccttctccataagaaattgcaattgaagacattgaaccaagagctgaagcaagctgccatatactagtgaaaagcacaagctttacaaggagaatccattccgttgctctcgtttcgaacattctcattcttttcaaagtgaacacacacgcttcttagttactgtcttcantttctgagacattccacagagtgactaagagtatgaccgttgattagtaaatagcaaacgagtcacacgaagttcacaaaaactgtggaactgcaatcaagggcatgcaataactaaaagaatagaaattacaaacaatgagagctgaattagtgacgaagaaacaa

SEQ ID NO: 19601 - DNA, 974 bp, Arabidopsis thaliana
cattttgagaaaagaagcttagagagtaagttgttgagtgaagaggaaatccctattccgacttattctctaggagtgcctaaactgcccaataaaccctctgctgaagaagaactcttgacacttgactttgttactgaagaaggaactcagaatataatacaaagcttaggaggatacaattgggaagttaacttacaagatggaagaactgaaccatgcaatctttatacttcaagaaatggttaaaggctactctagttttgaaactgaggattggtcaaaggaagagtgttctgagccatgcgattgaatgacgaaataagagaagcttcatcaccgtttgatcgactaaattcatgaggcttattctagtccgtttgatcaagcgttttaaagagtggagaaccctccaccatccgatcaagtattttgcatttcaagggatactcgatcctttacgcgagctcaaattatttggagaccaaggagtgaggtcgagtgtcccacctgttccccttcacttcattactcgataaacaaaccaattacccatgctcctcactgtttccaatcgactctcctatccatccaaaagagagaaccgaagacaatcgtcctccacccattgaaatagccaaaccatccttcaaaactctctctttcgtcaactcattttcgcaaatactctatctttaacaaagcttcaaaattataattccaaacttcccctatcactcctcaagaatccgttctcctcttcaccatacctcaccaaagttactcgatcattccaaattccatcctcaaaattccaaccggttttataagatcaaatttcatcaccaaaaacggaatactttcccatttgatacctcttggcgagttgtttttgattacattgttgcaactcactacccatctccatggattccagaagaaagtgttcatgtagggctcgacgatcctctgtt

SEQ ID NO: 19602 - DNA, 1698 bp, Arabidopsis thaliana
tgactttctccttagtagtactttaattatgagaatggttaaactcttttaacagaatttttcgtttaatatcaactagtaataccattttccttagtactatcgaacaatgataatctcaaaacaacttttccttttatttttcctcctcttcttcatcttccctctccgacacgcctcaaaccctagtaaatgttcttcttctaattcgagaccacacagatgtggacccttagaagtccccatccgtttccctttctgcgaccatccgttattcaatctcctctgcaccaatctcaataatacagtcctacaacttcctatgtccggaacattttttgtccagtatatcgactacagaaagcaacagatttatatcaacgatcctgaaaactgtttggctaaaaggcttttaaccttcaacatttcaggatcccctttctctcctcgctttgataccttatacacgttcctgacttgtcctaatgagctcgtgttgccgtcttggtatccgtccattccttgcctaagtaattccacctcctccttcttcgccacgtctaattttcgtctcgcagagtctatgcttccttcttgtcagatcgtgaagagaatatatgttccggctgattcgccgtttgcagaaacaagattctcgagctacctcaatcaaagcctcttgttggagtggaactcgcctaattgcagaggttgtgagatagattacttgagatgtggattcaagaacaaagcctcccccgaagtaaaatgcttcggtgctaaaaaatccggtacgaactcaactttttttttcttatcttgttcttcattccttgtgacccaagataactccaataatgggtaaggatgaagaagatgctgtctgttttcgtggaaagcttcaactccaagaaatctttaggttttacgtgttccaagtactattttacccattaagcaagaatcggaaaatcatagttggaaggaactaaatttgaccattgattatttaattgcgttttaagaaaatatcaaatccaatatttcccctcaactatataaggaagtattctcaatatctcattccacacgctataatcaaaatggcgaattacatactttgtttttaagtggttaaactgactcctcaaacattaattggcttggcaggtcatttaagcagggcagtagtagcagtacttatatgtttgtccataataggagcagtcatcctctttgttacttgtatcgctatccggattcacaacacaccgagacgacgacattgggcagtaccagcggcagcgcaaccgtaatgcagcaaccaagagaggttatggccacgaggggtcttgaccaatctacaatagaaaaatacaagacaatggagttgggagaaagtagaaggcctcccgggactaatggtattgtatggtcccatttgtttatcggagtatgctagcaaagagaccgtgcggtgcataccagaatgtgatcattgcttccacagtgaatgtatagatgtgtggcttaagattcatggttcgtgtcctctttgtcggaattctccttctccggctcgtcaagctgtctaagatgttaagacttataaacataaaccatttatgattttttttagaaaatgttaagaatggtaatttgttcattttcaaaaatttgttggtggtaagatatata

SEQ ID NO: 19603 - DNA, 190 bp, Arabidopsis thaliana columbia
ttttttttttaatgttgcataggattcgataaaatatgtgaagcaagtagttttggaggacgatacaaagttgaagggacttccggcacaagattgttccaagattatgctttggcgtctcaaatttcccacaagaacacgtttaagcacctgatttgctttatgtcattctaatctctttcaaattaga

SEQ ID NO: 19604 - DNA, 1297 bp, Arabidopsis thaliana
aacttgtgtaggtcgagcatatgagtcggattgattgatgatgaggcatggctaacgtttttaagaagaattcggtcttgcagcttagaactttcaacttggacattgatttcatctggtttatctggtgctttggctctgagtccccgctttcaaacctcacctccagcttgttcttgattgtatgcttgagggcaagcaaagactaagtttgggggagttgataagtgtgtattttgcatgttttgagcatccatttgtcatcattttagcatcatatcatcactgtttcataccatttctcatcatttgtcatcactttacatgtttaggatagatttgcatgcatgttgcatatttgcgttgatttaaggtaatttagagctgttgacgagctatctggaagaagcgggcatgatcatgttaaaccactcgaccccgcggtcgagtagaggacatcactacttcaccacatcactcgaccccgaggtcgagtgtcttcatcccatcacctgacaatcactcgatcacatcactcaaccccgaggtcgagtgtcttcaccttcattgccagaccactactcgacctcttcactctacctggaagtcgagtatcaccatcaccaccactcgactgcatactcgatgacaagcttcagacccttcttcattccgcactcaaccagacactcgagcacaaggaagaaaaaaagactccagctattcactcgacctcccactcgaccacatgggtcgagtacagttcttaatctgtcccaatacttcgtcgttttaagtattagggtttcagaatatttggctataagtagcatgtacttcacattttcgcaaacaagtttttatctaattttattccgcagaccttgtgttctagaccttttgtaatccggatttctctatatctattcagtatttagtattcagcttttgttcatgatttcgtatactgttgttcattctgatatcatcctgctgttacactgttgttatcatgttttcaacttgttcaacgtttatgctttctgttatgatgtctgagtagtgaataggtttttgaggatgggttagagtagtgtagaattctcagtatgctaggtgattgagtattgattgatagatcccttatggattagttgttcttaatgcctattgccttctgatcaactggaatttgagcccagacatttccgcgcccaaaaggtgttcgatgaaatgtctgaaccactaattcgagagattcgtgaccttgtactaaggtattggttgcagggagcgt

SEQ ID NO: 19605 - DNA, 536 bp, Arabidopsis thaliana columbia
caacaatgtttgcatgaaaacttatttccttagtaggaaaatccttaattctcggaacatccaggacgtatagattgttgatctgctcacctctaccaatcatcagccccttgacatgatcctgtataaggcaataatcctcatcaaatgtcactctatatcccagatctttagtcagctgactgacactcagaagattaaggcgaaaatccggaatgtaaagcacattattcaagacgaggaactcattcagcttcactgtacctatacatgtgatcttaactccaaaaccagtaggtaaggtaactgaactattcatagtttcagataatctcataagcaaattcttatcatgacaaacatgatgagttgctccactgtctattatccaagtttccgaggataaaacattaacagtagctttcaaaacaccaataaaaccaagagtagaggaggagaaagcaataccaggtaatgcggtaatagtagcaccagacgaggaagcaatagaggaattctgcatttgagaattgaag

SEQ ID NO: 19606 - DNA, 613 bp, Arabidopsis thaliana columbia
attaaacaagattctcgagacttacaagtaaattatggtagcgaaaatcacaagaacagcaagcctttgtcttgatccatcttggttgaacaaaaagataacagcagcaagcttgagtatgagaaacaaatcaagctgaaacgcgatctgaaatctcctttccacaacatgcctttgatttgcaggtagctgctgctgctgaccctgcccagcttgcgcttgattctctcccccagtctcagcttcattatttggtctagtcctaaacaaaatataaaaccatcaaccccaaaagcatcaacatcagtcgtatactttctacttttacctcatctgaagccaaaccattactaattttgtcataacaatggtttggattcaactcctaagccaatgagcaaaaggtaccaacttgttggcaaaactatgattcgtctaactaaaccagttacgtatagctatgattcttctctagtgttacactgagacaagctaatccatcaaatccatgggagaattcgaaggagttatttacttacgttggaacattgtaagtgagagggataagataatttgagggaagccagcgacatgtcgccaaattgatgacagg

SEQ ID NO: 19607 - DNA, 277 bp, Arabidopsis thaliana columbia
gaggtggaaagggctgaggaggagaggaagaaaaaaaagaaagatgtgaagttcttgagagatcaaaagagattcacagaacttgaaaaccgtgatccagcaggtgattcaggtggagggacctacggagacagggggagactgtacgatgctgggcggtcactgagagaggcggataatcacgtctttagtatctcaggatctgacgttgtgagaaatgtattaacggagttgaggatagtcatgtacgctctcttgttgaggatgcgaggaaggc

SEQ ID NO: 19608 - DNA, 595 bp, Arabidopsis thaliana columbia
aactttaaaacagaacttgttttacactttaagttacagtaacatcatttgcttggtccttgatcctttacccaacctctttgagcttatttggttcaattgttatttaaacagattgattgaggaatgctgggatacggaaacttttgttagaccaacattttctgagatcatagttcgattggacaagatctttgtacactgctcaaaacagggatggtggaaagatacattcaagttcccttggtaaaaaaactttctcttaacaactctttatcatttatgtttttgcatttctacttccaccttagttaagccgacttcttctaagatcgtgatttttcttatccataacggactagagccaagctctttatatatatcatgattttttctctcacccaaatgtatgatttctcaggaaatagtacataagaacgtgagaggtttctcaggaacacgagaaactcacaattcaagagctctcttctcatgtttacaataaactcgatacaaagaatacaaaaagaaacggccctctccgatttgtcattgtcttatcgtgtaacagtgtacaatgtaaccccaaaaagta

SEQ ID NO: 19609 - DNA, 522 bp, Arabidopsis thaliana columbia
ctgatcctaatttgacgtaagaaataaactgaagagaagtttcaacatacccacttagtatataacttctataaactttcttacatatagatatgcaaaggatttggttgatgtcatgtatcgtgacaatggaccggatttcggagcagcaagtgatggtatgaccgtggagagatatctttcaaatgttcttgttcttttaggctaagaaacattgaccatgaatttagtcactataatagtgcaattttctggcaggtgatggtgacagaaatatggttttaggaaacaaattctttgtcactccttcagactctgtagctatcatcgcagccaatgcacaagaagcaattccatatttccgtgctggtcctaaggtgggattgctttggataaaatgaagttcactatttaattttagatatagtgccgtttaaacttactggatgcaatcttgttctcaggggctggcacgttctatgccgacaagtggtgctcttgatcgtgttgctgagaagttga

SEQ ID NO: 19610 - DNA, 1026 bp, Arabidopsis thaliana
gtctaacacttttcccaagctggcaagactcacacaccatcttggtacttttatttccaacactgatagatttgtttgcagatagcacttgaaggacttgagagtgaggatgccccagtcgttgatgccatatatcttcactcgctccttgctgtcttgaagagtagagtgcttgaactggtgagtccttcaacacataaagtcccttactatgctttccctttgtcaacagtttccttgttgccttatcatagattcgaacatcatcacagtcaaattgaaatacgcagggatagtcattggtgagcttggaaactgacaaaaagggtttagagatatcaggacacacaagaacatcatttaaaggtaagttacctgaagtagaaggaagactgcctaatcatgtgtgtgttatgggaagaaagtttccatttcccaccattactgagtcacttccttcatacagctgagtctgactgagcttgtgaggtgcattggtgatgtgagcagtagagccagagtcacctacccattcaccaccggattgatctgtgacatcagttatcctgagtattgcaagagctgctggcagatcctcatcttggtagctgttgttgaaccgatgccaacacttcaaagcatgatgaccaggtttgccacagatctgacaaatgactctttctccatttgagttttgtgaaatttgttgatgaaaacctctaccacgtgtggagaatgaatctttgctttttccactcccaaatctttagttgccttttcctcggttgttgttgttgttgtagtaaccagaggagtctgatcttgaagcattgaaagccatgtgaggtgaagtttcagtatcaggaccatagctgttcagcctatcagcaaatcctgtcagccttgaaatcacactctcaaaggtaggtggtggctgagtatccattgaaccttctacagatgttttgatagctttggaatctcaccaaatcatgctttagagcacacttatttcaggggatagag

SEQ ID NO: 19611 - DNA, 1363 bp, Arabidopsis thaliana
cgaataagaatttggtcatctattgttgggtttcttgtttgttgtttaaagtcattgattgttctcgtttgttatctaaaatgctataaaatatgaaaagacatatacacatatattgaaaatcaagttcaaatacataaaattatcttgtttctaaacaaacaacttattcaaagaaagttaagttcaactagtgtttggaaacctaaaactatggatcattagatggtggagtacttgggatacgctctgtggctgtggaagagtgagtggccatgaagtccaagaactgcggatcagtttggcggagatacttctcgactaaggacaagtgctcgagcttttccttttgatcagctgtaactcgggctgaatcggcttctcgggcagcaatctcaacatctcgcttctcattatatgcagcctgctcttcaatttgctgctgagcttcctgcagccgttcttctaaggctttaaaggatgagtcttcggggagttgttggcggttggcactgcctagagtgtctttaagacatccaagtccataaggattgcctcttgaatccctttctgtggaatgcaagaaatagagaggaagataattagtgacagaacgcaacattggactctaagactctgaattagactgcaacatcttacctcgagaaagatggctgtatactcatctagtgtgagatcccgaggacgtgaagagccatcagacacagcagaagcagccgcctctcgttcagacaacttctctctcacattatgctcataagttagagcaatcttctccgccttccgatcaacataagtgccatccgaattagtgtgtgtttggatgaacacctcactaagagggacctcttcctgcaaacacagatcacaatcttcataagtcaacagactatagaacttcataacatcacacacagtaaaacgaacatcactaatagacatgagattttgcagaaacacttaccaattcatcttggatttcttggaaaaactttggcctggagtagtggatgtgaggaccgagactgttacggtcagatagacgagctttggaataggtctaactcattttctgtgcttcttctatgtcccattaagcatacattgttccccacagagtttctccaatccatggaggctactctcgacttctccttgcggtgctaaccatgtcctttaagcgcctcttaacaatctcattgaagtagtattggactgtccatgttattaagggatcacagtggtgagttttctacaaaaaaagtgagaagttagtgaacacttgaaagattaaatagtaaagtctaaagaaagttggcgatataccaagaagcttaccgca

SEQ ID NO: 19612 - DNA, 963 bp, Arabidopsis thaliana
taaaaagttggtgtgaaagtgtggctaaaacgaaggtaggattgggtgtgggaaggcgtaagattgttacggtgggggttactatcagttgcggtggcgtgagattacaaacgcttgattcaaagatgagtaaatgcaccatcaaaatgcttaaatggtacgtacctatccaagttaaatgtatatgaaatctattttaatgttcatcttgaaaattagaatattaatgttgtgtttctaatttcaatgcaggattaaattgcactcataagttatgatgattgattgatgtgtctttatttttttggtcgggattcaaaacgtttaaagatgtggcaagagttcagctttacgaaagatcactgtgtatgtatgtattatttgtgtttttcttctcccttcttgttttcacttttcactttcatataaattacgatccaatattctcaatcatttttacatcatctaacaaaggtgcataacatgtgtgtgatcaaaggtacataaaaatgacacaagcacatgaattttgtaaataggcaaagtaaccaataagggtcataacaagagtgtaaataattgaatgagaaaagaggagcccaaacatgttgtagcacaaactgcagtaccaaatgtagttggccactgacttatttgattcagcataaaagcataaacccaatctaagtgtagaagaagaaaaaaaaaaagagtttggctaagcccctatagccatttatccttcccaccggatgttgaaaggagataaataaagcccccctaactttgttgaacttctcttctggctacaaaaatagaagtgcgctttcttgacggcattgagatatcaaatgactcagtctgatatcctaaactccactcctaaaacgtctttcaccatctcatatgtcacaaatgcaatcgcaatcgatggtacacctacagaagaaacacgaacaacac

SEQ ID NO: 19613 - DNA, 1472 bp, Arabidopsis thaliana
ctcttactgtcggactaaacatcggatgcatcgataccaaaccggtcaagttttgcgccagcttccttaaaccggtcccatccggatgaaccacatatatattcatcaacaacgtaccggaaattcccggttggatgcaaacacaatccaattaccatcaggtgaccaagtagctatcgtatcgttccagtttccgttcgttaaccggaacaaaccaccggattcacctttctctgcgtccattatgtaaaggtttttagtaccggaccgcgcagaacggaacacgatccgtttaccgtcaggtgatggccacggaaaagcgttgttttcaccggtagtcgttagttttttaacggcggttgctggactaggtgcatcgacgtttatggcgagaatatcgatttgagactttcctggagctaaagctggacctgagcttgtgtagacgattccatgtcgaataggatcccaaactgttccaaatcccatttgtggaagcaatttgacgtagacctgaaccatctgggttcaccacgaaaacgcctgtgaaagagacgaacgcgaatctgtcaccttccggcgagatagacgggaacgcaccgtcgaatctgaagagagagaggtcgtttgaagttgttttgaggctttggaggagattccgaggagttttacgtccagttgcgtcacctctgcagctatggtatccgactcgggacgagtcaggggaaagaaacgggttaaagtgatgactcttcggcgagactaaacgagtcaactcgacgaactcgttcttctttaaatcgaaaagctccacgtggcggatttctgatccaggcctccttgtagccaccgcgatgaagttgttattgtttggtgacgtggcgggtgtgaaagcgtgaagacccggtggtgtgactctttgaatcgtaaccgatttggtggtaaccggtccggttttgggtaaaatcgctcggtacacgctgatccaaccgtcgtcgcttttccggtggaaatacagagtcgagtcatcgacccatctcggccacccgccttgctcgaccaccttgactcgctgagttccatcctgagtcaggaaaacgtagacgtctgaactaatctctttctctaccatgctccaagtccagcctttctctccaaacgaagccacggcagtccacttcccagacggagacacagccggagaaaagtcagcgatacccagtggtgtaagccgccgagtcgacttagttcgtaactcagtcgagtaaacagcggcccaactcgccatgggcttacccggattctcatgtgtcgacacgtggacaagatagccgtttgttaaaacaggcgtgtctttcatggaatttacattcataccactctgttgttcctcgccggaaaataacggaacctgaattctagatccaacgttatcgctgtgaacgacgtcgtagtttaagcggggatcctct

SEQ ID NO: 19614 - DNA, 497 bp, Arabidopsis thaliana
tggaagctcgaaggcgtcttactttcttttcaaattcactattcatggacatgcctcctgcacccaagatccgcaacatgctttccttctcgtaggttccagtcacgatggacatcttctcgtaggcttactatatcttaacatcttccattttgttttttcatagggtccttacaccatacttttcagaggatgttcttttctccatatttggcttagaacagcaaaatgaagatggagtttctatactcttttacttgcagaagatcttcccaggtttcacttttccatctgttttaattttttcatatggtactgttactttgtttgagctatcagctgagtccatggcttacatcagatgaatggacaaactttctggaacgagttaaatgtggcaacgaagaagaactaagagcaagagaggatttggaagaggagcttcgtctttgggcatcttacagaggccaaactctgactagaactggtagacttta

SEQ ID NO: 19615 - DNA, 587 bp, Arabidopsis thaliana
tgttccatacagtaagctattcccattacgattctcagtctcattggccagtccaaatgctctgcgtcttggtctgcaacataatattacagttacaagtttaaaaaatagatgggagggactgagtctgttggaagaagtggcattactactactcaccgtgcagatgctcgaagagggatccattaggagcgtattcgaaaactagcattcggttgaatggttcgtcttcatggcaatatccgattacattgaggaagttcttgtggttcacttgagataacctctgtatctgcattgcatgatttgtatgtgttttaaagaagaggagaaagaatgcagaaagaggtttctgatgttaccttttcttggaactgtgtttcgtgatcctctgaccagtcttggagggatccagatgcaactgctagaacggcaatttcagagccggtggagagagttcctttgtaaatggtggcgtctgaggatgtggagcctatgatgttactgaaatcttcacaggcagtttctagttctgctagcttcagcttgggaacaccttcataagtcataataaatacactaaactc

SEQ ID NO: 19616 - DNA, 558 bp, Arabidopsis thaliana columbia
tatatatttcatcttactataaattttgttgctacctttatatattttcaactcatttttaattatactatgaatgatatggttaataaatataagaggtgacaaaagctaatcacaacattataatatctcattgaacaatatcttggttcatatttttaatttcctaataggttctatattgatgggaagccaatcagagaattcaagaacttggaagtattgggtgtggcttatccaaagaaccaacccatgagaatgtatggaagtctatggaacgcagacgattgggccacgaggggagggctggtaaagacaaactggtcacagggaccattcgtagcctctttcatgaactacaactccgagaatgcttgtgtttggtccatcgttaatggaaccacaactacttctccttgtagccccggtgactcgacttcttcttcttcgagcagtactagcgagtggttttcgcagagagggatggattcttcaagcaagaaagttcttagatgggttcagaggaagttcatggtttacaattattgtaaggacaag

SEQ ID NO: 19617 - DNA, 563 bp, Arabidopsis thaliana columbia
taaccaaaaaccaacaacaaacactatacagagtcaaatacacaaagtaaacagaattttctgccctagattttttcatacatttttcattatatttcaacagcaacctagacaattaacatatataatctgaagattataccttccaacgactttcgctagggtttgaatgtaacaatcaatcatctgctgcttagtcgcgccttccccgccaggtttatccataacaataagccagtgctcataatcgcatcccggaaacaaaggagccatctccgtcggaggccgatcactaaagttagagccagagttaagcggcgagtaagtagaacctgaccggttagctccacatcgaattgagaagaactgggtcgaacaacctaaccgagatccaccgtagtgaacagaggaaggaatctgaggaggagccataagagtgacattagagaggagagcgcgcgtgaggtggcgcgtgccagacaaaggcaaagccattgtagggcgactgaggaagaaagacgaaggtaatggaggtttagagtaaagtggatagggttttggtt

SEQ ID NO: 19618 - DNA, 588 bp, Arabidopsis thaliana columbia
ctgagtgagtccgacgcaggcatcgacaaaatctccttcaatgaaatcagtggacaaaatctgtaacttatctccatatcccttggaagcacactgagatataaaaagcctagcgtgttttctgatccgatcagtaacctgtttaacccacacaaccggattatctgcttgcggcgtaaccgtgttctcaacccggtagaagaatttcctagaagatatcggttgctgctcactcagatgcttcaaattgctctgaaatttcgtccatggaagatccgtatcgatccaattatcttttagataatctgagttccagagaattccaccacggctcggcttcggagattctctaggtttccagatgcaaataaccgttttcggcaaaatctctgataccggcttgttgaacaagttatcgtcttgatgtatcaagaattgacctaatttatcaaccaagtaagtctcgaattcaaaagggtctttctttccaaactcggtccttatctccaagattatgatctcagattgggtctcggacacaaatctgatgacgtcattgaggacgacatcaacgttgtacgaagaaag

SEQ ID NO: 19619 - DNA, 559 bp, Arabidopsis thaliana columbia
gttgaattatttggggaccttactggtatgtttatcttagagaattctttgttaaaggacgaactattagacgagataataagcaatttgcgccatggtgacaagtttccaagtcccaaatctggtggaaagtctccaaagtccactagtggtgatggaattgtcactccaccccctaaggctgcgtcccaaaaggacatagcagatgagggacaaattagtgaccccgcgaagaacctcgaccccaagattgtccctgagagacaaagtaatatgccctcgcgaatcgctgattcgtcaagcaagaaccctgccccaagtggacagactcatgctcaactcttgaatgcattgcagcagcaagcctggtctaattatgggggattgtctgaagttattaagaacatcaaccaatctcatgcatcttcctctggtcctccgcaggctggaaagtttggttctacttgttcggatccttctggtggtccatcgtcctcgaaatcctcgagtgatcacaatgtaagtttaatggtttggcatctattacttatcgttagaa

SEQ ID NO: 19620 - DNA, 1246 bp, Arabidopsis thaliana
ccaaaaacatacaagaagcatgttacatgtttacgaagccattcaagagtcaataataaggtgtcttgtagatgtatggtggtggtggagatttgtaggttatcttcggagaaggagaatagtatggtggaggtggtggggagttatagatgtatggtggcggtggagatttgtactctaccttaggaaaaggagagtagtaaggtggaggtggtggtgagttgtatacgtatggtggtggtggagatttgtagtttaccgttggagatggagaatagtacggtggaggtggtggtgagttgtatacatatggaggtggaagtgagttgtatacgtatggtggtggtggagacttatagtctacccttggtgaaggagaataatatgttggaggtggtggagagctgtaaacatatggtggtggtggagacttatagtcaatcttaggagaaggagagtagtatgagggaggtgggggagagttgtagatgtatggtggtggtggagatttgaattcaaccttaggagaaggggagtacgggggaggtggtggagagctgtagacgtacggtggtggtggagatttgtagttaaccttaggagaaggggagtagtatgggggaggtggtggagagctgtagacatatggtgctggtggagatttgtatccaaccttaggagaaggggagtagtatggaggaggtggtggaaaactgtagacgtatggtggtggtggagatttgtactctaccttaggagaaggggagtagtatggaggaggtggtggagagctgtagacatatggtggtggtggagatttgtagtcaaccttaggagaaggggagtagtaagggggaggtggtggggagctgtagatgtatggtggtggtggagagttgtagattaccttcggagaaggagaataatatgttagaggtggcagagagctataaacgtatggtggcggcggagatttgtactctaccttaggagaaggggagtaatatagttgaggtggtgagaaggtgtagacggatggtggtggtggagacttgatgtctagtttaggaaaaggaaagtaatatggtagaggtgtcggggaatcgtagacatttggctctgggtgtggtgtgtacttaggctcttgtcttctatattgtggtggtgggggtgggggtgattctgagagataaggagaatagtttttaggtggataaggggaagtgtattgtggtgttgaagaggg

SEQ ID NO: 19621 - DNA, 731 bp, Arabidopsis thaliana columbia
gtaactatgactcattctcggtagccaaatgccacggttagaatttgttaggggttagatttgggcttgcttggcccaaagcccaaatccaaatcaaaggcctaagcagaatgttaagtcaagagggtaggctcgtcaaagccctagaggagtgccctatgcgcagagtactataaatacggaatagcatgtcctgtcaaaaaggatctggatccggcttgacacgcagagacaaagagctctcatccacttgcccgtctcaaacagctcgtcagcttgcccgtctcaaacagctcgtcaacttgcccgtctcgaacagctcgtcagcttgcccgtctcgaacagctcgtcagcttgcccgtctcgaacagctcgtcagcttgcccgtctcgaacagctcgtcagcttgtccgtctcaaacagctcgtcagcttgcccgtctcaaacagctcgccagttcgcccgatcgaagtatctcgtccactcgcccgtcccgagtagctcgtttacttgtccgtccgaagtgtctcgccgacttgcccgcccgaagtaacttacctactcacacgtttcaagaagctgctcagctcatcaccttcccgccggatcgtctcgaaactgcctaactcaacatacgacataccttcagtaatggcctagctcgtttattacgatataaactacgtatggcttgatccctttcaaagggtacgtaggcagctttttacaag

SEQ ID NO: 19622 - DNA, 606 bp, Arabidopsis thaliana columbia
ctctcagagcatgcctgacaattagagagagctaaagtttaaatcaaagatttcaagggaaaattaaccaaactcctctcaacatcaaagaagttcaaaacgataaagccattgctctggttagcaaagaaagatgtgaattcacattggaatggtctagagaagaaaaccatccagatgatcaaaaagaagattacttccaagaaaggtccattgagtacaaattagagtcctgccaagagggcatgatgaatttgatgttgtatctactaaggaaggagaggagacgttaattctaatctatcaccctccttaagtctaataagtgtgaggagtcaagttagagacataaaacaaactcacttgggaggaagtcccatgactatccctatatatggtttttattttcttgttacttttgttttgttttggttgtcttattggttctcaggaaatgaatagcaattggagtaatcaacagagatgcgagcaagtggttggtataaagttttccaaaattttcaaaaacacgtctttcgcaacgtcgctagaaaagctcgagagtgcgatctaatggttttgggataatatcttcgcaacaacaat

SEQ ID NO: 19623 - DNA, 573 bp, Arabidopsis thaliana
agactgagatggatgaattatttgagccctaatgtgaacaaaggcaatttcactgaacaagaagaagacctcattattcgtctccacaagctcctcggcaataggtacataactttatgttactacaatattatacaccatgtctttttatttaatcgatcgttaactgattttttctttcgtcaaatatttgaagtggtggttttaaacaaagatttggccggttaagttgatttttaaaaatctaattgaaggattttcttacttgcaaatgtaaaaataaagagagttgacaagtaaagactgttttatttcaattaaactatgtgttcgtggattatttcacatttcaaaaggtgttttcttcacaaaataaatcttaaaaataatcctttgaacttaaaatatgttcaaaattttcaagttgatatatttttctgaagaagaaaagagttgcacaagataaaagtttgtcttctcttcaatgaaactcatccgatgtgttggtgggttattcaatttaaaaggtgttcctccaaaacaaatcttaagagtacttttgacttaaaaatg

SEQ ID NO: 19624 - DNA, 762 bp, Arabidopsis thaliana
gaatcgaattccaaaagactcaaagagctataagatattgtctacttgatctagataggattcaagaaccatataaataactctttgaactgatcaagtatttagaagtaaattgatatagtctaataatagattggattcataattatgaagagaccaaattgatgtgtaaggataaaccttatcagcagcagatgcagaagcttcaagctgacaattcctttcttccagtctcttctgcaatttacaaatctccatttccatattctttccccttttctctgcttcctgaacaaacaaacaaacaacagaaataaaccaaatcattcatttcaatctgattcaattattacaaaacttagaaaaccagcaaccaaataatatttgaccccaccatttaattacatgaacataaggaagagaatcactcagagaataaatgggattccttcaaaaaaaaaaaagacttacttttctagtaatggtctctttaagaaaagattgttcttgagaaaccaaacggcccctcacttgcttcagctccgtagccagagacaccacgtttcgccggaaactctctttcttctcatccaaatctctcagaagtggatccaccgtcgttttttcagaataagacatccagattcggctaattcagctcttgcatggaggcaatcacaaatctcaaaactctgaagatgaggagaagaaacgagactaaaaattagtgtatctttttgcgggtgcatgtgaacaatggta

SEQ ID NO: 19625 - DNA, 566 bp, Arabidopsis thaliana columbia
  unsure (1)..(566): unsure at all n locations
taacctcaggatcatagcatgaacgtgtggcgcatgggtcgagagatgagttgataaccggctatagcctgtaaaaatctcggtcaacataatctgtgtttttttttgggtttttgtctgctttttagttttttcccagcaaaaagagtgaaaaagagaaaatctttgggtccaaaccanaagaaacgttccctttttttaatttgtctctttgctttaataatttccttctcaccgaaacacacaccacaaccaattctcttctccttcttcctctttcacaaattcgtcatctgggtattcttaaatttctcacaaattcatttacttttttgttctgttccgagatttcaaggttcactatcgattctgaaactcttggaacaatccagattcttggttagcaggtggggaagcattaatcatgtatttatgatacactgctccattattattacgagagagttgaaagtttcctttttgactcgtttttaaaggcaaggaagaagaaagactttgtttttaaaatgccaatgtttcagccttctaagaacggtgggtttgat

SEQ ID NO: 19626 - DNA, 1546 bp, Arabidopsis thaliana
tcagagcttgtgagacattcccgtggggacgtttttcctttgagaagtgtatggaaggggtgcggagagtaatgaagaacatgaaaggtgtggtgaaacccaaggcacagactgctttttatggatttattactccaggtaagtagtcgagtaaattatatgagtgggcaagatttcgttaattgtgaaccttccatttacttttatgtttttgtgtctagattcttacatttgagtgcattccgcatcttgggaagagatttagagaagctgtacctgcagacaaggaatgtccaagaatgtgcaagcacaagttcagtgaaagttgcatgaagggatttactttggaagaaataaatgaagcttttggagatataacagttagctttgttctcttgaaatctatgtttataatctttgtggtgtttgaaatatatgtttacttgacaggatatttcaagcatcttggaacctgatatggatgagagaaagatgttgtcacgcgttgtagagaagcatgttgatgatggtattggatatatcgatccaattgttgatagctggagagagaggcttatcgtagagaagaagaagattttttggcgtagtctctaccaagcagacattgatggtagacgtattgaaactgttgatgatggtccagctgtacctgaaatccctgggacatctattctctcgttccaggaagctatggagaaaggatttgacaagctcatggacaagcttgctttgatggatagcgaaatcaagcggatttgtgtgagagtacaaggaatagaggaatatgtggcagatcagcttgagaaagaggcagaaaaagcctgataataggtttttagtcaattatcctataacaccaatcatgtcgttgtagtattttaggttgtcaatccaaatgggtgtgatgctaacaatcaagatgcaatcagagttcacagagtcaagccaagcaataaaaggttttggtgtgttctagcagtcctaagtgaacatgcaaaaaatagaaatttaagtagaacagtaaaaacactcgaccaacacagcttgttgccaagcactgggtgtggtcgattgacaggtcgagtaacagacagaaaatgtaacagagatattcgactgcacagtctgttgccaaacaactgggtggtcgagtataaggtcgagtaacaggagaaaaatacaaaaactaagcatcaggtaacaagatgcagtaaacaatagcagagttaacaaagaaatcaattagataaagaattcccgaggatggggtaattgagtagttttgtttcctcagtttacaggtgattgacatgctcaataaattatccctagacaacaagttcgataaccaaatctaagtgccaccgcaacatagaccctcaagttaaaccagtcccagactcaatcaccattaacgagagctaacctaacaggcattacgaatcaacaagttaaagccaaaacgctccatgcaaccaacacattggtacagagccacgaatctctggaattattggttcagaca

SEQ ID NO: 19627 - DNA, 520 bp, Arabidopsis thaliana
taacgtccgccagtgtgctctaaagatcgccttcacgccgactgaataaccgacgtgggtccagccgacgcgcaggaaaaagataagcaggtaaacggcgaaaaatagaatcggccccagcaggtttccctggctggcaaatgatgagcaaattcccgccataatcggcaacaaagtaaaccagaaaatcgcatcgccaatcccggcgattgggccaaacagtgccactttgaggcctttaatggtgtcgcggttttctcctttttcttccatcgaaattaataaccccatcaggaatccgaccagattcgggtgggtattaatgaattcgaggttatctttcatcgccgcgcttaagcccggtttgtcgtccttataaatctttttcaggatcggcaacatcgcccaggtaaaaccgcccgcctgcatcctttcgtagttaaagctcgcttgcagcagcgacgaacgaaagcccagacgggtgatatcttttttactgatttcagacccattgctgtag

SEQ ID NO: 19628 - DNA, 492 bp, Arabidopsis thaliana
cgccagtgtgctctaaaataaggctgataattttatttttattggcagcactgtcatttattggtctttttttcatcattaactatcaactggtatcggagcgcgcggtaaaacgtgccgatagccgctttgaacttattcagaaaaacgttggctatttctttaaagatattgaacgttcggccctgacattaaaggactcactgtatttattaaaaaatacagaggagattcaacgcgccgtgattcttaaaatggaaatgatgccatttttagactcggtgggactggtacttgatgataataaatattatcttttttcgcggagggcgaatgataaaatcgttgtttatcatcaggaacaagtaaatggaccgcttgtcgacgagtcagggcgggttatttttgccgattttaacccatcgaaacgaccgtggtcggtggcttcagatgactctaacaacagctggaatccggcatacaattgctttg

SEQ ID NO: 19629 - DNA, 734 bp, Arabidopsis thaliana
cgtaagcattcactgacttcccctgttatggaaaaggaacagaggattcattggtaactaaagagagaaagattactatatgacagaaatgggagtgttacttgatacttacgacaagtgtcttgccatttccgagaacaactttggtgacaaacccacggttagtggtactggctgcaacagttaagatccacggcgctacgcccgatactgagattggttttggaccgctgttaccggcggaattcacagtgagaacccctttggccatagcgtgaaaagccccgatcgcaatcgggtcattttggaacatggacgcagttttatctccgatagagatggtgatgaggtctactccatcagcaatcgcgtcatcgaatgcagacagtagagcttccgaactacaccctgtcggggtgcagactttgtaagcggctactctagaggctggaacaccacctcttacggttccattgccgattccaaagaagcttgcgtccacaactgcgtttccagccgccgtggacgcagtgtgtgtaccgtgtccgtccatgtccctagtaccttcgcttgtgtagtctcttgccccaatcaacttgctgaaatattattataaacagatcaacaacattagctttcctttttcacaacttatgttaacctcgaccaacagtactactctttttttatcagaataaaaaacaacaattttttttttttttggtagaaaacaa

SEQ ID NO: 19630 - DNA, 1484 bp, Arabidopsis thaliana
gaactccatactgaaaaagcaattttgcaagaatcttgttaatgaaatgcttacctccgtccgtgatgactatgcgtggcactcaaaaacgaggaaatatgatagacttgaagagtttcatgacactgctgaatcgttcttcgggctagctatagcctctacccactttggagacataatcgactgcgacaaggatgtagagattcttgtttgatggtgggaagggtcccatgaaatctataccccaacaatcgaagacttcaacttcgaggataaatttctgaggcatctcattacgattgctgatctttccccttctctgacaaggatcacactgcgatatgaactttggatactgtcttgaaggttggaaaatgaccaccatatctagggctgtgataatgcgatagtatatcaggaacctctgtcgcagcaatgcatctcctataaactccatcagaacaatgcttatagagataaggttcatcccaataatatcgcataatctctcctaggaatctcttcttgttgtaatctgttaaattatccggttccaaatctgcagctaggtaattaacgatgtcaacataccatgggtagtccttctcgaccgttgtggtggcgcaattctcagttggtgaccaatttcttgtattatcaagagggtgtcgatcgacaatttcagtggtgccgatcgacaccatcgcgcaactacgaataacaacttcctctgaaaagtgagtgtcaatcgacatagaaagggtgtcgatcgacactgaagctcgattctgcaacttatcacatttgtagtaatcttctacaactatatcaatcatgtatatgttctcctcaagcaagaaatcattaatatggacatcatcatcgatcctaatgcgtgacaaatgatctgctacaccattctcaactcctttcttatctcttacctcgatgtcaaattcctgaagaagcaaaatccatctcaaaagtcttggcttagcatctttcttttgcatcaaatacttcaaggcagcatgatctatgtaaacaataaccttggatccaacaagataagatctgaatttctcgaaagcaaacaccactgctaacaactcctgatctgtagttgcattattcctttgagcataatcaagtgtcctacttgcatagtagatggcatgaagtttcttatccttcctctttcctagaacagccccaactgcagaatcactagcatcacacattacctcaaaacgtagatcccagtctggtggttgaacaattggtgcgcttatcaaggcttgttttatctgctgaaaggcatcatgacactcttgtgtaaactcgaattttgacttctttacagagtagagcagtcagtggtcttgcgattttgctgaagtctttgatgaatcttctatagaaacaagcatgtccaaagaaactcctaactgctttaacattatcgggtgcttgaagacttgtca

SEQ ID NO: 19631 - DNA, 751 bp, Arabidopsis thaliana columbia
ttcaatccgcagtcgacaagaaagaatatagcagaaccttgctagttgacaatggcagcgccgaaggggcaaaatctgctggtgcctacagacccattcctcaccgcgaaggccatagcggccagtcatcccgcagagaacgatcaccgcgccgcgaatcacctcggcctgcctcccgaactagactaagcagcgagccgcttgctgacctgattcggaaatagagagacagatcaacccggggtagctcctcccccaaaagagataagacgagagcccgaactgatcgctctcctcggccatcgccaccaccccgctctatgggccctcgtcctccagtcaccgtatctcctttgtctggatccagaggtgaaaaggacgatcagagtgcaaacccccggtgagaagaagctgaggtccgagatgccggaactaaggctgtttttgttcctcagaccaagtcgttcacgggttagaaattaccttttatttttgtttccggccttatcatttcgattaattgacttaacgctccttgcctggtccaaccctttctttattctaacagcgatgaaaacagagggaaacgtctagctggtgcttcaaaacttgaaaagacaccatcctgtcagcctttgataggtggcgtcctgcaattcgcaagcaattcctacaccatgtccatcactcatctcgggttagttctcatcactcataataactcacaacatgctttagagcacactggcgg

SEQ ID NO: 19632 - DNA, 525 bp, Arabidopsis thaliana columbia
tcggataaccgtaaaatggaagcttgatctcagtgtcagaaccttgctcggaatatcctgcagacgcaagcggacaattagtatggcatgtcaaaggaaataactatggaaagtaattcattgctacaaattgaataaaacaaaatcaccaggtaaatccccatttgaatctgttcctttgtggtcatatccatttgtagggttttccgtattagttacaccagaaacctcaacattatctaatagaccatcctccacaggtaatcgaagaaaatgaagaatgcattgagcttttgacttggaaccaacatgatcagcaatttgaacccaattttcattgtagagttccacagcttcaagaagcaagagagtttcctgatcagtccaattgtctccatcttgatcgccataaaatttcattggatccactcttacaaagtcaagacaagaatgtccaacaacaaatcttccatggtgaaaacaatcacagcataagagtatatcccctgtaaagtagagatgaag

SEQ ID NO: 19633 - DNA, 577 bp, Arabidopsis thaliana columbia
tgatgactcagtttaaagttgcagtttattaatgttttttgaatatttttcgagtcttgaatgttgtttgaatgctataacagtgatgaagaaccctgcgaatctagcgagatcaggcgaatccgaaggtggctcccgtgattgcaaagatgatgggcaaatttgcaggacctcagtaaacaaaacaagaagcttgcttttctttgccaatttctgtgtttaattgcgtgagataagagatatgttggagaacttttgttttcttttatgttgtcgttgcagaggaactttaacaggaacaaaactcttttctcttcgttagtaatctaccctcttctcgtttttcacttcctgagttagaagatttatattgaaagattcgtataagtataacacttccaacattgtttttatgcgtacattgtcctcatgcagacgaattgtgtctgtcagacacatcaatccatacgatataagagaagaatatgtaatttatttgtgaatctgacagacacagcaatcacagaaaaatatctatgggtggacttaaagggccatttttagtgtgaagaagaag

SEQ ID NO: 19634 - DNA, 862 bp, Arabidopsis thaliana columbia
gaatggcaatcttctttagactttgtgtctaggagtgtgcaggccattgcctcgggttatcatgtgttcgtaaaaggccttacttaagtagttaggagcatgtttaggcatagtagtttcgctgcatatagttgctagttgcattgcatttgattgcctgtttgctttttgtttgggggttgggttgggttttatttttagagatcccagatttattgagtaatactagattactcagacactactttttttttacaggcaacctttagtaggaagaccttagggggcgaaggatgttagactaaccggtgtagatttgctttgcctttgtaatatatagttttgcgtatagtatgtaagactcgatatttttataaagctctgattttattaaaaccccatatctcccaatgatatatttagtcttgtctagactatcacaactcgcgtccgcggtacgggttgcaaagccttaggccatgttcgtgagaaacgggactcgcggtcggacggctcgggcgaacggatttgttctgggaatatgggttggctgactacgggcgtgcacgtgacgctctcattctatcctaggcctaggacggggtaggagtgttacagttactagctgcaaagtatgcttcaagagaaattcctaaagtggacgtctcaaagatcgagctagctcagcctcaatctgaggcagtagagtccaaagagacgttacccccgaacaagaaataaaagagcgactcaactcccgtgactactaaagggctaaagaaaatggtcaaggtaattatgggatgattctatcaatgcaatcaagcaacacaagagaaaagtcgttactccgatggaaaaa

SEQ ID NO: 19635 - DNA, 1185 bp, Arabidopsis thaliana
atcatatcagtctgagagcaaatgtgccctagtgtatggacaaatgaatgagcccccgggtgctcgtgcccgtgttggactgactggtttgactgttgctgagtatttccgtgatgctgaaggccaagatgtcttgcttttcattgacaacatcttccgtttcacccaggtgagccttattttcatctagattttcagcacctttgtgccacaagcatgatctaaaacactctcttgtgtaggccaactctgaagtgtctgcgttgctcggtcgtatcccgtctgctgtggggtaccagccaactctggcttccgatcttggtgctcttcaagagcgaatcacaaccaccaagaaaggttcaattacctctgtccaagccatctatgtccctgctgatgatttgacagatcctgctcctgccacaacttttgctcacttggatgccacaactgtgctttcaagacaggtgtgaactttctccttctgatgcttcttttcaatataattctgcatatcttgtaatgcttcataaatctgtcatctttatactttttctttcctatgtgtagatttctgagcttggtatctaccctgctgtggatcctttggattcgacgtcccgtatgctctcgccccacattctaggtgaggagcactacaacacagctcgtggtgtgcagaaagtgttgcagaattacaagaatttgcaagatattatcgccattttgggaatggatgagctaagtgaagatgacaagctgactgttgcccgtgcccgtaagatccagagattcttgagtcagccattccatgttgctgaaatcttcactggtgcccctggaaaatatgtcgaccttaaagaaaacatcaacagtttccaggtatgatacatacaacaacattttgctataatcatatgattatcaaacattttgctttgaattcctgaaagctttcaatgctgccttaacatgtccgcgtattagaagtttagctacaactgcctttcagtatagaagaattcattgtgatgtctatgtgtagatggactaaatttactctggcgtagatagatttgttattatcaaatagaatatttagagtaagagtaagtgaccagaaatcatcttgtgtttgtttcagggtttgttggatggcaagtacgatgatctttccgaacaatc

SEQ ID NO: 19636 - DNA, 566 bp, Arabidopsis thaliana columbia
tgcactagaacggtggtggtggggaattgcctttaaatcccatgtcaattaaagaaagttcattgatccagtcaccaaagaacaaagaatctggcgatagtctaccatttccccctgttcgctcatccaaccgtaaaattgtattgaagtcagcacgcaataatcaaaggcccttctaacccgccaatgatatcccgtaactccccccataaaccactcctacgagtcaccgttggagccgcatacacagcaaccaaattaatgacctcctccgcattagttattttgacatagatgaattgattcgatgaagcaaccacatctacttgacccacactagatctccagagcagccacaacccaccactctgtcctgtcgcatccacacgaaaagaattttccaatcccaacctttgacaaattctactcgcttgcacaccctccgcatgtgtctcaaacagagcaatcatgtttgtctcatacttctttaacatatatcgaattgaacgtcgaaaactgggtttattcgccccccggcaattccagaataggcacttcatgatgat

SEQ ID NO: 19637 - DNA, 1099 bp, Arabidopsis thaliana
gataccacgttgagcactttggttgagtgatctcctgtttctcataagacggtccttgctccttgggcgaaccactcttgttcttcttctcattttctgctcgcggtgctcatgagataaatgtcttgcagaagcttgggggcgacttacctcccgttgctcataggccgattgccttggcggtgaaactctgtgtcttgttggagctacttcttcaggtcgattctctcttatcatggtggcgcctgaggatgagcagcttaatgcagcttgaattgctgatatggtcttgccacattttgccaacatcttgtcttgaaacttattccaagcggttactgaaccaatgttcttgtgtgcttcactcaaacttttactcactcttgatggaggattgtgttccttaaaatggaacctcagccctttctttgttgtctagagcttctcttgtcggggtgccctatccatgaagaaaagcgtctcactaggcgtgttgaaatcgatgtacctcttactgtgatggttgtgagctcttggcagggtaggacaatcctaccatccatggccgttttgtgatgaaacttgagaatgtgcatccctatatgatgttgatgctcaatgaacaaggcccatttccggtgaggaatgtcaatccatcttggggcaaagggagtcgactaaagtggcactccacaagccagtagtataagtgttatcacccctcctatagaaattgttctcttgtgcttattagctagtgcccatttcatataactacaaagttgattcaataaacgcgtggatggtgaagcatcgtttgtgtcacccttcataggcattttgttcttggtgtagactagaagatcgtttagtgcaatgtccagcagctctaactcgccattgttgatcggtccagtcttctcccttgcgtagaaaacgttagccattgctttttggaagtaacagatgcaggggttgcggattgcgttgctcttggcccttgaagacgagaagtaggcgtcatctcctattgttacccaaagatctgaaagctcctctttcttgaatttgggtttaacatgagtacctctagggaaac

SEQ ID NO: 19638 - DNA, 849 bp, Arabidopsis thaliana
tcctcgtcgataccggcagctcggtagatctaatttttcttagcactttggaaggatgggataagcagggccgatgtgtaggaccgccatctcccttagtagcttttacaagtgagtcagcaatgtctctcggaacaatcaaactaccagttttggcgggaaagatgtcgaagattgtagattttgtcgtttttgataaaccagcagcttataacatcatcctcagaacttcgtggatctacctaatgaaagctgtcccctctacggatcatcaatgcctcaaattcccaactccaaacggagtggaaacaattcggggagaccaagaagcttcgagaacttgttatttagctagccaccgattgaaaatccaatagcaattaacgaagcccgcaaagaaagaagtagtcccgagctttcctagcgggcaaaaggtggacgatgtcgtggtctgagtaattctagaagcagacaaaccggatcagaaagtttggattggagctactttgtcaggcgaaataaagggagctttaatcgagctgttaaaaagaaacaagaaatcatttgcttggtcagcagcagatatgcccggcatagattcgaatataatttgtcacgagttgaatgtggacccgagcttcaaaccaataaagcagaaaagaagaaaattcggagtggagggagcaaaagcagtaaacgacaaagtggttaaactcttaaaaataggatctataagggaggtgcaaaacccggattgggtggcaacaccgttgtggcaaaaagaagaatggaaaggatagggtgtgcatcgacttcacagatctcaacaaagcttgtctaaaagatagt

SEQ ID NO: 19639 - DNA, 300 bp, Arabidopsis thaliana columbia
gacaagtaacaacatctgaattgattccggtaaaaataaaacgcaaaaatacagtaaaaataaaggaaaaaaaaaaggaaaaaattaactagcgtggaaataatagggtaaaatcaaagtctttgacagaagaggtcacgtggcgacatatgcctcgtgtacttaccgatactcatatcaattctcatcggaatatcacgcgtagacgactattggcaccattggaccgatgtcttcgccggagctatcatcggaatttttgtcgcttctttctcttacctccacttttttccttaccct

SEQ ID NO: 19640 - DNA, 851 bp, Arabidopsis thaliana
tcaacgtcgaacgagtcctagtcgacacgggaagcacactagacatcattttccttacaactctgcgagaaatgaagatcgacatgacgcaaatcgtaccaactccacgaccagtgctcggattctctggggaaaccactatgactctcagcaccatcaaattaccagtccgagccaaaggggtaacaaaaatcgtcgatttctctgttactgaccagccgaccgtgtacaacgcaattatcggcacaccatggttaaatcaattccgagcttccgcctcgacgtatcatctctgcctgaaatttcccacaagcgacagcgtgaaaaccatctggggaaatcagaaaaatggtcgcatctacttcatggcagcacacaagctcaggaaccccgtcactgaatcgacggccgacatgaatcataagaaggccaagcttggccgagctgaagagaagtcaatctttgagcagttataacagctaaggatcgaggaggctcgggaatctgcaacaccaactcccgatccggtattcttaatctgccttgacgacgaaaagcccgagcgatgcgtagaaatcggcggagatctgggagaagaactaacagctgaactcacagctttccttaaagaaaacgtcaatacattcgcctggtccccagaagatttgcccggagtaagtgttgacatcgtatcgaacgagctcaacatcgatccgactttcaagcccatcaagcagaagaggagaaaattgggtcgggagcgagcagaagccgtgaaagctgaggtagagaaattattgaggatcggatccatcaccgaggcgaaatatcccgattggaacgcgaacccg

SEQ ID NO: 19641 - DNA, 532 bp, Arabidopsis thaliana
tgaccgcggctcgggctgcgttgtggggtctaaggtagctgtcaggatattcatgggactgaggatactgagagtattgtgcggaggaaacatcgatttgtgtcaagtaattgatgagaagtaggagaaccaaggtttcaatagcaaccttatgaaacatttttctaaaatgtatggaacaaatatagcgtgagatgactttcttgtgtgttttgaaggatacttgtagaaagtttaagatgtttatatagaatgtacatatattatatatagttcacggcctagttggtgtcacgttttgaagtaaatcggattagaaactatacttaaaaaggttttcaaacattgtgaaatgatgtacgcacgttaattattaggattgtaggtgtgcacaaaaaaaggtggcatgattgtagagttgatagtgatgagtatctcggtcggctaagggtggtggaataatatctttacaattattggtttcggctatggattggtagatattatgttataaaatgggacttgtattttt

SEQ ID NO: 19642 - DNA, 483 bp, Arabidopsis thaliana
ccttcgatgttaacaaacttagctctggttatttatctggattcgatcaagaaccagatttatcaccaatggatggttcgatctcgtttggtgggtcgtcacagtcaaaagcggatttttcatttgatctaaaacttggaagaaacattggaaactcttcctctgtttttggtgatacagagcaagtgattagtcttagtaagtggaaagatagtgctttagctataccagaaggttcaagaagctcgagttcaaagagaacaagagggaatggtgttggaaccaaccagatgccgatttgtcttgttgatggatgtgattctgattttagtaattgtagagagtatcataagagacataaagtttgtgatgttcattcaaagactcctgtggttactattaatggtcataaacagaggttttgtcaacaatgcagcaggtaagattgtgtgttaatggtttaagcttaatgttgggttggtg

SEQ ID NO: 19643 - DNA, 373 bp, Arabidopsis thaliana columbia
attgaaattgtgcttcacaaatttaacttcttcctaaccattgattagacccaaacaaataatccagtaagtcaagctatatcttcaatcttctgttcatgtgaaatattcagttgaatcaagtctaatccaaacaacctttacaggacattgtgaaatgtaaggaaaaagacagattcagtgcagatattacactaacctcttcaacagccttctctctttgccgttcagacaacctcaatgctttgatctcagcttgggattcagacaactcccgatctgtatctgagcaccaaaaagtcaaagtttaaaacccagaaatgacattcatgcacgtacggaaaagttcacacatatatccacaaacctaatt

SEQ ID NO: 19644 - DNA, 563 bp, Arabidopsis thaliana
aagcctgagttctgacctagtgatgaaaggactgtcctgagggtgtttgaactccgcttgaccaagtggtacccacaatagacctaaggatgcaaaaagaataaatggaccagagattcctatggaagataacatgagtggcgtcaacagaagtcccacaacatttcccatgtgaaacccggccatagatataccaaccgcactcgctcgttcatccattggaaaccacctgaggaaaccatatatctaacttaggttgtggttctttcaaacccaatagtttaaaaacgtaaaacgttttcaaaatgtagaataaaaggaattaccgagagagtagggtggtcatggagggcattgcaacgccttcagcgaggccaaaaaaggcgcggacacacaataaggctaaggtcgagtgtgcagctgcccaaggagtgagtagagtggctaaggaccacaatgccacaccccaagccaacactctttttcctccataccgatccaccaatgcccctccgataacggatgaaaaaatgtaaccccataggaaggaggactgcaaaata

SEQ ID NO: 19645 - DNA, 519 bp, Arabidopsis thaliana columbia
atagagctcaggttctttgtctttgttaggaatctccgcagatattatcttgtcgatgtcgtcagctgttggtagtttactattagccgccataaatagaagtatgtgagcatgaggtaatcctcttttctggaattcgactgtgtacatagctgtaagagatgtgaaataattataattcagagataaaaatatgaaacaggttaaggtattgataagtaactctttataaaatggaacttacatgcaactgtttttccaaggagatgcctttctgttaaatctttcattaaagaatctaacttgattttgaaaatacgggcgacaatgtccggtctatcatcagctgttaaccctctcttttcacaatatcttgttatctccggccattttgggttacacgtaaatgtgataaacaaatctgggaaaccaaaatgcttacaaatggccatagcatcgtaataggtttgaagcatatacctagggccaccagtgaaagaagatggaataaggacttga

SEQ ID NO: 19646 - DNA, 998 bp, Arabidopsis thaliana
atgagaatcagagtaagcaaatttttttctgcgaaatcccttctgcaccgtagcaagtaacttaaaagcattctgttattttctcaggtcaatggaggcgaatgggaaatatatccccaggtcactgctctctgcgttggaaaccaaaatactttggtggtggaatgaaaatcacacccaacgccatccctggaaatggaaatcttgaggtgcaactattcgttttcttcaatctcaaatcctatgttgggaatatggtagctcttgagtcttgacttcttccctgtaggttgtggttcttcaaaacttcaaatggtatgatttcgtacttaaacttcataagctgtacaacgggactcatctttcggttaacaatgtgacttcaagaaggtaatatttttctttggcttcttctcattttgtcctttaaacgaccttagcactagaaaagtcaccacctttatgctacctctcttgtagtgtacaaagcatcgaagttgaagagattacagacagtggaagtatctatgtgcagtcagatggagaacatcttggattcctacctagaaagtttcaggtgttacccggtgccatagacataatcagctgatcaaaaccgcagatttcttaggataaacttgtcaagtaaagtgtagaatacttcaactttatattcttcctgtaatatgattcattgtttagcgaatcagatttatgctcgtgttacttgtgtaactcgttactatcactatttattgtgtggtctctgttaaccacaaatagatactttaaaacattttaaagcaaaaagtcgcatctcctaaatcaatcaatcacacaaaattgaatcctaaaaatggtagcttctctttcctttcattccatcgccaccgttaatccaatcttctccggcgatggtggtcgttcaatcttccggactaatcgccgattcgaagcaactggagtgagttgccgaggacagaatcctactgacgagc

SEQ ID NO: 19647 - DNA, 661 bp, Arabidopsis thaliana
ttacaaccgtcagattcatcgtcttcaccacggccaatgtagatgtaaatggaatcaccaggtccacgtctccattgtacagcatgactcggacacccttccccatcagctcctgaaggataggtgtcaatgagacatacctatctttttcgttccattcccaaagtagtttcgtattgcaagaggtccactcatacggtattttcgtggtgttggcatgtatcgcttcttgaacctcttttatgttaagatacgccttcaaatagttcccactgcacggatcagccttcattattgtggtgcatttcttgggttcgctgctcaatgtggagtttaggcacaatggagcgtatatgttgtaaatgtccaagtgtgttttttgagcttctattttttgggacgccaaatggcacttgtcccaatcatataagtcggagtccgtgcagaatttattataattgtccatttgctgttgggatatcaaaccatgactaaacataaatttgtagccgaaatcatcctggatctccctgttaagtgatggattaccaatcaaaatgccacgcaggttgattaaggtctggttgttacggtgaaggatgatttgggcaagttggggaacatagtggccagcgtaactctgaccggcgatgtaaatgtc

SEQ ID NO: 19648 - DNA, 555 bp, Arabidopsis thaliana
aaagttggaaacaaaatcattaagaaaaaaatcctctttacggaaagtgtttttgttagtcaaaatactctttacttatgcacggctaatcatatggagcatttcacctttgtttggaaaaaagcagtattgttgtggctattaacagctgcatgcataaagacgggacggccacaaatagcaagacgggccatagacctggcggaacacggctgttgaaggatggttggccggagtactacgacgggaaatcaggaaggttcatcggaaaacaggcgaggaagtttcagacatggtctatcgccggttacttggtcgccaagatgttgttggaagatccttctcatcttggaatgatctcattggaagaagacaaacagactaaacctgtcattaagagatcttattcttggacttgataatttgttgtcaattcttttgagaagagcaggctaaaatttgatctaaattttgttcacaagtcaatgcattttgtattattattgttcccttagtgtggagtagtgggattattgatacctctttgtagacgat

SEQ ID NO: 19649 - DNA, 559 bp, Arabidopsis thaliana
agctcgatgtaaccatcacgggtgtggaatcgttctcagagtcgaagaggcgaaaaaccatttgcactgttaaaaatgcgggaaagcattgcagccaacagagatggagaaacatttaaaagttttccatgaaccactcacttgtggctgcggaatagtacttgagacagaacagatggtgcgtatatataaatggttgcaatcattgttcgttctcattaccttgttgtgctagaacttgtaaattaacatgagattgtgattctgttgcaggttcaacatcaagggaaagattgtcctcttcgcctaatcgcgtgtagattctgtggagatatggtggaagcgggtaactctgcagctgatactagagacaggatgagaggaatgtctgaacatgagagtacttgtggttcaagaactgcaccatgcgactcatgtggtcgatctgtgatgctcaaagacatggacattcaccagattgctgttcatggcaagagtagctgatttctgtatccggttccaccaattgttattgaaaactgattgtagtattgaaagt

SEQ ID NO: 19650 - DNA, 419 bp, Arabidopsis thaliana columbia
agaatcgccgccctgaaaaaaatgaattaaaagtcactacgcttttctaaataaatatgtaactagtagattgtttattgtccacgacttataagaacttgtaatctaatccacttatttcccagaaaccgtttgaactcacaactcctgaccatctccctagaggtaaaaagcgtgttgccgagcgaccaagaatggcaaatccacgagccaattcgataattggcatatccacatattttggaccagcaaattaaatggcattttgaacaatataatctcaagattttacaaggtcttaaaaacattttagaatctgtgtaagaacctttcaaaacttttaggacaatttgtaaaatctataaaaggttttgtagaaggttaaggttgtgataagatttgaaaggtatttaggatta

SEQ ID NO: 19651 - DNA, 579 bp, Arabidopsis thaliana
  unsure (1)..(579): unsure at all n locations
tnnnnnnnnnnnnnnnnnnnnnnnctaaagtgccaaagggcgtgatgctaacgcataacaatattctcgccagtgagcgggcttattgcgcgcgactgaatctgacctggcaggatgtctttatgatgcctgcgccacttggtcacgcaacgggctttctgcatggcgtaacggcaccattcttaattggcgctcgcagcgtgttgttagatattttcactcctgatgcgtgtctcgcgctgcttgagcagcaacgttgcacctgtatgctcggcgcaacgccgtttgtctatgatcttttgaatgtactagagaaacaacccgcggacctttcagcgctgcgtttctttctttgcggcggaaccacaatccccaaaaaagtggcgcgtgaatgccagcagcgcggcattaaattattaagtgtttatggttccacagaaagttcgccgcatgcgatggtgaatctcgatgatcctttgtcgcgccttatgcacaccgatggttacgctgccgcaggtgtagagattaaggggtcgatgacgcacgcaagaccttaccgccaagttgcgaaggtgaaga

SEQ ID NO: 19652 - DNA, 576 bp, Arabidopsis thaliana
gtctctatctttttcgtatatccttcaattgattctcttcatccacagtttcaatctttacctttctcaaaaatatgtactttgcgtaatggcttttctccaaatctcaaatatgttcagtctttttgggctaaagcttgaacctttcacttctctgtgtgtttcctaatcttgagaacaaaacattatagagtttatatataatcttgatgatctcaagtggactttaaagcaggaactgatttgtggttaaatttgtgttgattggattgtggtttaatggtctctgttttctaatttgtgcagcttcagcattgaacacattgttcagtggtatgcattctccagctcagctaacacaatggactgcagcagctggtgatccttgtggccagaattggagaggcgtcacttgttccggctcacgagttactcaaatgtttgtgatttttgtaatcaatattcttgtctcctgctttgatttatatctaacataagttgtgttatatttacttggcagaaagttgtcaggtcttgagctctctggaactcttggaggaacatgcttgataaatt

SEQ ID NO: 19653 - DNA, 467 bp, Arabidopsis thaliana columbia
tattcaagagtctttggaatatcaagtattgatttaacgcctgctgatatcactgctattggagtcctcccaagtgcagtaagatcagatgatatgtccatcgctgcatcacaaacacaaattagcagcgcatgcagggtgaatattggcatcaacaccatcatctaaacagagtttctaatcatgtaactaatttttttttgtaagaaaggaataaaacggacatgaaacatacaatggttggcatgtctatggacaccacctatcccgcccgtcacaaaaacttggatgccaacctacaataaccaaaaatcctctgaaatgcaataaatgataccagaactactaaagaaagatcctcctaggaacaaagccaattagcattgaagcgagaaacaacgttgcagagactgtagttgcaccgtatcctcttgtagccacctgaaggaaaacatttaggcatatgg

SEQ ID NO: 19654 - DNA, 946 bp, Arabidopsis thaliana
actcttctaacaagaacaaactttttataaaaatgtacaggaccggggtgctcatctgtaggatttggggcatttgaagagcttggtccatttcgcgtacatagcgatggcaaaacgctttaccgcaatccttattcatggaacaacggtacgtataccttttaaaaaaatatgataattagaaattttagtctacgttatttataagttgtaatgagatcaatgagaaatgcgattgcgtgtggatttgcagaggcgaacatgttgttcttcgaagggccaataagtgtaggattctcgtactcgagtactccttttgattgggagatatttggggaacaagcggataagctaacagcagaggataactacatgttcttggtgaattggcttgaaaggtttccggaatataaaggacgagacgtttacatctccggtcagagttacgctggccactatattccccaactggcccagatcatccttcaccgtaacaaccaaaccttcatcaatctacgaggcatttcgatcggtaatccaggtctcgatttacttatcgaggctgataatgagaataaatttattttaagtcatggtttggtttcccaaaaagattttgaagagtacagtaaagtctgcgattttgccaactatgatatggacgaatgcccaaagataatgcctaaatttagtattgaacataacaaacacttggacgtttacaacatatacgctcccgtgtgcctaaactccacgttaagcagcgaacccaagaaatgcaccacaataatggaggttgatccgtgccgttccaactacgtgaaggcttatcttaacagcgaaaatgttcaagaagcgatgcatgccaacaccacaaaattaccgtacgagtggaaggcttgcaatcactacttgaattccgtatggatcgacgctgataaagatg

SEQ ID NO: 19655 - DNA, 599 bp, Arabidopsis thaliana
tatgatcgcttgggcttcccattttctccaactgtaaatctgtgttacgtgataaaaagacaacactgtttcagatggtattgatatgttcgtctgcttaatcttactaacactctatgcacataaatgataatatcgaaggttttccctcaattttcagattgaagataatttctatttgacatatacttaggaccactaattatttgatcatgaggttctctacatcctctagacatgaggataaagttgattgcaagtataatacatctcttcctttcggagcaacatagaaatacttaagaatacaaatttaacactcatatgtagatttaggagctaggatgtgtaccttgctcatggctaaaccaatggcaatgccactgtatagaacatgagtgatacccaggacgaataagaatcttaggagttgctcgagtccctcatacgacacaaatggttcacggccctggcattggatccacatccagttcagtaatataattaaaagtcaaaaggaaaataggctcttaagtcgatagaaaaagtaaatatttacatgaccacattgatgagaggcttcatggtatcgatgatga

SEQ ID NO: 19656 - DNA, 1052 bp, Arabidopsis thaliana
ggggatgaattctccgtcggctggttgaatttctatataggccaaatctccatcaccgttttcatactcgacaacaaatgaaatgtagtacggatttgctccagggtccatacggaaagctatgttagttcttcgatataaacattcctcgctgatcaaaaaacaatagtcaatattttgattcgtatatcatagaaaatagttgaattttaattaaataatatttctgtaaagataataacaaaaatgaaaacattgatttctttgatttatcaaaaaaaaaaaattcaactcaaaacctagatatacatactaaaaggaaaaattttaaaacaaaaattatgtaagtatataagtaccgtctgtagtaaacacgtagaacaccagccgatcgaagtcgatcgccttggccaggtctggctaaggcacccatggctttgccgctaagatcaaagtgggctggttcagaggcacaaggaccaccagggcattcgtcggttatcgtcaccgttattggtctcctcgagcatgctggatgcccattgcatagaatctgataaataaaaatgttaacatatactatatagttgatgaaagtaaaatcttgttgtaaccatataacatacattcagatcttgcatgctatgtcaattttttttccaacccaaatttttaatgttcattctgattaattaaaaaagacatatgaactggtcattttattgaatataattacacaatttttttttacgttttatgaacaatcttagctacatatatataaaattgtatcatcttttctgaaaatactattctaactaatatattacctaaaaagcattaacaaagctgaccaaaagggcataaattctgtgttacatacgtaacactatgctcttgagtcttgccctatatacattcatacaaacctgaaaacatgttccacatcctattccattgttgaacactgaaggcctccagctgaaaccacccgtataatggtggattagcactgcgaaacacaagctctcgtatatataccatatatatat

SEQ ID NO: 19657 - DNA, 316 bp, Arabidopsis thaliana columbia
tgaaacaacataagtttcatgtaaaaccagatgaatctttcttttatggtactgatgatttcactgatggtgtcacagagaaactcagtaagaactgggagcagcaagctcggcaaaggagaatgaattatgagaatcctaggatcattgatgtccaaaactacaggtatgtctatatacacacacatacacatatgtctcttgtaaactttgtgtctactgaaatctagtgttgattactttgagcagcatctatgtggctacatggaacgtacctggacgctctcctccttcagacttaaaccttgataagtgg

SEQ ID NO: 19658 - DNA, 543 bp, Arabidopsis thaliana
taaagctggtaaagatattaagagcatgtataggttggtccgtagaacactatgacctgctcctttcacagttacaaaggttaagttccctttgtaatcctctgtgaaccctcccagctgtcctcccgtaaaccagggacgaaattcctttacaaccgttagattcatctccttcaccacggctaatgtagatgcaaatggaatctccaggtccacgtctccattgtagatcatgactcggacaccctcgcccatcagctcgtggaggataggtatcatcggggtgtctctatcattttcgctccaattctcagtcagttcgttattgcaagaggtccactcatacggtaatttggtggtgttggcatgtatcgctttttgaaccttttttctgttaagataagccttcaagtagtccttactgcacggatcaacctccaaaactgtggtgcatttcttggatatcctgctcaacgtggagtttagacacacaggagcgtatatgttgtaagtgccaagtgcttttttgcacatcgattgttt

SEQ ID NO: 19659 - DNA, 743 bp, Arabidopsis thaliana
aagctttttcatcacaaaaaaataaaataaacatagttaacttttaaaacaagaaacctatcgaaatagacaatgaagtaaaacccttacaatgaagtccaatcctcagtccacattttcggcttattgggtgagtttggtccaggaaaagtctcgccgcatttcatcccgttgcaggtattgatctacagatgaaaatattcgatctctaagaagtataagaaacattgagtcattgatgattgatcttagataagtaaccggtacgaaccacgggatcaggagcgtcgggcgacttgcacatgatccatggcactccggtcttaagcccgaccgccatttgacctgcccacttgatgtacgatgctcctttctcatggaaagccccctccacgtttgcatactcgttctcgatcttacaaaagaacccaaataagaaacttatttgtctaagcaatgatccggttaatgtatttaatgcaaaggatttggttcggtttggtgacattgaatttgacgaataagattgaaaagattaaatacctgagaaagaataattggacctccctgagaagcatataagccctcagatttcatcaaatctacgatcttagcggtgaatttttgcatgtggaacttgaagggctcattgtcggttcggtataccataccgggtacatcccgtaaccaaaatggcaatcccctggttaatcaaaccggtcgtcaaaatcatttcaatgtta

SEQ ID NO: 19660 - DNA, 528 bp, Arabidopsis thaliana
gagcaaaagaatagcttgtaatgggaaattacatgatggaagtgattgcagctaaaagcctacactgcatcaaacgttaaagaggaattagatgcttcaaaaagagagtttcttggagcaaacgtggttgtaaagatgcagaagaaagtgttattacctaagattatagagaggtttacaaaggaagcttctctgagcttttaatggcctgatgagatggttaaccgatcacgcagacgaacagctttgcggatccataccccccctcgttacaaggcacacccaccaccaagccagaatcgcacgtcgtcgaatggcttgcatacagttcaccattccgttatcttttctccaaggacttgatggagacaaacccctggtgggtttagaaggatattgcttgtgttataatgacagctttcgattgcctaattctctctcttgtatgtttatagtgagacaatgaaaaaggctatccttgtgtacaagacgcactatcttctttcccagaccgctctggcttgattt

SEQ ID NO: 19661 - DNA, 461 bp, Arabidopsis thaliana columbia
tggctgcactcgacttccttgtttgtgatgaaagcgacgtatttgtaaccaacaacaatggcaatatggcaaaaatattggctgggaggaggtactgaaacatcttcttcttcttcttctatgtttttttggctcatctcgttgtttaagcatttttcagtttgtatctttgatggaattgcagaggtttaagcttttggttatatgaaatttgcaggagatacttaggacataaacccactgttaggccgaatgcaaaaaagctttacagattattcatgaacaaagagaacacgacatgggaggagttttcactaaagtccgttcgtttcagagagggttcatgggagagccaaaggaagtaagagctggtagaggtgaatttcacgaaaacccatccacgtgcatatgcgaagatacagaggctaaggcaaaggcgcaattagaatccagaagacttg

SEQ ID NO: 19662 - DNA, 549 bp, Arabidopsis thaliana columbia
ccgcaaatagaaggtgattaacttgaggacttcctcgagcaacgcgaatgcccaccattactcctttttcttgagctttccgacataatcccgaaagaacttccgtacatagaatgaacaaatactgagcgtaagggatcaccttgccgcagtcctcgagatggcactacacttccctgaggcgatccattaatgaggaatgaatatgagacagtgcaaacacattgcatcacccaccttatccatttatcatgaaaacccagcctcataaggacctcttggagaaaattccatttaatgcgatcatacgccttactcatgtcggtctttatggccatagaacaatactttttagcacccgaaacacgaagaaagtgaagaatctcatgtgtaatcaacacattatcggctattgctcggcctggtacaaaagcagattggtgcaaagagatcaactctgacaaccaaggttgcaaacgtctagttaggatcttagccacaattttgtactgtacattacacaacgcgataggacggtagctgagactt

SEQ ID NO: 19663 - DNA, 512 bp, Arabidopsis thaliana
actttaggatcggttctacgctgcttctgctgttcacttggttcccagtcaagtaagagttatgtcccgtgtacacaaagtaatgcgataacggcgccttcatgtcatgatgcaccttaacccaaccaagaacatataatatacccaattacaaaaccatttgtgaaataaatccataaaaagtttccaaacttagatacctggccagacatgggaagaggagagttggtatcgctgaagaggtagcgatagaaggcgttgagatgaacaagtccatggtgatgaaaaacgttgtggtgtttaacgctgtggaagatatcttgcacgtagtccaaccctgcgtgccgttctccttggacttcactcacaaatcttagaagctcatcgaaagacatcttgccgtttcttgagtaagcttcgaagagtctcttgatgctcactggtggctgcctcgttttctccttaaagcttctgctgcaacagaagcacactttgaaactctccgacaattc

SEQ ID NO: 19664 - DNA, 410 bp, Arabidopsis thaliana columbia
ctatatgttatgctctcacttttaacatctaatatactcttgttaatgtctttttatctgttcttaactccattaagatttccggcttagtcatgatgtcgcctcttccagttctaagaagttctgggtctggttgagggtgcaatctgcattgtcttgctacgataatgtttggttgaatttgatgtgtaacgaatgtgctgatgggcttacatgttgactaactggcttgtattcagtttctcagatatctggttctctgaagtcatccagactgactcgatcagacgtacatcagaagctagagccccacatgaacagcatgcctctccacgatgctatcgtggtctctgcgagattgttaattaggccgtcatcttacaacgggtctgaatgtgctgaatcatgta

SEQ ID NO: 19665 - DNA, 566 bp, Arabidopsis thaliana
cccactgaagcggcagtgttcttcacgttctcctttacaagctcctcctcgtctcctctgcctccagctggcaatgccacggcgttgtcatatcctgtggatccaccacggccctttgggtccaagaaggaagagccacggtacgatggaaccaagaattttccggtgaagctgtctggtttgcctgaggcgtcaagctgtttgactgtgaaaaggaatggcacacgttcacctcctggaagttggactgtgactgcagcatagtcgattccatcttcttccttgaaattgacgcttccgtctgaagcaacctgctcattaaagagacgatcagtcacaaaccctaaccctaagcagagttttttcttgcagtctaagcaaagacgcgaaatcgaacctcgaagggtccttcgatctcgtcaagggtgtaggtaagacgggtcatgagctttgtgttctggaactctggaggagcgttcttgcttacactgtctgacttgacggtgaaggaagtaggctcgaagcagaacttctttcctgcatactttccgggtttgaacgagaaa

SEQ ID NO: 19666 - DNA, 449 bp, Arabidopsis thaliana columbia
actgttacgcattatcctcaaataaaatcatatagagacatcaattgttgataatgaggcaaaatcaaaaatatcataggagctgggatcaggagtcgaaagatgagattctctctccatcttctatatctcgctaaggtttctgttcaaagtttgatagtcatcctgttaacccacttaataatctcttagaaaacaagcagccctaacttgagccacaatacaacgtctagggttcatccgtcttcacgcaaccccaatatgcctctacagctctactcatccttctaacccacttaataatctcttagaagacaagcaaccctaacttgggccacaattcaacgtctaggattcatccgtcttcaatatgcctctactcccttgccggtccagtcgtgggcctcgtggcgatctagagtctagacacacaaatgcattaaatttga

SEQ ID NO: 19667 - DNA, 601 bp, Arabidopsis thaliana
acaaaccgatgcgtcgaaacctaatccaggatttatccaacggatcgtgagcagttttgagcaacgcaaggtaattcacaactatgaatcttctccatttacgtctctgtgtattggttatataggttatggtttcagttactagatttggtgtttctggagaagagcgtcaatgcttataggtttcaattgtttcaagaaaccattggattgattactagaagtttagggtttcgtgatcgagtattgtgtactttaccttgagattgttcactgttctgtatctgatgtgtgcaaatttgtgtgtttcttgtagaccatatcggcaggaatggttatattagtctctgctatagctgcgcttttgcttaatcccattcttgtgccgcctgctttcgctagctttcaaacggctactaattctggtggagctgctgtggttggtggaaaactcctcaggactgaagtattgacaagtgcttggactggtttctttgctggttgctacacacgttatctggacatgatcacttgctgctttggaccactgtcgattggacggcgagaatggagagtctgcggttggactctttggggatgt

SEQ ID NO: 19668 - DNA, 645 bp, Arabidopsis thaliana
acttatttttgatggcaaggttactgttaatggtattctctgcaacactccacaggtaaaacaattctcattgtggaatcaaattttgatgttttgatgataaagcttagcaattttgttaatgcagactcgagttgatccatcaagagacattatttatgttaatggaaatcgtattcctaagaaacttcctccaaaggtttattttgctctgaacaagcctaaagggttagccttcttcatagctttttctcatacctagcttcaggattactatcacagacttgtaacctttgtttgatatttcttgcatcatcctgatggcagatatatttgttcttccggagagaaagagatcaaatctgctattagtttgtttgacgagtacttgtcctcttgggtaagacattttgttttcctgtacataaaacgttgtcttttaaagtatgttagattagaaaacttggtttaagaatcttgtctttgcaatgtaggataaaaggaatccggggactcccaaacctcgcctttttactgttggtcgtcttgatgttgcacaacgggattgatagttgttcaaatgatggtaattgtattaattgaactccatgtgttatgttatatatcttggtttgtacattttgg

SEQ ID NO: 19669 - DNA, 568 bp, Arabidopsis thaliana columbia
caaccaatctgcaaaattatgagtatgagtactccataacacacttgcatcacgtctgcacctgacattagagttttgtaggaactctagatgcatgctgtaaagaaaaagattaattacaagttgaatgcataatacaaataagtagataaagtacaagttgaggataacatactcgacataaggatcaaacattgcagtattttgaataacagcaagatgggctattttcttctcactgtcagttagaatcaatgaggtacctgcagatattggacgaccctctaagattgagttattctcatactcgatgttcctcacttttttttcttcaacacttgtactcttcctcaagaaagcacggcaaaactccatacactcgtctgctagatatgactcagctatgcaaccctcaggtctggcaggattccttacataatctttcataactttcatgtacctgcaagccatgtaaagcagtcagactatcaaattgttttagacacttaagctaatttattgtataatgtgaaccttacctctcaaaaggatacaccatttaaaatgg

SEQ ID NO: 19670 - DNA, 628 bp, Arabidopsis thaliana columbia
gtgccacgtggcgctaaattgatatcagagattcgctgcatgaaaaatattttcaaaactcgaagtaaggagaaaaaaagtattttgaaaattcctatagagtaaaaataacagaattatgtaaataaattttgattaaactgcaaatttgtgaaaaatattttagttaacttacttgatattctccaaaaaattagtattcgaaatgatccttcgtacaaggcattctcaaatgttttaaagggcctctcgaacttatatattcccttaagagaaacttcaaaaactatatactgatgttatatactcccaaagatttgtcactagtcgtcatctgagagatagaccaagctactgtttgacttcttttgttgttgcttttgttgttcttgagccaaccttggatatgttgatggtgcagcagcagagttgggagctcgagatgatcttaaatgaggtgccatggtccttcgcgctataccatgcactggtggagcagaagctggttgataagaagttggagtatggttggagattaaaggcggtggtcttggctgaggtgtgttcaggcaggtgattcagagatatacttttgatgtgctgagggcgaggatggcgagtgaattga

SEQ ID NO: 19671 - DNA, 842 bp, Arabidopsis thaliana
tcagtacgacacactaagacgggcaaaacattcttccatgatgattctctatcatcttcacaacccaaccgtccctgcatttgcaatggcatgcgccatctgccagcaagaacttgaaactgctcaaggttggcgttgcgaagtttgccctgactatgatgtttgcaatgcttgctactcaaaaggcatcaaccatccacatagcatcattagccgtccatctgcgacagattctgttgtacagaacacacaaactaatcaaattcagaatgcccaggtattccttttctttcaattttttagctttgatcatagaattgatgtccatatgcatacataattattcacttgtcaaagctggaaagatagataggctcaactccttttaggatttttaccaaaattcctttcaaatattgtgtagctagataagtgtcggttagaaaattgagtttgcatctcttggcttctcttttccttattgctaactacggtttggcttgttggtactgcagttaagagaggtgctgctacacgtaatgacatgctgcactgcacagtgccagtatccaaggtgtcgcgtgattaagggtctcattaggcatggtcttgtctgcaagaccagaggttgcatcgcttgtaagaaaatgtggtccctcttccgattgcactcccgaaactgcagagatccccaatgcaaagtccccaaatgcaggtatgtaatctaactacttataaagcaaattttcaattatcagaatagatttgtcaagaaggtgatgtgtttaataatgatctgacaagtttattttttgcagagagttgagagctcattttagtag

SEQ ID NO: 19672 - DNA, 585 bp, Arabidopsis thaliana columbia
gcagtattaatttgatgattcttaacttctcactaacatttacatgttctcttatttaagggcttatttcgctacaagtttgctgaatgtggttacggaactacttgacaattcaaagcaggacacaccgaccattcttggatgccaaacactgacgaggttcatttacagccaggtaaaatgcatacctaagttggaggctttgactgatttaacaattaataaagtgcatggcttctacacatatgctagtccatgttgaaaatgtgaaatctctcactcttcatctgttatggacaggttgatggaacttatacacacagcattgaaaaatttgcgctcaaagtttgctcattggctcgtgaagaaggtgaggaacatcaaaaacagtgtctgagagcatctggcctgcaatgcctgtcagcgatggtactagaactagttcttttaatcttccaaattcagtcaatcttactcccaaaagtttctgtccggttttaattagtgtttcttgtgtttgcttcttcatcaggtgtggtatatgggagagtttcacatatcttcgctactgttgatgagattgta

SEQ ID NO: 19673 - DNA, 874 bp, Arabidopsis thaliana
caatacccgagtctttagatccaagaaccacgttggaaacagaatactccacttgacgctataatatttcccaacattcccagagacgattgtaaattcatataagcttcacgaagagctagacagtggcaaactctccagaggcatctttggagagttctggtaaataaccattatttttcagccaattgactaacttgacactatcacttggagtgagaagcagttggaattttccctcggcatgggataaataggttaatgactttaaccagcaacaattaatatcagactggacgttggttttgagctggtcaaaaatcatagcagatgtgacccaagcacccaaacgtgctgcgtaaaccccagctctgtaagcaggccagtagtttctctccattaaaatctgatttgaacagtcaagagaaacgattccatagttaactatatcagcaacaagtgatacgcctgaatttcctgtatcatcattcacagagaatccccaaagaatcggggaatgtagtagcagtgtgaatatcatttgtgtgtggaaatcaatgaagctgcatgaacttacaaactcagtgatatgcttcaccttttcataaatttcagacaaaagattatcatctccctcgagattttccaagaacactatcaggaacttgtgtattgatgctagaaactctgacctcatgaccacccctcttttgtctttataattgataacaccaaatagcaattcatgagctccatctgcttttcttaagccatcatttaggctcacaatatacgttaagaataatctgactttttcaagaactagcagtctcagttcagaatgtttcctactaataggtggagaacgtcaaga

SEQ ID NO: 19674 - DNA, 536 bp, Arabidopsis thaliana columbia
  unsure (1)..(536): unsure at all n locations
agccnnnnnnnnnnnnnnnnnnnnnctaaagtattacgcgatcgattatttatttcctgaaaacaaataaaaaaatccccgccaaatggcagggatcttagattctgtgcttttaagcagagattacaggctggttacgttaccagctgccgggcctttagcgccgctttcgatggtgaaggacactttctgaccttcgtccagagatttgtaaccatcgttctggatagcagagaagtgtacgaacacatctttagagccatcgtcaggagtgatgaagccgaagcctttgtcagcgttgaaccattttacgataccagtcattttaccggacatagtgtattacctttaataattaagtgtgcctttcggcgatatggcgtgctttacagattttgaagcgttaaaggaatgtgcactacgaggggtatcaacgataactcttgaagggacttgcctgactacactgctttaatggtctgtacgtcaaaccggttgatgtgcattaagccacagcattggcggagtgatgcaac

SEQ ID NO: 19675 - DNA, 711 bp, Arabidopsis thaliana columbia
tgtttctcaagaacaaaaagttgatgttctcagtcttggtattccctctcttactcaattgtttagtttacttcttgaacatctttgtcatcgtaccggagatcacaaacttgatccttgaagcaagtttgttgccttcgacagatccaacctccccggaatacgcagcccgccttatgagagtctttacagattttcgccaatttgtgggttcttcatacattttcgcggctgtctcctccatcatcaacctcttttctgttctagtcatcgtccacgcatcggctattactcttaaagatgaaaacttcaatatcaaagattttcctgttctgagccttaaatcttggaagggacctcttgtgacatatttctacattgctcttttcagtcttggctttggcttcctcttctttataatcctttgtcctatccttttgttctctataaaatccggttccgtggaaaatatcggtttcttggcggtcgaggctggtgttttattgattatattcaccgtctctcagtcctattttgctatctattggaacttatctatggtcatatcgatactagaggaaagttatgggttccaagctttggggaaagcagcaaagattgttaaagggatgaagacaaaactgtttctcttgaatcttttctttggtttattggcatccggattagctcaaatcttgcagctgatcaata

SEQ ID NO: 19676 - DNA, 514 bp, Arabidopsis thaliana columbia
cgacactaccaaagaagaagaagcccattatcagcaccaggatcgtcttcatgtgtcccagcacttggaacgatacagctgtgaatcttccgatgcagatgaactggcttaggttggttccaatcgctattgtgcacgacagggttataaacagctgcagaattcagggacattaggttcgaataagtttctaccatgtatgtacagcacggtttggccttaagcacagagaaatggtttgtaagttaactaagaaacaggcattgaaataagctagattcctatagtatctgcttggctctgcatgctgactctaaacaaagttggtaccaaacagcaaaaacacaaaaaggctatcataatcagactaccacaaaattcataaggtagtaacattttacttctattgacataatgatgcgattttgcttttgtgaggagagtcaagttagatctaattccaatgagactaagaacttattgaggtatttcgtacttaccactgaaaccaagt

SEQ ID NO: 19677 - DNA, 417 bp, Arabidopsis thaliana columbia
  unsure (1)..(417): unsure at all n locations
nnnnnnnnnnnctaaagggcgagaaaatccgtaaaacgctggaagatgcgattccgctggtggtaggtaaaacgcagggtgaatacaaaaacgttctgacgctggtgcgtaatacttttgccgatcgtgatgctggtgggcgcggtttgcagacatttgacctacgtaccactattcatgtagttaccgggatagaagcggcaatgctggatctgctggggcagcatctgggggtaaacgtggcatcgctgctgggcgatggtcaacagcgtacagatgtcgaaatgctcggttatctgttcttcgtcggtaatcgcaaagccacgccgctgccgtatcaaagccagccggatgactcatgcgactggtatcgcctgcgtcatgaagaagctatgacgccggatgcggtggtgcgcc

SEQ ID NO: 19678 - DNA, 451 bp, Arabidopsis thaliana
cggcgttaaatcgtggtctaacgatctcagtgccaattggaaagcgatgttagcgccgttactcgaaccgcatatgtaacaccgtgagaaatcggcgtagtccttaagccacggctcgccgttggttgagtcaacgacttgttgtttgacccaaagcagagcatctaatgcgtcgtcgtattgagctgggagtctatgctccggaggcaaacgatagtgtacggagacaacaatcactgttaactcactggccatttgagagcacaacggtcattgcggcagaattgccgggaaaggatccaccggagccgtggagatggatgatgattgggagacgtccacggcgttatcattggatggtagattagttggtcggaaaatacgtacggacacgccggttttcgtggttaatggttacgtctttggaagcggcgactttgccgggcatgga

SEQ ID NO: 19679 - DNA, 582 bp, Arabidopsis thaliana columbia
agtgtggtcgtaaagagagtgccccgaatggaacactctttaagaaattataacggaaaatcacaggtttttataacatgtcgcataagcaaacccaagcttttcaaatacgctttgatcacctgttgccagggaaactacgtattgttcgcttgagtttgcgggactagatgaccaatacatatttgattgaaaaccagcgtcagtcgtgtaatgccccatatctccccattcactgtacagtgacccgatgcctcgggaactacagtggtttaaatagtttgctctggggagcgtgtagccattgctgctgcaaaaattttcagcaaggctgtatatcatgaaagcctcgccggcgttcacccaccaactcttcacacggatttcgtatacatagctagggcctcctgattttggcgtcgcagtaatcctttccgaattgctgccgacatttttaaatgtcactttaccggtagcatcaacatcgacccaggaggcagagcttgaaaactcataatcagcgccgtttttctggggcaaagttgtcattattcactgataatacgcccggtgacccctgcg

SEQ ID NO: 19680 - DNA, 358 bp, Arabidopsis thaliana
tcccgaaaagatctgttagggatttagaagaattattgaaagaagagagagcggctcgagcaacggtttgtgtcgagcttgacaaagagagaagcgctgcagcatcagcagcggatgaagcgatggcgatgatacataggctgcaagatgagaaggcggcaattgaaatggaagcgaggcagttccagagactggttgaagagagatcgacttttgatgctgaagagatggtcatactcaaagacattttatacggcgtgagagagaaaaacatttcctggagaaagaagttgaagcttatagacaactactcgaagaaacagaggaattggaatgttctttaataaaagagaagaat

SEQ ID NO: 19681 - DNA, 548 bp, Arabidopsis thaliana columbia
gctagtttcttgaattcttgaatgtatccgcttagcgtgtgaggtccatacaaagtcgatgcaccctgagggaaagaataaacagagttggtttaagagcaggaaatcaagaaagatcctacaagctcttccttcttatctaagcctctgacctcatatctctgaaacttggtattcctcaaatgtggcaatatactgcgaatacgaattggttagcccggctattaccacgctgaattctcttccattgctgccttctttaagcactgttttcacggcatcacgtagtcgcctccctgccattgttgtgaattcttgcaagcagaacaatagagaaaggaaattactaatgttctacatcagtttagaaatgattttttttgttctgggggagaccggaatacctccggggacgcagagaatcactagctggccaatgcggaggatctgaactggtaatatcgacggctgaaaatggattaagaaacagtttttccatcacaaatagctaagtgggattcaatttttatcatcacagtacaagatta

SEQ ID NO: 19682 - DNA, 548 bp, Arabidopsis thaliana columbia
agtaacgtcgccagtgtgctttaaaggcggatgagaacgacgaagaacgatgtgcatagcctgaagtgtacataatcaatccagcccctgtgagttactgtatggatgtacagtacatccagtgacaacaaagatcaaccctattttcggaaagagcctcgcaaattttgtcgttggtgacgggaaaacataaattaatcttgccccttaagaataagttgcctattttcgtagttaacggatccgttaatgtgaatcattcttttatgttatgattttaaaaggaattttatgaaaagcctctcctataagcggatctataaatcacaagaatacctggcaacgttgggcacaattgaataccgatcattgtttggcagttacagcctgaccgttgacgacacggtgtttgcgatggtttctgatggtgagttgtatcttcgggcttgtgagcaaagtgcacagtactgtgtaaaacatccgcctgtctggctgacatataaaaagtgtggccgatccgttccctcaattactatcgggttgatgaa

SEQ ID NO: 19683 - DNA, 553 bp, Arabidopsis thaliana columbia
  unsure (1)..(553): unsure at all n locations
nnnnnnnnnnnnnnnnnnnnctaaagtggagtccgaagtcggataccagtcaaactgaatacgataaccatcgatgggttcaatatagagaatttcgatttgcttcgcttccccactggaaagcgtaatcaccggctcaatgccttttggcgcggcagctttcagatcaccaccaacganatcgacggcaaaacgacgcgcccatttttcgggatagtgttcacctggcgcccaaccttccgagaaaccgcccatgccggtacgcgtcgccataacgcgcgctaatgggcaatgaacaggcggttgcgcactccagtacagacgatactggaatgcaaactcatcacctgcttttacagctttttctggctgccagaagcagacaatgttatccagcgtttcgcccgttgttgggatttcatcaggccgatggtgccttacccacttgttacgcggttccaccacagacttgggcgtttgttatacagcccataatgtcctgataatgggagaagtccgatccagttgcaataaccaaacctttcgggttgtt

SEQ ID NO: 19684 - DNA, 502 bp, Arabidopsis thaliana columbia
gtgtgctctaaaggttagcgagttactgacggctaaccggcagctgcaatcggcgctggtggaaacctcacaaaacaatcaggacgcggtaatgccaggttacactcacctgcaacgcgcccagccggtgacgttcgcgcactggtgcctggcctatgttgagatgctggcgcgtgatgaaagccgtttgcaggatgcgcttaagcgtctggatgtcagcccgctaggctgtggcgcgctggcgggaacggcctatgaaatcgaccgtgaacagttagcaggctggctgggctttgcttcggcgacccgtaacagtctcgacagcgtttctgaccgtgaccatgtgttggaactgctttctgctgccgctatcgggatggtgcatctgtcgcgttttgctgaagatctgattttctttaacaccggcgaacgggtgtttgtggagctttctgaccgcgtgacttccggttcatcattaatgccgcagaagaaaaacccggat

SEQ ID NO: 19685 - DNA, 483 bp, Arabidopsis thaliana columbia
tccctttctttctcagtttatccttggtcgacagatgcttcattgtttttgccagagttggagacggctccgacatgggctatcttggaaaatattccacctcaaatgtattctcttgatggaatcagtgtcatagcaagtgctatcggggaaccgcttcatactgaaaaatctaagctggatccttattactttggaaatacgaaggtgaaagtggagatatcgctggatgctcctcctccgacgaccatctttgtgagagacgctttattgaactctgtgaaagtgcgtgtgtcttacccaagactgccacctaagtgttgcaattgcgggcggtttggacatttgctaaatcggtgtccgaagcctcttatgaggaaagctcaaggcggtgtggtcaaggggttgattccacaggctctgtggtcgcagtgacctccacgtctcttgctatcgagactaatgggtcgaaagtggtgaaga

SEQ ID NO: 19686 - DNA, 679 bp, Arabidopsis thaliana
atttaccactacaattaacatatgcaaattatcactttaagactttaagtaagcatcaaagatcaaacacaaaagaagataaataatatccaaaattaaatttaaatatcaaataatcactctcgtgatcaattagatatcacacgaattacatctacacacgcaaacaaacaaacaagaattcgtagaattataaaataataaagcaagatttaaaggtgagactaatatagtactccggtcagttgtaacggccaagggcgacggagaagtcgacggaaacgccaaagagtagaatggctaacccgaggaagttaattagacgtgactcagcgtttgtgctctgaccaagcatcgtagctctctgcatgagtccggtcagtgctgcgacaatacccatataaagtagagcccgaccacctaagacgtgccacggcatcatcctcgtccttgttcccgacgatgattgcggcgctaagaatgtgaacgcaccgaatagccactgtgaaatttatacgcaagcaccataaggttcagttatttttatgcaagtttttttttccatttttatgaaagtttaggtaacgttaaagtagtatttatgaagtatagtagtttaataacctggacgccgaggaggatgaaagtggtgagccgatccaggagtgaagagagccat

SEQ ID NO: 19687 - DNA, 489 bp, Arabidopsis thaliana columbia
  unsure (1)..(489): unsure at all n locations
nnnnnnnnnnnnnnnnnnnnctaaagcgactgcagcccagacaaaatctcttgagtggcttaatcgcctgcgtgcgaatccgaaaattccattgattgttgccggttccgcggcagtggcggtcatggtcgcactgatcctgtgggcgaaagctccgactaccgcacattattcagcaatctttccgatcaggatggtggcgcaattgtcagccaactgacgcaaatgaatattccttaccgcttcagcgaacgcagcggcgctattgaagttccggcagataaagttcacgaactgcgtctgcgcctggcacaacaaggtttgccaaaaggcggcgcggtcggtttcgaactgcttgatcaggaaaagtttggtatcagccagttcagcgaacaggtgaattatcagcgggcgctggaaggcgagctttctcgtaccatcgaaactatcggcccggtaaaaggggcgcgcgtacatctggcaatgcga

SEQ ID NO: 19688 - DNA, 560 bp, Arabidopsis thaliana columbia
cattacgcctattcggctaaaaaaaaaaaacaaagttgaggtttttaaaagatgttaacctgatgaaaccatgttgataagtatcagctttgagcaaatcatcaacagtgatttctctattcaacgccaatttaacagctttccgatgccggcgatcaattctcgcttccgccaaatacaaaaacgcacgcgccaccgcaagagtcgaaacaagtagccaaaccgccgcaaaaagcctcccttgaagcgttttaaaagcacgatcaccataaccaacagtagtcaccgacataaccgacaaataaaccgaatcaacaaaacccaattcctcaacgaaatgcaaaaccaaagcaccaacaccgatacacaaaacgacgacgcataacgctaaacaaactttcatccttatcctcatcctccctttctcaaaatcaataatataatctttagcagagaatctatgatgatgatggtgttgatgatgctgcctcgtttggattccggtgagaatcatactctcttgaagatcaaaacgtagttacaacaccactgagtaaaat

SEQ ID NO: 19689 - DNA, 552 bp, Arabidopsis thaliana columbia
  unsure (1)..(552): unsure at all n locations
nnnnnnnnnnnnnnnnnnnnctaaagaaattcgaaacaatgataaaaccccagttcgctgacagaatctatttctccaattgtttacccgttgatcccacaagtaccagaccaacctattttggtgataccgatggctcagtcggtgcagttttgttcgcgcttttcgcaacgggacatttgggaatcatggctgaaggagaaaatttccttagccagttgcttaatatagaagatgaagttctcaacgtattgctaagggagaactttaatgagcaacttaacactaatgttaatacaataatcagtatcctgaacagaagagacattattttagaaagtcttcagccttatttagttattaataaagacgctgtgacgccatgtacgtttctgggcgaccaaaccggcgatcgatttagcaatatctgtggtgatcaatttatcatcgatttgttaaaacgcataatgagtatctatgaaaatgttcatgtattaactggaaatcatgagacgaattgcaatggtaactatatgcagaacttcacgcgta

SEQ ID NO: 19690 - DNA, 1234 bp, Arabidopsis thaliana
ttttgtctcacgaaaatcctctgtttttaggaatgtcaataatgttaaccttgattctttgggagatccataggccaatgtcttgaagaagtttgtttccagaggcatctttgagagttgtggactctttcatgctttcagacaacagatcttgtcccgcaccttctgcaattacaatcaccatatgaccactctcctttaaccgtttatcgataaattcaaaaagcccgcccgagccttcaagaaaaaatggagattccgggatcaagcaacagtccacatctcggctggctagagtggcatgcattgcaatgaatcctgcacaaacccttaagaatccgtaaacatctcttcggtgctcagctaaacttgggtgaaaactacctaagtctagggaaacttcttaccgctgtaccgtcccattaacttcacaagaccaataccattctcaaagcttgtagcttcgacatgtgctgcattgatagcacgttgagcctcttctacagctgtgtcaaacccgaaagatctatcgataatctgtaccgagaaagaacaaacagtcattatcccaaacaaccataagaatctacgatacaatatcgaaatctcaaaccattagggggaaaaaagaattacaggaatgtcattgtcaattgttttcgggattccggcaaccgcaactttaagcttgcgtttcctaatctcctgcagagacagtcattaaagaaataaccaacgcaattattgatcagaagtagttatgcctacctcgaatatagcagctgctcctttctgtgatccatctccaccgattatataaacctggttaatcccgcgatcttgaatactatctactatcttggtggtgttgtgaccgcctcttgaagtcccgaggatagttcctccgcttctatggatatcattcactgtttttaagtccaaatggattgtgtttctcgcgtaaaatcctctgtaacctccctgcaaccaaatttgatcacaagattaatatattgagctaaaaaattgagagcaatgctgaaagaataactaaaccaatgagacttacatcaatgccaaggattctcttgacaccatacatataagataatccacaaactatctctctgatcacagtattaagcccgggacatagaccgccacatgtaacaatgcaagcaagaacatcatccgactcaaagtaaacctgcgtaaacaaacagtccatcaacac

SEQ ID NO: 19691 - DNA, 441 bp, Arabidopsis thaliana columbia
acacagagatctcctcaacagaactcccagtggttgtcacagttaacacaggtaacatcccgtcgtcattggcacatcagcccgtcatatgggcatctgatagtcgatgcaggtgcactggtcacatagtccgcactgtagatgctcggtcgaagcttttgcaacaagatcacgctcacaatctgcccggggtttctctttgatctggttgtgctcttgtttgctcatgtcgacttgccatatcttcggcagaccctgatgtgatggtctcaggtgaaatctccccagtgagagccctccttcttgagtgcgggtcgttactatccgtcaggcttgaacagtatagatccgcacttaagcttctgagctcacagttgagcgacccaatttctcagacatcagtgattccactgagacagcaacacgtaaaggctcactagc

SEQ ID NO: 19692 - DNA, 604 bp, Arabidopsis thaliana columbia
gggggaggaagggtttaaagtgcaacgatcgatcccgaggaaaacaatgcaaacaatattgacagtgaatctacggagaagctcctgaagatcgaagggttgtgaatcttccgcagctgcgtttagaaacgctaagagctccttctccacctcgtttctcaaaacggtgacgtattctctcagcgactttggggtgaagtcgtgtgtagcaagtctcctctgctttaaccagaggtttccgtcaacgttgaagatcccgttgccgagaaaatctccgaggatctccgtaaaaggtttgcctttgggatagttgtcgaagtttgttttgaggatatactccacgttcgaggggttcgccgtcactacggttctccgtgcagctaagcggcgaatgactaccgtccgactcggggattcggttaggagctctgtataccaatccagtaaccggtttcggttggtatagaatgaaattaagcatccgataaccgggtatgttttcggtgtagagttgcggcaagaatatatcacatgtttcccgcagagacaagcaacagcacaaggactagaagaagaataaaagttgaagcttccattgttgatg

SEQ ID NO: 19693 - DNA, 608 bp, Arabidopsis thaliana columbia
cacatgttctgctgatgatgatgtccaatcacgtaagcctccattcccataaggtcggagtttccaaatgtgaaacaataaaccgaatcgtttccaaccgtgagatgcgggactcggtacaatagcggctgacccgaaaccgctatctcggctccttcgaaaaccagagaaactgttggtaaacggtggagaattccggaccgtatacgaaccggtgaaatccgataacacaaatccatggttccttggaaaacaaaatctgggtcttcgtaaaccgttaagattccgtttgtccggtttaagaaatgggatcgaagtgcggtgtaaacggtccaagcaggaaagtaaactgagtaccggaatcaaccatggtttgaccagcaccggtatgatccggtacgagaaccgatttagggatgggtaaaagcttaccgttaactttaatacccgtgagctggacggtgtaagctacacggtcgaagtaaggtaacggcgtagagatacgaattaacggcgtgtaatttaacggcgttaacacgtgaagttagagtcgctgaggagaagaaccccgggaagtcgtcggtccggagatgcaatagagaattggg

SEQ ID NO: 19694 - DNA, 699 bp, Arabidopsis thaliana
tacatttgtaagcttagtgaaaccatctgaccagcaagttgcttcacaagttcttctctctgtgccggagttccatgttctatgaactgattcaaaaatcacaatgtattttatggacaagatcttttcagcttagaaaaaaagaagaagaaaaagtggctcactttttggatgacataatttccaaaaacgtcagtcatcaattttgaagcttgtggaagaacctcactgaaaacagatgccttctcctcatcggagcagtgctccaacttctgttgaataaaccggctgccatgctgatcgacgctgaagttcagaaaaatgagtagtaaattaagattactatgacatcatttcttttgaacctttcaaaacactacttcagaattaaagaaaatgatagattcggagcagaaacactgcctgaattcaacaacacgccctgcaatatcagaaagctcgagtttccgagcatttggagacttaagttcatcaagaaaagaatgtctttttagatcatcaacgatgctgctggctccccctctgttcccttgccatccaccagggtagatcccagtgtttctacttggcccttgttgatgataccttgtttcacttcgtcttccaaagtggctcatcattccaccaaccggtgaggatggcatcaccggactagcaagaggtgatcctggatactgc

SEQ ID NO: 19695 - DNA, 825 bp, Arabidopsis thaliana
taggatatctattttgtttgagggaatacaaattcctggtgaagcttttactttgttacacgaaccgaatcaaaaacacctagtttctttatttgttgatttttagtgcaataaacttttgtttggctcctctattgctcttctcttaaatctctgtaatactcactgatccatttctctataatggcaacctcttgcctcctctgctctttcagccactctgggtcatcttttgtagcagccctgagatctgcatggtgagctcctgttccacacaaaacaatgttaggtttcgatttttcactcaaatctatctctgtctaactttccccaacattcataaacataacagaagtgtttacctttcttggtcacaagcgcaacgatgctacttgaaatgttcttcagaaccctgaaaatttgatgaaaataatccatctgtttaagaaccaaaaccgaatagtactgtgtagtaccacttaccctccacgggtcccaagggtcctgcattccattggagaatatgatgttgcttccaaatctcttcagtactgtctctatcctctgcaaaagatgaccaaagagcaggatattgaatcttacagccgaagaaactgatccaatggaggggaagaataaaactgaccattccaccaaattctgtggtgatccaatggggtcgaggcttgactccgtatctagtcatgcattgttcttggaatgcctcagagtcattttcgtacggagggagcatgctctggttcgagcagctcattggcatcaccatctctgtacacgcgtgtttccattcaataatcattttgt

SEQ ID NO: 19696 - DNA, 1026 bp, Arabidopsis thaliana
catcccctgacgtatatgtcaatttggtcaacgctgatttcacagccaagcagagaggtctcagactctcagaggaacgtgtgcttttggatggttcaccagagagcccattggagacaataactgttcagctaagcaatgtggagtccaaattcgccagttccctgtctgaatcaggagaggttaaagtggaaggaaaggttaaagacggagcccgcatttgacaaaggttggatcttttgaggtcgatgtaactcttgaaggtagtatcatactgtgcaggcaggtggatcaacctggtatgatcgggactgtcggaagcatccttggagagtctaatgtcaatgttaacttcatgagcgttgggagaattgcaccgaggaagcaagcgattatggcgattggagtagatgacataccaagcaaagagacactgaagaagattggggaaattccagcggttgaggagttcgttttcctcaagctctagtttggtgtgttgttgattcttgaatcttaaatctcaccggtgaagatttgatgttgtttgttggtttaggcaataatgttattttggctttcatacagttttggtaacgttgagagtagtgtctctttgatgtttcaactttatggtttctattacttgagtgcttctttcttctctgaatatttatttcctgaatattagtgaccacaaattggtttataacccaattgaacgaaccgatgtaactatcgtagagaatctgttaattaagccaatccaatttttcaaaattggtttggtttggttcagattaggttcggtttgctctaagagatgcagttgtttgtgaaacgccaccgttttggaaaactgtgtagctcgaaaagatacgaacttaatgagtggagagaaaacacgtgtcctcagcttgaacagataattctgcgactcttgagaaaggaagacgaaggaaggagaatagtagaagaagaagacagggagagtcttgtgatatctacgtagaaggaagatggcct

SEQ ID NO: 19697 - DNA, 742 bp, Arabidopsis thaliana
aaatcacaagtcatctacatattttgctatatatttatagtttctaaacgcttgttaaccaaattcagacacaatggcttcaaaaaaacctgttaatcgcccatccgtgaggcatgcgagtcataaccatccgctgcgtgtctttaaagctcgagacgaagatgaggtcgtctgctctggatgtgagctcgatctaacgggacaagctttcaagtgtataaagtcagactgcgattacttcttacacaagtcatgtttctagctaccccgtgaaaccagtcacaagtctcaccctgaccaccctttaaccttgcttcattccccaccatatagtgagacttacacgtgtgatgcatgcggtgagtacggatccggattcacttacaattgttctgaatgtcaatatgatcttcatgtcggatgtgcgtttatcccggagaccgtggagcgggaagatcacgaacacccactcactcttctctacaatacaccatgcaaaggctgtgaggacggtgcgatgttcatatgtaatgtttgtgaagaagatatgtcggagaatctatgggtttattattgcaaagaatgtgattatgggacgcatgtgcattcttgcgcggtttatgaagacgatgagccaaataatagaggaggagaagaaggagaagcgatgagctcggcggtttcgaggatgaagtcgttgatgaaggctgaggatgagttggcggcggtacagctcgaggca

SEQ ID NO: 19698 - DNA, 846 bp, Arabidopsis thaliana
aaattatatggtagttgcttaatcttatgtccatcttcttctatgcatcgttttcgcgcctagttgtccagtccatttcaactacctacctctaattcttatcttaaaacaacattttttaatttaagtattatgctcaaagactaactagatagaaaaccgttattaaacattaaacgaattaaaagtcttacatggaaaatgtaggtttataaaccacgagttatgattgacaataaaaaaaatgcaaatcatcaatcaaaagagacttgagtgcgactctatatcaaccattgcaattaaaattatctatcacaaaaattttagacagattaagttaatttagtctaaattcactaatttattttctataattagtaattaactatatttatttatttacacattttctgataatttagaaatttgcatgaataacaaatataagattttggaaattagtagcaaatttaattaataattatttttgcctaaatgaaccaaactataaaacctccacatacaccagtcatcaaatttacagagacaacaaactaaagttggtggtgatagagtgagagagaaacatggaaggcaaagaagaagacgtcaatgttggagccaacaagttcccagagagacagccgatcggtacggcggctcagacggagagcaaggactataaggaaccaccaccggcgccgtttttcgaacccggcgagctcaaatcttggtctttctacagagcagggatagctgagttcatagccactttccttttcctctacgtcaccgttttgacagtcatgggtgttaagagagccccaatatgtgtgctctgttgga

SEQ ID NO: 19699 - DNA, 1050 bp, Arabidopsis thaliana
atcataacggataggaaaacttatttcccaatgcaagcttggttctcattgcatcctctgtctccagcaataattgaggtcaaggctttgcatcatttcgattggttatcgaaaggtaaagtacccgttttggaagctatggagaaagatcagagagtgaggtctcaattcagaggtggatcatcggttattgtggctaataacaaagagaacccggttgttgttgctgctaagttacaagctctcagccctaaatacaactccttgatgaatcacatccgtattcatctaccagaggtaagtttgatctgtgactagtgaagaatactcaacagcattagacccgaaacctataacagtctttgcttttttctgcagttgtttccaagcttaaacaaggttgtgtttctagacgatgacattgtgatccaaactgatctttcacctctttgggacattgacatgaatggaaaagtaaatggagcagtggaaacatgtagaggagaagacaagtttgtgatgtcaaagaagttcaagagttacctcaacttctcgaatccgacaattgccaaaaacttcaatccagaggaatgtgcatgggcttatggaatgaatgttttcgacctagcggcttggaggaggactaacataagctccacttactatcattggcttgacgaggtaaaaggaaaccactaactacccaacaatcactatcaagcaataatcatcttaactcaaaactatttacatgtatgtgttgcagaacttaaaatcagacctgagtttgtggcagctgggaactttgcctcctgggctgattgctttccacggtcatgtccaaaccatagatccgttctggcatatgcttggtctcggataccaagagaccacgagctatgccgatgctgaaagtgccgctgttgttcatttcaatggaagagctaagccttggctggatatagcatttcctcatctacgtcctctctgggctaagtatcttgattcttctgacagatttatcaagagctgtcacatggggatccctgc

SEQ ID NO: 19700 - DNA, 970 bp, Arabidopsis thaliana
gcagatagtaaagacacgggagtgtgtatgcggcgtcagtgtaggagcccctcttctctcttctttctccggtacaccggagtgttttataggacgagacattgcttcgtggccaactcctctcactggctcagagggttttgtatgtgaagaggaaacaactggaaaagctttcgatcctggagggactatctcctccttcaccggaatatgagcttttcctcgtgctgctgggaccaatccaaaacattaaatactctgttttggtcaatagagagatcaaagtgaagcgaaggactgacaaacctggtgcaccgccgtggagttggttgtcgttgtagtcatcttcatcgtcttcttggtctagatcgtgatcgtcagggatgtgttctccacgatcgtgctcatgaccatgtccatgtttagtaagaacattcttgatcttctttgctttttccttcactttcttcagaacttttgatggtcctttttcatgatgcccttcttcctctgcattcaaaacagaggaacacgtaaaaaacattcattaggctctctcacttccagattttagaatatcaatagaaaaaaaactttacattgagattagaatctggtttcgcaatacctggatggtgaatccttattggctcctgtgcttggtgatgaccatgagtacgttgcaactgcgcttgtgaatccattttatttgctagatttgattttgttcttttcctttctatgcatccaaattgtttctgagaaaatatgaggagcttcttcaaagttttatacagagtcagagagtatgggaaagaggaggaagacgcatagccgaactacctctggatggctgtgtcctctgtactttatcttacgaaataccacgtgtcatgccacgtatcaggctcttgattgtgtgcgtggcgctctcagcctaatctttatccgagaagaaccgtcgatgtta

SEQ ID NO: 19701 - DNA, 591 bp, Arabidopsis thaliana
ggatccccttctttgagtatataacgtttgagccttttcttttctcgtcatgggctatttctcattttaaatacttgttgaacagatatttgttttatctgcggtatccccagagaagatgtcctcagtattgcagaacattaggaaagttcttaaggtatcaaacacatcctttctcatgtacttctggacatccatcttcctctgttagactgaattcctcttgttgagttacttcttattattctgttttcagccaaatgggtgtatcctcttccgtgactatgctgtcggtgatcttgctcaggtttgatccaccttttattacttcagaaattcaaagttatcgctactcgtatgcccattttgatgcacttgaaacgaaaaaatatttctactacagtttcatgcttaaaaaaaaacattgtggtctggctttccttttaggaagaacaaccacttcttaagagatttagtatcctttagaatacgaaggcgtggttaccccttatgtgtttcagtatttcatcaacaggagaggtctctgggaaggatcagaggatcagcgagaacttttatgtgagaggtgat

SEQ ID NO: 19702 - DNA, 953 bp, Arabidopsis thaliana
ctaaaatgctatttgtaatttggtatatgtgaatataaattaatggcttggattgatttgttggcagactttgttttgtggtagtcatttattctaccgtgtgaatgttaacagtgggatctacattttcagtcgacgacttcgaaagtcaatggttatattctttgatcaagtccttatccacttgaattatatatgggaagctcaattattgatgaattctagttttgtcactatttcctaacaatcaccaaaattggagatttttaaatcttatctctggtgattgtttcgtacgtgtccaagattatgcaactctaatgtcaaccgtcttccatatattaaactacaacttggtgaataatcaaaaccaaactgagaattgtttagcggaaaatggaaatgacaaatcatccacatattttgctatatatattttctaaacgtttcttacactgaaacaaccaatcctatacacaatggcttcaagaaaacctgttaatcgcccatccgtgaggcacgcgagtcacaaccatccgctgcgtgtctttaaagctcgagacgaagatgaggtcgtttgctctggatgcgagctcgagctaaccggacaagctttcaagtgtatgaagtcagattgtgattacttcttgcacaagtcatgtttcgacctacctcgtgaaaccaatcacaagtctcacccaaaccactctttgaccctgcttcattcccaccgtacggtcagtcttacacatgcgacgcatgcggtgagtacggatctggtttcacttacaattgttctgaatgtcaatatgatgttcatgtcggatgtgcttttaccctgagaccgtggagcgcgaagatcacgaacacccactcacgcttctctacaacacaccatgcaaaggtcgtgaggacggtgctaagttcatatgtgatgtttgtgaagaaaaatg

SEQ ID NO: 19703 - DNA, 963 bp, Arabidopsis thaliana
tatatctattgttctttatttttgaaaccatatttcgcaaagaaaaatatcaatattcataaatatattcgtcccttcttgatcaccaatagtatctacgttttggtcatcccacagatcaagtgcagcattcctcgcatcattctcaatacgtgcctctagctgcatagccgccatctcgtcttgcgccttcatcaacgactttatcctagaagctggagaactcgcttctccttcttcgtcttcatcttcttcttctttcccttggtcttcatatgccgcacatgagtgtagatgtgttccatagtcacaatccttacagtaatacatccatagatcttctgaaatagtttcatcacaagcgctgcaagtgaagtacgtgtcttcacgtcctttacacggtgtgcaataaagaagagtgagtggatgttcatgatcttcacgatctacggtttcagggataaacgcacatcccacatgaagactgtagttgcagtttgagcaatggtaagaaaatccagatccgtattggtcacacgcgtcacacgtgtagacagaccgatcatctggtggggaatgaagcaaggtcagagggtggtcctggtgagacttgttattggtctcactaggaaggtcgaaacatgacttgtgtaagaagtaatcgcactctgactttatacatttgaaagcttgcccggtcagctctagctcgcagccagagcatgcggtctcatcctcttctttggctttaaagacacgcagcggatggttgtgacttgggtgcctcacagattggcgattaaccggtttggcctttggttttcttgaagccatttagtatgttattgatttgtgtttggttttggttgttttgagggagaagggtgtggaactttatatccaaaaactgcaagaggacttcattataattgtaggtttaatgagtatgcgtttcgttttatt

SEQ ID NO: 19704 - DNA, 766 bp, Arabidopsis thaliana columbia
ctactcacacaaaaaattctgcataaacccaaacgattaaaacccacatgagattaatcgaaaatcaacaaaaaaaaaaacaaaaatcaaaacctcaaaagctcgagattaaacctaatttagtagccgaatagaatgcagaatcgaaaattcatcaaaagtcaaagagagagagaggaagaagaaacatacgggaatcttgtgaagaggaacctgagatttaaagtagacgtaatctccgggcgtcgaagagacgcgtttcatcgccgatcggagattttcaacatccgatcgaatttatgtatttaatttcgcttttgctcttcacgaacaactttgcaattaatcttttttatttttttttgctctgattttcgataggaattatataacggcgagataacagagtctcctatatcaactgcctgtcaacgttgacgccgtgaatggtccgtgattgtagcagtcattctcagttaacgacgtaaagtatgtaataattaatggtcatcatgtgactcatcaacatctattttcacatatgttttgattagatttcggtatgaatcaatttccaagaatatttggattttgatataatttctttcattttattgatctgtctttcccaaccgaattacccataggtttaatatatttggaataattgcagaaaaatgcacaaacttttctttatgtttaatttttcatagtgcaaatgtaaaagtagataatttagcacgaaagattcgtatcaaaccgtatt

SEQ ID NO: 19705 - DNA, 593 bp, Arabidopsis thaliana columbia
gaaccaaaccaaaccggcacttacgagagcagtagtagccactgatgaaatggtacatagtctgagcaagattgagcttgctgattggcggcaacacaccgaatgcgtcacaagccaataggatcacgttcttcgggtgtggtccaacgcacggtatcttcgagtttggaatgtactctatcggataagccgcacgtgtgttctccgtcactgatttgtcagtgtaatccacttctcgtgtatgctcatcaaacacaacattctccaaaactgtccccaaaaccaaaacaaaaaaagtgaaaatgttatggaaacgtacaatctaacatttgtaaagtgagttttgtttttaagtaccggttccaaacttgatagcgttccagatatcaggctctttgtccctagccaaatcaatgcatttcgcgtaacaaccaccttcgatattcgaaactccagcctcactccaacaatgttcatcatctccgatcaaatacaggttatggtcagtcgacaacgtagtctttccggtaccagagagtccgaaaaagagagcaacatctccatctttgcccatgttacaaccagagtgaaga

SEQ ID NO: 19706 - DNA, 714 bp, Arabidopsis thaliana
ggtcgtttacttagtcgctgggattccgtatagttggtattggtctaagcatgagaagactaataaaggctttatggttctctacggattgattttcttctttagcaactttggccctaacacgacgacgtttatcatcccggcggagtgttttccggctaggtttaggtccacgtgtcacgggatatctggagctgcagggaagtttggtgcgattgttggcactgtcggtttcttgtgggccacgagacaccatgaagaggacggttttccagatgtgaaacgtgtgagaatcgcgtttttgatccttggcggcgtttgtatcgcgggaatgatcgtaacgtatttgttcacgcgtgaaactatgggaagatcgttagaagagaacgaagacgagattgtttccacgtcagcagggtcgtctcctgcgaatgagttacttcggagacaatactaatttcaagatcacgacaaaagcaatcgtgctttgatttattactctctaattaactctaaatggtccttgggtttttgattgttgatactaaagtttcttttttgtttttgttttctctcagtctcatgtttacataaatttttgattccgtgcatatatttgcaagaactcttcactatgatccttacctttgcaagaattcttcacttaagcccatttggcgccatatagaaagaaagaaaaatagatacacgcag

SEQ ID NO: 19707 - DNA, 543 bp, Arabidopsis thaliana columbia
cctttgctctgtagtttttggtacctcggtttgattcttgactccaagctataagtaaagtactcagggtactccacgagttctttcatcggtctccccatctcggtcttgtaaaagtagtaactattcttcatgagttccactcgggaacagaggatctgaggacatctcacaaccattttcgcaatgtcctcaacttgaaatgccctgcccaagagaaactcaatgggtttcattatcacattctgcttaagacttacaatctgtggcattttctctaccacacgagcaaatccttcaggatcaatcttgagcttcaagctgaaaaagtactgttgtgtagacatcttggctttcactggtaacccgagaatttgaggatattgagctataagcaaaggtagtagttctttcttgacgccaaaactaatcaagcaatctacgtttggtttaacagtctcctcgagattgtatccactatatatgaacgtttctctagcatcctagccacaattttctttggcaaaccaatggaaattagat

SEQ ID NO: 19708 - DNA, 595 bp, Arabidopsis thaliana
cggggaggtagtgacaataaataacaataccgggctctttcgagtctggtaattggaatgagtacaatctaaatcccttaacgaggatccattggagggcaagtctggtgccagcagccgcggtaattccagctccaatagcgtatatttaagttgttgcagttaaaaagctcgtagttgaaccttgggatgggtcggccggtccgcctttggtgtgcattggtcggcttgtcccttcggtcggcgatacgctcctggtcttaattggccgggtcgtgcctccggcgctgttactttgaagaaattagagtgctcaaagcaagcctacgctctggatacccattaggcttaatcagtctttttatggcgttcatactcttatttattatgtttatcttacgagcaacaaacttaaaacattgtgtgagtcatatcccttgcaccacaaattaaagtctcctgtttgctgtttacacctcacacatatagactgcttaatattatttttgcttcacagacaattttttctctagtttctttcgaagatgactgggatcttgcttactgatgtatacagtctcatcatatgacaggt

SEQ ID NO: 19709 - DNA, 527 bp, Arabidopsis thaliana
taactgtgaagagtccaaacaggctaaaagatatctcaatggtatatactatagctatagtagcttacccttaattatctgttctccagaccagtctgatatatactgattaaatcttgactactattacttattgttgcttacagggttcttagttgatggaaagccaatagttgttcgagttgcagagcgcaaagaggatcgaatcaagaggttgcagcaatattttcaggcacagccacgccagtacacgcaagctccttctgccccttcaccagctcagccagtcctctcatatgtgtccagctcatatggttgctttcagccattccaggtcgggacatcttattactatatgggcaatcaggtgccacaaatgtccggtcaccaaaacatcaccacctacgtaagcatttctctgtatcttcaaaaatatccaaaacctgtcttttgcattaaatgtcactcatacttcctattattataactcaggttccagctgggaaagtgctctcaaggagagaaga

SEQ ID NO: 19710 - DNA, 767 bp, Arabidopsis thaliana
gcaatgtcgttctggtgttcaaaagggtgagttttcaagtttaaatgtctttttcttcgtcctgctacaactacaaactaatgatcttgtctcaatataattcccgagttaatgataaagttggtttttttttttgggcatgtagctgaggattggttaaaccctgatgttgtactggaagctttcgaagctagggctctcagaatggctgttacgtgtgccaaaaatctcagcaagtttgagaatcaggaacaaggtactcttctaactccatgaatccagaacaattggttgccatgtcagctcataagccaaaggaccaaactctcacaaattcttcctgtctgcaggattccaagagctcttggctgatttggttgaggccgctattgctcattgccaattgattgttgtttccaagtaatcttcttcttcaccgtttacacgtatcaaacaagttaatgattctccctctcaatgtcagttcctgaattttgtgatctttgtcttggttaggttcatagcgaaactggagcaagacataggtggcaaaggagtgaagaaacagctgaataatctgtgttacatttatgctctttatctcctccacaaacatctcggcgatttcctctccactaactgcatcactcccaaacaagcctctcttgctaacgaccagctccgttccttatacactcaggttctttctcctctctctctccatctctgcatttgatcctttttaactaagttttacacgtttttgt

SEQ ID NO: 19711 - DNA, 584 bp, Arabidopsis thaliana
cccctcgaaactgttacagatgattgtctacatacactgttttctcaatatggaactgtctctagtgttgtggttatgagggatggtatgggaagatctagaggtttcggatttgttaacttctgcaatccagaaaatgctaagaaagctatggaatctctctgtggactacaacttggtaattcaacttctttgtctgaacctattatttagtatcttgtcattagaccatagttcctgatttaaaaacattcctttgacaatctgcaggatcgaagaaattgtttgttggtaaggcactcaagaaagatgaaaggagggagatgctgaaacagaaattcagtgacaactttattgcaaagcctaacatgagatggtccaatctgtacgtgaagaacttgagtgaatcaatgaatgaaacaagactgcgagaaatctttggatgctatgggcaaatagtttcagctaaagtgatgtgtcatgagaatggcagaagtaaaggattcggctttgtgtgcttctctaactgtgaagagtccaaacaggctaaaagatatccaatggtatatctatagctatagtag

SEQ ID NO: 19712 - DNA, 559 bp, Arabidopsis thaliana columbia
aacaatatcatttccattattcgttactgcacgtcttggatcgatgtcaaccgcagaacattcaacttcattactgagctgtttacatcaggcacccttagagagtaatgagaatcccctacagtgtgtgttaaacaacaatataatcttatgcttgtgcagaattccttaaagagagaagcttgttgtgtgtgtcttacatctgcaggtatagaaggaagtatcaaaaggttgatatccgggcaatcaagagctgggcacgtcagatcttgaatggtcttgcttatctccatggacatgatcctcctgtcattcacagagacctcaaatgcgataatatcttcgttaatggacaccttgggcaagttaagattggtgacatgggcttagctgcaattcttagtggatcacagaatgcgcacagcgtcaataggtattctatgtctttctctatgtttttgaatagagttttgtgagtccataattaatctttgcattttgcttgcatataccattaggaacgccatgaattatggcaccagagctatatgaagaagat

SEQ ID NO: 19713 - DNA, 877 bp, Arabidopsis thaliana
actgatcgtgattcacgaattttccatcgtccggcgagatccacctctccggtttgaattccaagcaatcctctccccacgtgctcttcatcctccccgccgcgtagatcgaataagtcaccgacgatcccgccggtacgaaagttccgtccggtaagatatcgtcgttcacgacgtgctttgaatcttccggcaccgacgggtaaagcctcaacgtctcagagagcgcggccttcaggtaaaccaaccggtcgacctcatcgaattccaacggctccgccgtccacgacgatacatcggttccacgtgtctcaatcagaacggagcatatctcgcggacgatcttatcctcaaccgtcggatgcgtcgtgatgagccagaaaaaccagctcaacgctactgatgacgtgtcacgtccagctaggatgaagttaagcgccacgtgtcgtaagaacgtctcgctgtacgactggtctttcttcttcatgaaacgagagaggagatcgtcgtgacgctggaccccactctctcgctgactcagcaattcttgcttacgtgtattaaaagacagcatctaaatacccatcgatctctcctaggctccggctcaagctgacttctaagccgagtccaagccatttcttcagcctccatagaaactctggtagaataaaccgctggagagaagcttcggtggctcggtcgaaagccgaggcgaaaccgttctcgggaagtcccggtgcgcaggttcgagtgtctttaccgaatgctaaaccgcaaatgttgtcgaatgtgagccgtagtattaagtcttggagatcaaccggctcgtaattgttctgagccgtttcgagaattggacaaaaccggagcttga

SEQ ID NO: 19714 - DNA, 1097 bp, Arabidopsis thaliana
gctccctagccccggacccgtccccccctcgtagtgttggttcctcttcgctcgcttctgtctcttcagttgctttgccgatctctcagatccagccgtctgcaactctcccagatgcccaagctgccgtccctcagacagccttggccattccttctcctcctgttcctagatctggctcagatctggaaactttgcctataatcgatgtgacctcagcggttacccctgtaccggctggagctccttctgcggctacctctgttccagcggtagtccgatcagtaccttgtgaagtgactccctctcggggtccgagtccttctcctgctactgcgccagtacacccgtcaaggttgttgtggcagaccagtaaacaagcctgaatctaacacagctgaggttgacagctggtgtgatatcttcaaaggaacttctaaacggcttcaaaagcaaggcacggcttttcacacttccttctggagaggcctgtgtcaagattcctgattcgattatcgaaaagcataagaaatcttgggagtcttttatcctgggtcaattctattcggatccccctgctcaaggcaccatccacacaattgttaatggaatttggagcaagcaattccgggtatcactgtctcaagaatggagggtaatgccttccttttttgcatccccaacgtccaaaccagaactcgtgtcctcagccagcgtctttggcagatcgacggacagactatgtttgttgcaaagtgggagcccggtcttactcctgtgaagccggagttgactactgccccgatttggcttgaactgaggcacgttccttttcaattctttaatgacaatggccttgagcacattgctagtttggttggcgagcccaaattcctccatcctagtactgccaacaagactaaccttgaagtggcaagggtcttcactataattgatccgaggaaacctcttccggaagcagtcaatgttcactttgcttcaggagatattaggcggatcgaggtctcgagcccttggatgccgccagtctgtgctcactgtaaggaggttggccacagcttgaggaaatgtaaggt

SEQ ID NO: 19715 - DNA, 962 bp, Arabidopsis thaliana
aatcctcatcagcgctgagaaaggtggggaatttttaatcgacacggataaacagatgctaacagttgcagctacaccaattccaagcccgcagagtagtggagacttctcagggttgggacagtgtgtctctggaggtgggtttgtaatgagctcgagagtgcaaggggaagggaaaagcagcaagcccgttgtacaattagctatgagacatgtaacttgtgtggaagatgcagccattttcatggcacttgctgcagctgttgatcttagcattcttgcttgtaaaccttttaggagaacgagtcggagaaggttccggcattactcctggtgaagaaaggaactctcttttgtgtgttttagtgtacagtttttgaattggactcaaagtctcattgtattaggaagaaactggcttaaggattaagaaatttcactcttctcagaatcagaccaactttatatcaatggaaaaacatcaagtagacgaggtcaagaactaagtagatcaaagtctttaaagcaactaaaccagtcaacagaaatgataattctagtctcataatgaaatcaaaaacagcaaaagaaaaaaagaaaaaacttggaaagaaagaaaaagctcaagtaaaccttggttttgcacttaaaacctttagttcttcttatcacctcccacttcaatcttcttcttctttgcagtggcctgagaatacaagaaggtaccgaaaatcgcaatggctgatccaagagcattcagaggtctaacaggattcctaaacaccaaaacagtggagataatcaccacgactcgcttcatggtgttccgacagagaaagtcaatggactgatctcgtcgagtgcctggtaagaagactggttgtacagatgatagaagacaccagagagcaaaaccagaagtagaacgttgatggtgtcccacagatgcaatgggtttatgg

SEQ ID NO: 19716 - DNA, 1323 bp, Arabidopsis thaliana
tcaaatatcagcctttgattgtgattttatgttttgatcattgtgaattctgactctttacatggataataactggtagtgttattaagtgccttatcttgtgtttatctcccatcttttcaatcttaagaactgatcataataactgccttcagattttctccaggtgatacaaatttagtactacgggagtttgaaaaatgtggtatggtcttgaaagatgttcctggtccaagaaatgccaactggatgcacatcctctaccaggttactgttcttcccttcaaacctgtttgatgcatgttgataagcattcatagttcttctagacgagtcatcatacatgatagtctaatcaaatcttttatataaaggaaacaacgaactgacaatggtctgtgtatttgatacagaaccggtctgatgcacataaggcgctgaacaaagcagggatgatgataaacggagttgtaatagtaggagtgaagccagtagacccaatacagaagcaagcgttaaacgagagactcaacaaccaaggattcatgcctttacctccaccatcatccactagaaacactgctcgacccctgtctcgtcctcagtacttgcaaaacggcagcgctttctctcctcaaccaagtggtggcgctatggcctctccgtcaaagtcaatggtctcaaagttctttgacttgatgttcggtgtttaaaagctacttcaatggcatttcccgaatgattcttctttacacatagtttgaagtttttgagagcagagtggctaagtaaatcttagagcgtggtcaaaattaaaaattgtaagaggtgtttcaaattgtcttttgtattgacgacggctaaaaatttggtataaatctgattattaaaatctcctcttttagccgtttcattgttgtttgtatttgagcagactagtcatgcctcgtgaatgattgaaagaaagacactgattccatggaagcctcacgggcagtgttttagaaactccattaggaactagccacgtatctagcctgttgtgtttatatatcccctctcgcatgtaaattacattacaaaactcagtaactcacaatggcgaaacagcagagcagaaacaaaacccgaccgttgcgagtgcagaagcgaacgttgatatccgcgacgtggtcaacacagccatcacttacggcgaagataaccgtcacggcggcgggaaacgcaatgacgtggccatgtttgtgctaagagccatgtgcatggccgtatcaacggtggctgttacgttaatggtaacagcacgcgagactagcatgacca

SEQ ID NO: 19717 - DNA, 745 bp, Arabidopsis thaliana
ctttcgggaaagacccgcggacttgtgcaccgggtctaccggtgaacacattcgcggtggctttcgatcgagccacggaggcttcgctacaaaggtttatattgccggagatattatgcatgttcaagagatggctccgactcggcttagaagtcagcttaacaagaagcttggtccaggtagataattatttgtctgagattattacgacacgtaaggaagaaatgatgactcagcataataatgggaaacaccacgacgatctcttatcgcggttcatcaagaagaaggagtcttactccgacgagaccctccagcgcgtggcgctcaacttcatcctagctggacgtgacacgtcatcagtcgcgctgagctggttcttctggttgattacgcagcatccggccatagaggataaaatcctccgtgagatctgtaccgttctggttgagacacgtggcgatgatgtggcgttatggacggacgagccgctttcgtgcgaagagcttgatcgattggtttttctcaaggcagcgttatcggagactttgaggctttatccttcggtgccggaggattcaaaacgcgccgtgaaagacgatgtgttaccggacgggacatttgtgccggcgggatcttcgattacttattcgatttactctgcggggaggatgaaatcgacttggggagaggattgtttggaattcaaccagagagatggatttcgcaatcggacggtgggaga

SEQ ID NO: 19718 - DNA, 1296 bp, Arabidopsis thaliana
gtaagatccaatctctagatagaatatcgtcatcagtcatgaccataaacatagagaccagttattgatgttgtataattggcagggattaattataaaactcagcagaacaggttgtttcctctgctggcatctgcatatgcatttcggtttgtaggggaatggctgaagtggctctacactgatgtaacaaaaagactagaggccagtgatttcgcaacattgcctgaagctcatgcatgcactgctggattgaagtctatgactacctcagccacctctgtatgctttcaaatcttaacttattaaaataagttgaatattatcagctaaactgtgttttttttgttgttggttaaaaggatgggattgaagaatgtcgtaagttatgtggtggacatggatacttgtggtgtagtgggcttcctgaattgtttgctgtatatgttcctgcttgcacatacgagggagacaatgttgtgttgcagttacaggtattcttaaacttatcttcttgaatatcacttttaagaatcatttcaagcccctactctttataatggcaaatgaaatggtcttaaaattttgttatatatgttttaaaacaatggatcttcaggttgctagatttctgatgaagacagtttcacagttgggttctggaaaggctccttctgggacaactgcttatatgggcagacaaaacaccttttgcaatgcagttccggagttcgaaatggtgattttttcatggatactaccataatatttatactctttatatctacctgttttctgaatttatcttggttgagaatgtagctagggactggttaaaccctggtatggtgttggaagcttttgaagcaagagctttgagaatggctgttacttgtgctaacaatctaagcaagtttgagaatcaagaacaaggattctcagaactcttggctgatcttgttgaggctgctactgctcattgccagttaattgttgtttctaagtaagtaaataagcttcttcactaaaattttacaaactaatcaacagactcaaatcataacttacgtgaaaattcacaggtttatagccaaagtagagggagatattgaaggaaaaggagtgaagaaacagctcaagaatctatgctacgtctacgcactctatctccttcacaaacaccttggtgatttcctcagtacaaactctgttactcctgaacaagcctcacttgcgaaccagcagcttcgatcactctactctcaggttcgaccaaacgcagtgccctagtggacg

SEQ ID NO: 19719 - DNA, 1076 bp, Arabidopsis thaliana
cctcaagctttcattcgtctttcggttggctctcttgctttgagaattcccaaggtccttataaactctacttcaaaatctaatgagaagaagaacttttcttctcaatgctcttgcgaaataaaactacgaggctttcctgttcaaacaacatctatccctttgatgccgtcccttgatgcagctcctgaccatcacagtatttccactagcttttatcttgaagaatctgatttaagagctcttttgacacctggatgcttctatagtcctcatgctcacttggaaatctcggttttcacgggtaaaaagagtttgaattgcggtgttggtggcaaaagacagcagattgggatgtttaagttggaggtaggtcctgaatggggagaaggaaaaccaatgattcttttcaatggttggatcagtattggaaagaccaagcgggatggtgctgcagagcttcatttgaaagtgaaacttgatcctgatcctcgatatgtttttcagtttgaggatgttactaccttgagccctcagatagttcagctccgtggctcggtcaagcaacctatcttcagttgcaagtttagcagagacaggtgacatttgagttcttcatatatgcataaatctctctctctgtactgtttgtttagttactaatggtggtattgattcttcagggtgtcacaggtggatccgttgaatgggtactggtcaagttcaggcgatggaactgagcttgagagtgagagacgtgaaagaaaaggatggaaggtgaagatacatgatctctctggctctgcagttgctgctgctttcataacaactccttttgttccatccactggatgtgattgggtcgcaaagtccaacccgggtgcttggcttgtggtccggcctgacccatctcgaccaaacagctggcagccatggggaaagctcgaagcttggcgggaacgcgggatcagagactccgtgtgttgcagattccatcttctatcaaacggtctagaagttggagatgttttaatgtctgaaatcctcatcagcgctgagaaaggtggggaattttt

SEQ ID NO: 19720 - DNA, 1508 bp, Arabidopsis thaliana
  unsure (1)..(1508): unsure at all n locations
tgtatctttgccgtgcctttcttggctaagaagcaaggtctcgtgactgtcacgtgtgaccctaagaatctcgaacacatgctcaagacccggttcgataactaccctaaaggtcctacatggcaatccgtcttccacgatctcctgggtcaaggtattttcaactccgacggtgacacctggctcttccaacgcaaaaccgccgctcttgaattcacaacaaggtacctaaccgctcggtttaatcccttgagtgaatttcacggttttaattattacatttgacccaatcgaattggtaaattgctccggtttattaatacttatagtcggttcggtattgttatgatgcaggacgttgcggcaagccatgggtaggtgggtaaaccgaggaattaagctccggttctgtccgattcttgcaacggctcaagacaatgcagaaccagttgatctccaagacttaatactacggctcacattcgacaacatttgcggattggcgttcggtaaggacacacgaacctgcgcaccggggcttcccgagaatggctttgcctcggcattcgatcgagccaccgaagcctcgcttcaacggtttatcataccgaagtttatgtggaagctgaagaaatggcttgggctcggtttagaagtaagcttgagccgaagcttaggagaaatcgatgaatatcttgctgctgttataaatacacgtaagcaagaactgatgagtcagcaagaaagtggaacccaccagagacacgacgatctcctctcgcgtttcatgatgaagaaaacagaatcttacagtgacacgtttctccaacacgtggcgcttaactttatcctagctggacgtgacacgtcatcagttgcgctgagctggttcttctggcttatcacgatgcatccaaccgtcgaggataaaatcgtccgcgagatctgctccgtcctgatcgagacacgtggcactgatgacgtcgcgtcgtggactgaggagcctctagggttcgacgaaatcgaccgtttggtttacctgaaggcggcgatctcggagacgctcaggctttacccatcggtgccggaagattcaaaacacgtcgagaacgacgacgttttaccagatgggaccttcgttccggcgggatcatcggtgacgtactcgatttacgcggcggggaggatgaagtcgacttggggagaagattgtctggaattcaatccggagagatggatttctccgatcgacggaaaatttatcaatcacgatcaatatcggttcgtggcgttcaatgctggaccaaggatctgcttggggaaagatctggcgtatcttcagatgaaaacaatagcggcacggtngcttctccgtcaccggcttacggtggttccgggacataaagtggagcagaagatgtcgttgacgctatttatgaagaacggacttctggtgaatctgtataagagagatcccaaggaatcataaagagtctagtggtgaagaa

SEQ ID NO: 19721 - DNA, 957 bp, Arabidopsis thaliana columbia
cagattcttctgaacagttctcccacccgaccaatttgcactcgatgtctttgtcgttgtccatttccaattttttttaaagggcataacacaatattttgttcttgggattgtgttgaagattcggccatgcgatcctaccaacgacttctctattcgtttctatggggttaaggagtagcaaagataaaaaaataagttgaaggaagtaaggtctaggaccagccgttgcatcaggaatctatcactctgggttttatctggtggctcctacactccgtacagccgtctacacttgtgtgaagcttaacgatagcgagaccgaccctcctcgtcaggttaggagcttttgtcgttaagtgagtgagagagtacttgttttttttttttttttttttttgatcaaagagagattacttgtttacaagtcgtttgctttgaatactgtttgtgtgattatgtaatgatatgaaaagctttagaagcttgtgtgaaggaaaaaaggcgaagtccacgctctactatgtgtgtgcatagggtcttgtcttgtccttgtcaaattgtgtctttgtaatacacttttatgtgtggttttgggtttctttgttgctttgctgttgtattagagtcgttgtattacctcggagacgagactgtttttagtaataaaatatgttgtttgtgtaagagtttctattcaaaacattgattgaacaatttttgttatgtcgaagattcggtccaagaaccttaaggtgtggactatggatcaaatatgccaatgaagataatttcacaagcccaataagaagtagagggaacaatcggatgcatctaaataagatttaactgttctttaactaaaagtgattttttttttgttttatggtttttgggtttatgattttaggattttattaggatttttttttctattttaatacttatatcttttta

SEQ ID NO: 19722 - DNA, 440 bp, Arabidopsis thaliana
tggattaatgcctatgattgaccaggtaaaacctaaacttgatcaatgaaaagactctgttttttttttctcttactctaatcctttaggtcagtttaaatggtcttgtactccaatcttgtatttttggcgctgtaattttagggtgaaaaagatgacaagatcattgcagtgtgtgttgatgatcctgaatataagcactacactgacatcaaagaacttcctcctcaccgtctctctgaaatccgtcgtttcttcgaagactgtatcctttttcttcagtgttcctccttattcatctctattgatctctcaacaagtattagtttttcctttaactctaatatcttacagacaagaaaaacgagaacaaggaagttgcagtgaatgattttctgccatctgagtctgcggttgaagctatccagtactcaatgtaa

SEQ ID NO: 19723 - DNA, 1025 bp, Arabidopsis thaliana
tcgactctaccctgaatgccacttttgttcgtgttacatgggcttatttggaccatatctttgtaaaattcatgtccacttaattttctttaacgtgaccgtcccttaatggtttcttttgtgcgtgttaaattgaaccgaatctttagattgctatttcacaaaatctccgacataagaaatagttcaatcaatgttgtaaacaatgttttgaacagaaacttctttacacacacaacacattacacatgccatagattttattaataaaaacagcctcgtctccgaggtaacatacaacagcaaaccaacaaagaaacccaaaccacacataaaagtgtattattacacagacacaatttgacaatgacgagacaagttcgcatcaggtttatatagaccgatgccatgcgtggacttatagtcacatcgccttttattcttcacacaagcttccaaagctttttcatatcattacataatcatacagtaaaattatacaaagcaaaagacttgtaaacaagtctctcactcacttaacgacgaaagctcctaaccggacgaggcgggtcagtcacgctatcgttaagcttaacacctgtgtagaccgctgcaccagatatggcaccaagtgtaggagccaccagatacacccatagtgacctatagtttcctgatgcaacggctggtcctagagttctcacaggattcatagatccaccagtcgatggcctggcaaaaacccgaagtgttttagaaacttttttattaaagtaaagactcttaaaaaacctttaatatggacataccctgcgactagaatattgagcatgaccgtggctccaacggctatacctgccaattctccaacctgctcattaaacccaatgaagaaagattttaattagggttagttactaaattactatcactggctatttaatctgtataggatgcatgatgcgttgatctattttattgtattcgtgtttctttacgtatagaggttatatactaaaggacca

SEQ ID NO: 19724 - DNA, 956 bp, Arabidopsis thaliana
ttgtaccttttcttgattgggatctggaatttccggtggagaccaaggcacccgccacacatggacacacggttgtcccatgcagacgctgttcaccccgacgagcttgatgaagagtttgatactttcccgacttcccgatcctctgagattgtgcggatgcgatatgaccggctcagaagcataggaggacgggttcagaccgtgataggcgatctagcaacacagggagagcggtttttatcgctgctgagctggagagacccgagggcaaccacattgtttgtgcttttctgtctcatagctgctatcgtgttgtatgttacgccgtttcaggttgttgcacttcttgctgggatctatgtgctgaggcatccaaggttcaggcacaagctaccctctgtgccgctcaatctcttcaggaggctacctgcaagatctgacagtctattatagataaatttatctgcatcagcttttgtaaaacgtttgttggatttaaaaaaactttgggtttaatgcttaattcggtcttttcaatggaattttagttatattgattgcaacatcataagacggtcaagaaatccaaatacatatatccatcaaactcaaaatctttggttgggtttctgtttctcatctgtaattctgtttccaactaactttttttgtccaatgaataacagtttctgcccagactataagggttcgatttaattcacaaacatatgagccaacccttgaggtgctctcccgccaacgttaacgttgtggagcagttgctgcagccattgcattgcaggtgggtcatcctgccaaattaagtgagacgattagctaaaaacagtcaagtctcaagtatcaaaagaattgagtcgtgatacaataaactgatagataacaatttggtatcagaatcactaataattggttatgatgctatcaagagatat

SEQ ID NO: 19725 - DNA, 541 bp, Arabidopsis thaliana
ttatcaaaacataaataatcattgaaacaaagaggtacacacaaacacacctccaatgttggtgacatcaacacttccgagaagctgttccttccatttcctcagactctcatcatcctacatgacccagattcaacgacaacaaattcttcaaatatctgacaatgtaattcaaataaatagggtggaaggaagaagaagaagaagcaaaaaggagaaaccttgtccttctcgagatgttctttgatagtgtactgaggacccaattgcaatttggaatcgtcgtcttcttcctcctcggtagcacaaagagaagattcgctcatctgtcgactaagagcatcgtcgtcggctcttgttctggaggaggagttctcatcatctccatccttgttgttcttgttgttgttgttgtcgtcgaaccccatgtccctggctccagataccaaagacatcaatcagctctctcgccctcaagaattttggtgtctttgtaggggtaagggatgtaatcagagggaaatgagggcaaatttaggga

SEQ ID NO: 19726 - DNA, 861 bp, Arabidopsis thaliana columbia
tatttaattattttaccttttaaaaataatttagttacctttaatgggcttgcagacaaatagtttgggccatgaagagcaaatctattgggccattaaggcgtataattaattcccaaaggcggtgtgtgtctcttctagggcttccaatttctcttgtatatatacatatccgcgcgcattctctcttctcatctcatctcatcttcgtcctcctcatttccttggattccttattctttgtttttttttcttttgtgtatttgtctcgattttgattttagttacgtgacgagatttctctcccatgaatctattaccaaaaagatggagcaatctgataattgtgattgcataatccactggtaaacgtcacaaaccaatagggtaagcataaggacgttgatggagccttagggcttctccgtcttagctattgccactggctctcatattccattgccttgcggacgggcgttgctgcttttaccgtttgggacctgccatgagatctatattcctttcttattctcaaaagttctctgttcttttggttttcaatttttctaattagggtttagtagccgatgtggatatcagattataaaagaacaccatctttcgggactgattgacttcttttgaagttttgctgatacttctgcaattctgaggctttctttatttgtttggttacttgtggtttgattagaagtagaggctgtgatgattgagaatgtcatgcaccactctgattttttgtgctgataatcatctctaacccatattttatctgagccttttctgaattgttatatgacttttggttctgaatggttattactacccttttagatgtgt

SEQ ID NO: 19727 - DNA, 729 bp, Arabidopsis thaliana
ataatataaaaccaaatgtgtttttctttaccttgtgatggtaccatctacatctgacacaactatgcgcgaattccatttccataagtaaatccttgcgtctacctgttgcattaaagtttgtgaacactaagtggaaactcttgacagttatatgacaaacatgtcgtagtaaatgaaatgacctgttgtgtacccacaatattggtggagaacgtaaaagtcacggaattcattccatctttcagatctagcgaacgcaattgttcagaagttggagttagtgccctgacagtctttttcattggtcttggggacgacttctcttgtttctcttcaggttcagctgtgtccccagaaggagaagcttcagcttcttttgttgatcttcgcagagagaaaggccaaagtttccagcttccactgccttgagctaatacatcaccaggtttctcattccggtcaacagctatcatgcccttgggttcaaatacttgggcagtccaaatgaaaccactcctaagataataggagctgctgcatcccatggaaaatagcagccaccaatcttcacgacaagcttatcgttctccaggattgatgggccaaagaagcaaacttttccatatccagtttttcggaattgaaagcttgagaagccgcttctgacccattcttcacttaataagtgcttcagagagagagtcgactgagagtggagatagaaag

SEQ ID NO: 19728 - DNA, 804 bp, Arabidopsis thaliana
ttcttgtccctttcttagcttgagaactatctcacacttctatctccccaagcattctcttttgtttctttttgaacaagtctgtctcttgacttactcttctcactatgcaccttcgtgagtgtaaccccaagcattctctacagtggccgcatagcataggctccagtattatttccacagcatgactggtactcaagtacgcctcgttggagacagttgttacattcgtcagaagaaatatctggcgtgcattgcatcaatgcgtagatattctggaattttgtcaagttcgcaaaatcaactctgtaatggttatcactggacgatggtgtgcttcttgctgcggaggctgcagtaatcgtacgagatgttaagtcttcccatattgtcttgaaatccgttagatttgaggcgatagttgcagtgttcaagaccaaatactgaggctcaatctcccaaaaagctgcagatcctgagaaagaaatgttggagtagcggacaaggcacagcgttggatcaagtgcccaataatacgcgtctgtctggttaacacagtcctgtatcaaccagcctgccgcaccctttatacaattaaaacagtcacttggagttgatcttgggatgcacatccctaatgcgtagactcgatcttgctcttctccaatcgaaccgtagtagaaaccatcttgagaggcggtattgttaggaagagaagagaggataagacgacgatttgaatcgtatgtaccgttgggtgtgaaatatttacgggtctctatgcatgtttgtgctgaaacagaa

SEQ ID NO: 19729 - DNA, 804 bp, Arabidopsis thaliana
ctgcaaaaaggggtaaaagcactttattattataaagaaagtagctagtacattttaagagaaagagagagataagatttaacatttactcacattgaaagaagaactcgcagttgattcagtttcagcagttgctgcacggttcctccgctggtaaactcgaggaggaacaatccggttaacttgcggaggaacctcgttagctggacgaggaacaactcggttaacttgcggaggaacctcgttaacttgacgaggaacaacttggtaaaatgtcgaaggatcttggttaacttgaggaactccgttacgacaaggaacaaggtggtaagtttgaggaagatccttgttaacttgaggaataggaacaacttggtaacttcgcggaccatcttggttatcttgaggaggagctaccccgttaccttgaggaggaacaatccggtaaacttgcggaggacgagcttggttctctggacgaaccccataagttcttccaaactaaaccaaaaacaaacattatagttatttgatgatgtttacaaacagtatttagatcataagagaaaatcaaagacattacagttggaatattgatatgtttgcactcagaacatttcacagttttatcacgtttttgatgaacgacgctcactggacatccgccacacacaagcattgtaaaattgtctaaagaacatttttatgaaacaaaagatgagattagacaaatcagaaccatagatccaatttttgaactaaacaaaaaaaaatttaagtttcttgatttttttcaagaacaca

SEQ ID NO: 19730 - DNA, 1716 bp, Arabidopsis thaliana
cgactctacctatgaaaacattatattaggtaacgtttagtttgcttttattctgccggtttcttgggatttttatctgttataaatgttgagatttgatattttgtctcagaatgatacatcttggggtttatagataaattgataaacacaattttaatatgtatagacttgctttattctgatgtttattataacaataatcaaagtttataacttgtagaacaagtaaaccatgggatatagaacaacacgtgactctgacacaattctgaagcgagagttgtttcagatagagacgctatttggaattcccctgccggtgactccgccttcactgctcggaaacaataaagtgtatggcatcttaaccaaaccagtcctgttcttgagagtctcgtcgtcgttcctctcatcaatgttcttctcaatctcctttactttctctccaaacttctcgaacgcctccaacgcttctttctcagccgcccattctttagaatctctctgtcccaaatagacctcgtcgctagaatgagtagagagaatctcaatcagagatatccctagaagtgtctgaagctgagctgtgatggtcttcaaaaacactttatcaggattcttctcaagttcttcaaactctggagtgttttcctttggcatgtactgacggcttatagtcggtctgtttgggaggtacccagcaactggatactgtccgaagttaacagctgcatgaagagcagaagccacccaaataatgatggtgcaagactcaacaagttcttcacgggtttgcattttaggccaccatggttctgactttttgtctccatgaccttcctcgcgcacctccttccaccaggcttggagctctgtgtcggtttggatatcctcctctatcttgtagaacaagaaaatgtagtctcggacccatgattcaatagcataccaaacctcaagcccatccactgcgtaaggatagtcttttatcctcagacgtaatccgtgtggtgcttctggatcctcaacggccatccctctgcaacaacagtttatagttacctctttttcttctcttctgatttgcatcatcaagccaagtagaatattgaaagatttgagtaaatatgtattacctctttttaagttctgctggtaatgcttggtcagggaaggtccagtggtttttgtaaatgaaagatgacatctccatggcgtatttagaaggaaacacagtgatttcaaatataccaccaccattgatcaagatttgcctagcaagtgcattgatattcatcgtatcacggaagtgaggttcaaggagcttaaagaccgggtgaagaacactcagctgtctgtttgtggcaatcacaaacggttcaatcgatgcgtgtgtttgcatcctgcaaaaaccaaaacattaacttcagataatgtaaatagatcaattttttcccccagattaagcattaagtatccattaccagtggctaataagctgatgatttccggagtcatttacaccgacaaaagccttagccaactgccatagcgagtcgtagcaccttcaccaggcgtatatacttcactcactgctccaaatttgtctccattaggatgaggcaagctcagctctatcaccaacggcttcaaggcccatcatctttcaagaacagaagtgtctgcttgcataagtcttggtcgtggtggtgt

SEQ ID NO: 19731 - DNA, 805 bp, Arabidopsis thaliana
gtgccttgagggatcgcaggttcccacctatacaggccaaagaattgccatctctgcagtgtacggtgtctgtcttgactgattatgaagatgcagaagattaccttgattgggaggtatattctcttcactcttttcttacaatatgtcaatctcacgaattaagaatatagttgccaagaaggaatgcatactattcaatgtacacagccaataaactttccgttgtcctttccctcatatcattttcccgcttagttaactgctctgccttgctcatgacattgtagtttgtcgaattcttcttgtttgtagtttgtcttatacattgtcccgttggtgatattttgttttgtgatttcactctaaaggttggtaagcatggtataatcattgagtttactgaacctgagactaatacaaagcgaagcgccacatatttgcctgaggtgccagctcatgaaggtaccatttcaatacaataattcaagtacgtgttgttgctattggtattgttgatacaacgattactttttttatccccaggctggacaaagatagaggcaatcgattcgctggtgcgtaaagcaggatacaatggtgtaataacagaagcagtgcgtaggcgaatcaatctaacgcgttaccagagtacattattcagcatgcattatagcgaatacctttcatatgtgaaggcgaccaggggcgttgttggcccggttattaatgggatcaacaagcacgcctttgcctgatttgcactgcaaatggatgccattgattatgtttggctactcctaat

SEQ ID NO: 19732 - DNA, 1432 bp, Arabidopsis thaliana
tcaaaatccacacgacgttatttaacgttaccagaccgataacggtatatctttttggcagaaaaacggtctatttccccacgataactatcatatctggctaaataaaccccgatctttgacctctatctatatacccatgaaacagaagttaaacgcttatttccccactaattgaaagttcgagagcctaatgtccatgaatcgtaagttcgagatttaaaaccccatagctctgggtttaattggtttactgtataccaaaccgatgatttaaccaaataaatctaattagaaccagcctaaacccgaattacaacccgtttaagaccaaaaaacaaatcgaaaccaaatcgaaaaattcccaaatttctcacgacgaaccctagaaacccaaatcgatttttcccaaaccctagaagctttgatcgatgtcattagtccttcacgaccctgatcttgttggtgatgtcgattccgaagctgaagaaagagatgagtttcacatggaagaactgctaaaggagtggactgacgaaccaccaattcgccacgatatgtacccggagagtgatgatgaagaaaaaaccgaaagatttgacacagatataaggcgtggtgatggttatttgtaccacaagcagagttttttcagtgggttgcgttcaaagaggcggttgttgattacgctctcaaaaccggatgcaatataaagcaatacaggtatgataaagataaaattgggttcatttgtgttggttgtgacggtaaaaaaggtggagctaagtgtgagtggaaaatttatgcggcaattctcccgagtgataatatgtggaagattaggaagtttgttgatacatatagctgtatccctaatggagaatgtgagatgtttaaggtgccgcatatagctcggttatttgttgataagattagggatagtcctgaattttacatgcccacaaagatagaagaaatcattagggaacaatggaagataagtgtcactaggaatcaatgtcagtctgctagaaagaaggctttgcaatggattgagaaggagtacgatgatcagtttgcaagattaagggattatgcggctgagatacttgaagcaaacaaggattcacgggttgaagttgaatgtctcacgagtgatgatggtaaagacatgttcaataggttctatgtatgctttgacagtcttagaaggacatggaaggagtcttgtaggcctctaataggcattgatggttgttttctaaagaataaggttaagggacagttacttgtagcctaaggtagggatgcaaacaatcgcatatatcctatagcttggggggttgttcagtagagacacagatactgggtgtggttatgaactgctgaagaagcttcagattagtgatggtgaggcttcacatgatacaga

SEQ ID NO: 19733 - DNA, 1072 bp, Arabidopsis thaliana
ggaaaagctacttccctgaggctgatccgatcagttttagccaatggttcttctttggcttcccattggctttgtgcatattcgtggtgctttggtgtgttctttgtgttatgtattgtcctaaaggagcaggacaagctctctctccttatctccataaatctcatctcaggagagagcttggatttggttagggccaatgaacttcgctgagaagatggtcttagccgtgtttggtgggttggttgtgttgtggatgacaaggaatataactgatgatatccccggctggggtcggatcttcgccggccgagccggggatggaaccgtgagtgtgatgatggcgacattgttgttatcatcccaagcaatattaaaaaaggagagaagctaatggactggaacaaatgcaagaaactaccatggaacattgtcttgttattgggagctggattcgctatagccgatggagtacgcaccagtggcttagctgaggtcttatccaaaggacttgtcttccttgaaacggctccttactgggccattgctccaacggtttgcctcatcgctgctaccatcacagagttcacttcaaacaacgcaaccactacattgttggttccgttactcatcgaaatcgcaaagaacatggggatccatcctttgctcttgatggttccaggagccattggggctcagttcgctttcttgcttcccacgggaacaccctctaacgtcgttgggttcacgacagggcatatagagatcaaagacatgatcaagacaggcttgcctctcaagatcgctggaaccatctttctctccatcttgatgcccactcttggtaatttactcaaaaccttcttctttatataactcgactcattgtagtttagttttcttatagatattgttacatgatgccaggggcttacgtttttgcatcaatgggaggagtttagttctacaagccaagcacaagaccatgtacacaattgatttattgtactatattgtttactacgtaatacacgtgtagatatatagtcaatggaatgggagatttagatga

SEQ ID NO: 19734 - DNA, 1054 bp, Arabidopsis thaliana
ctaaaggccccgttgtggaaggcgctggtggaatatacccatcaactcgggcaaccgcgctggcaccgcgccaatctctatcagcgctttatcgaaacgctggagtccgcgacgacctgcccgccggggttaccttcgcgcgtctttatatgcggtatttccgcgttaccgcctgtttatctccaggcgctacaggcgctgggtaaacatattgaaatccatctcctgtttaccaacccctgccgttattactggggcgatattaaagatcctgcttatctggcgaaactgctgacccgtcagcgtcgacacagttttgaagatcgcgaattgccgctatttcgtgatagcgaaaatgccgggcagctctttaacagcgatggtgaacaggatgtcggcaacccgctgctggcttcatggggtaagcttgggcgcgactacatttatctcctttctgacctggagagcagccaggagctggacgcctttgtcgatgtcacgccagataacctgctgcataacattcagtctgacattctggaactggatacccgcgccgttgctggtgtgaacatcgaagagttttcccgtagcgataacaaacgcccgcttgatccactggatagcagtatcaccttccacgtttgccatagcccgcagcgtgaagttgaagttttacacgatcgcctgctggcgatgctggaggaagacccgacacttactccgcgcgacatcatcgtgatggtggctgatatcgacagctacagtccgtttattcaggctgtgtttggtagcgcacctgcggatcgttacctaccttacgccatttccgaccgtcgtgcgcggcagtcacatccggtactggaagcgtttatcagcctgttatcactgcctgacagtcgttttgtgtcagaggatgtgctggcgttgctggatgtgccggtgctggcggcgcggtttgacatcaccgaagaagggctgcgttatttacgccagtgggtcaacgaatccggcattcgttggggcatagatgacgacaacgttcgcgagctgg

SEQ ID NO: 19735 - DNA, 1349 bp, Arabidopsis thaliana
gacattgattcctagtgacactgatcttccactgttctaaaatgatttcttcaatctttgccggcaagtaaaattcaggactatccctaattttatcaacaaacaatctagctatatgcggcaccttaaacatctcacattctccattagggatacagctatgtgtgtcaataaacttcctaatcttccacatattatcactcgggagtatagccgcataaactttccactcacacttagcaccaccctctttaccatcgcaaccaacacagatgaacccaattttatctttatcatacctgtattgcttcagattatgtccagttctcagagcataatctataaccgcctctttgaacgcaactccactgaagaaactctgcttgtggtacaaaaacccatcaccacgcctcacatgtatgtcggaactgtcgtcggctccttcaccatcgctctccgggtacacgtcgtggcgaattggtggttcgtcggtccactcgtttagcatttcttccaggtgaaagttatctctgtcttcagcttcgggatcgacatcaccaacaagatcggggtcgtgatggattaacgacatcccgacatcgatcgatcaaagttctagggtttggaaaaactgcatttgaggattcgtcaggttaaattagggttcgtcgcgagagaatttggggatttttttgtttaggttcgagagtcgggttacgggtcataattttggtttaaattaggtttattctggttctaaataggtttagttggttaagtcatcggtttcgcatacagtaaaccgacttaatccagttcatggacattaagttctcgaagttttatttcggggacattaagctcttgaacttttaattggtggggaaatagacgtttaactttcatttcatgggtaaatagcaagaggtcaaagatcgggcttcatctagccagatgcgatagttcccatggggaaatagaccgtttatcgattaattgtactatttataggtggttttacaaaatatagttggatttgtttttttttaaacgactttatagttttttttccctcagcgaaataaacaatgataaattatatgaaagaaattaaaatataatagtatcactatttgataaaatgacattataaagagcttttaaaacttttttaacaaaacggaaataaataaatcacagtggaaaatagcaataaggagattttgtatttacttcagctgactttaataaaataaaaatctctgtgggaaaaaaatttcttgaaacttcttcaatggcggaagaagagaagcgaacttcaccggaacctcctcttccttctccgccgg

SEQ ID NO: 19736 - DNA, 803 bp, Arabidopsis thaliana
attaccaagcttgcatagagattgaatctttaagtagcttaaacaaacataacaaatggtttttgaagtgagcagcataagcacacacatcggtcttggtggtttgagtaaacatcactgagatttgttgttttacgatgcaatagcaaatgtaaaagtagcttgacgtatcaagcccaagtgttaagtttcaaacttgggtctattaatcaagttatatgatctttgttgctacctttttccctttatttgcttttttcattctctattcaaaatcagccaacctttgcttgtatttccattctccactgtctctctaatctgatcaatcctgcaggttctttgaaagcttgcattcgagtctcagagcgtttgatcacggattcatcactactattctagttgcaatcaaagaaatggtttcactagcggaatctcagcacaacgcttgtgttaaatacaaacccttgaactctgcaaccacaaagcaataaggatagtcgaattcaaaagtagtatcttgtaacctaaactcaagcaaagaacttcaaacttgcttgtttatgaaaaataaaaataatatctgtaaatatgtttcagtaacgagattatcaaacattgcgactaatttcaaatcagaattcgtgattgcagccatcgttatgttttttgtatcatcaaagcgcatgcccggtcgttttcttgtaagtgtaccatttagcaatccaaaggtagaccaagaaattcaagaaactcagaccagctaatagccaaaagaagtaatcaagatgaccattgttgag

SEQ ID NO: 19737 - DNA, 1569 bp, Arabidopsis thaliana
tgtttgtttatgctacttaaagattcaatctctatgcaagcttggtaatgcagacacagagaaaggcctggaactcagacttagctagttggtgaagttaagagaagatgatactaatgcggtttgatttttgatgcaaagtacgagaaacagagagaacaaaagctagccagagactataaagatgttaccttagtcattatccagccttgactaattcagttgttccatacctcaagttgttcttctctcttagacatttcgtcaaacactttcaaagcatcacccaaatttccggtttttacaattctcaatcagtctcttgttcttacttgcattcttgcaatcgaatcagctcgatgatcccatccaatcataaatcggaggatgtggtggaagcagggacggcggcggagtgagtgagagagagcataactcaaaactccgagtgtttataagtttaggtttttgaaaacgacccggttccaatttggtccgattaactccggttaagtagatatccaatttattcacaaagataattagagaaccccaaaccaaaacctcacattgctcccaataattaaaatgaagagggacactttggtcaatacagcctcataaccctcctcgctatagagtggccgtgactattcgccttagccgccgtcttctcccacccaccaccaccaccaccgcctccgcctccaccactaccaccgctggtcttccagcttctcctcatcggagtcaaataaaacctcaacattccgttctctccatctttggacgaatacctcgaactcttattcctcgccgatcctccaccggagcttcgccagctcacattgctgttactcctcctcatcttcggtcctcctccttctccattcctcatctccggccatgattccgataaagacctctcaaccattccggcgctgttggatctgctgtacctatcttcttcttcatcgtccttaccttttctgtatataaaccctaaaatgctccattttccccaccgtctcgatttcttatcgccgttttgattccctttgttctccgctgtttccatggaatttgagtctattgttgttgtcgaatttgataccgatttgacatcctctagctccgttacaatttttctaatagaattggatctgtcgaggctcttccgtctccgtgacgacggaggtccagtgtagtagtctcgagtttgattggatccgcctgggattatgataatcgggtcggagtcaccgctaatcggtttaattgacggagacgatggaatctgcatgtctgatcgattcaacggagcattttccacaactgataacatcgatggcggcagaggaaccctagccgccgttgtcctgccgattaagtgtccatcccacgacgctcttggctcatctaatgagtagcgagaatcgtccattgaaatccgacctatatcgacggagaatctcccggcgtcaagagagaatctcgggtcggtgtcgcttgatctccggcctactccgatttcagactgtggccgtcctccgccgacaccgtttctcg

SEQ ID NO: 19738 - DNA, 1200 bp, Arabidopsis thaliana
aaataacaattaagagataattaaaactgatattcgtaggtttacatataaaaacgaaaaacggatcagagagagcgatggcaacaatacaaaacaaatctcctctcttctctatcttcttccccatttctctgaaaaccctaatttctccatctctcaatctctctgtgtttgtatctctcatctctgtttgagagatgataaggtaacttcaaagcatcctcgtgaattcatcttgtaatttcaggtactctataaggaactctctagcttgattcttaaactctgagcaattgtctttgatcaatcaccaccttataattgataaattctctcctttatgatttttatgagaatttgtttgatcaagtgttgataatttggttttaaggattaaatattttgatctgtgatgtttttgaggatttggtctttgtttgaagtattgattgttacagattctataatgtgatcctgatttaggattttaattcgagataaatggcgacaaatgcgtgccttgagtccgattcgcttctacctccacggaagcgtttactcgccggattcaagaaccagaactcgagaatcagcaatgaatctccgagtcctcctttcgcttcttcgtcctcgtctactacaacttcaaatggttcctctgcttcagcagttgtgcacactcatcatctcgaccatctactcaatgaccagactcggtccccggaagagcttgctcaggcgtcgaaagcaaccgctgctttagcggttaaggttgcaaaggcggcgagagctactgctaatgagaaggccatcattgcttctaaagcagtggctgcagccaagaatgcgttggaattgtttgcttcttttcccgcagctgagacggtttcttgtaaagagcctaggttgattcgagctataaacaattctcctagagtcttgacggattgttctggtcacagaaacaagaagcaaaagactctgactagtactatgaacgatgggaatgatgttgctggtgttgtggattcagatgacggaaccagagtaaacgggaagctgctcttatgcgataacacgctaaaggagaaaacagaggaagagagtagctcattagggaaaagaagaggaagagtgaagctccctttgagcatgtgtgcctacaaggatcaagaaaactgtatcacattagaggaaaac

SEQ ID NO: 19739 - DNA, 541 bp, Arabidopsis thaliana
ctaccaacactagctgctgttgaagcttactacaagcgctttaaagtaattaaaaacctttttcttatttgaccacaaactttctttctcttggtattagttattgatgtgttttgtggtgtggtaatcataggaacgcgaaataccagaggatgatccgagactgatgttagtgacgcgaacatacaataacttgcggcttagggaagggacattacctaataggcgttaaagcaaagggaccaagaggaagaaagatggtatcatggcttcttcgttttctacttctatttgcttattgggatctctgtgaaccatctgggtattttaaaaccagttcgtttagatgaataaggaaatttcacctagatgatgactggatattattctgatttgatttcaattacttaaccttgagagcttcatacaaagcgacaacgttttaaataagccaacgcctgtttggtttataaagatcagcctgttcactcttaaatgcacccgtttggttttttgataaaagacaatctgggaaaaagag

SEQ ID NO: 19740 - DNA, 512 bp, Arabidopsis thaliana
atgtgtgagtcaaacttggtaagaaccatcgagatctatagagttgaagggacgaacaatcaaatttgtgcagtagctccatcttctgtgtctcgagattgaaaagaaataaatcacttgcgttagtttcataaccaccactaggtctacaactgaaatagatggaatttcttttgaatccctcaacgtcactggcgagcacagtgatgcctagatccaaaagcaatgcctcatcacccaaagaatcaagtttttcatatcctgatgaagaaatcttgaaaacccgaaaggaccatgttctatatgtaggtctccacatttttgcaaccttgagggcttttcctgttaccgtgactacaagttttctatctaacaagcataccaccttggaagttttgttgtccatctcttcagaaaaatctaagatttggaaagtaccagtactgcttaagaagtaaagcttgtgatccttgtaaaccatgtcataaaaatatgaagtttgggggatttga

SEQ ID NO: 19741 - DNA, 566 bp, Arabidopsis thaliana
gatttgttgaggaatctctctagagaaatcaaagattctgaattcatatttgtaggtagacgtagagaagtaaagcttgtgatccttgtaaaccatgtgatgacaatttgaagtttctggaatttgattccaacatttatctcctttcttggaataaaccacacatgaacttccaagtccccatataactacgtaatcttttgttttctcatcgatccaaaacacagtggatagtattctaatacgtttgtggtactccttaccgttgtaatggagtgtagagtgaaaccaatcatatatggttcgttcaatctttaccatgccaagttgtgactcgaaaggaggtagatttacctctcgtgggtgaatagattcaaaatatagagattatacagtggatctcgcataaggagccagcttccgtaggttgcagtacaaacactctttgaaaattcaacaccaagatctttcattttgtaaacttggcctttttcctcgggattgacaacgtgcatgaattgttgttgtcgtattccgggaagagaatcaccaagggatctgtatgg

SEQ ID NO: 19742 - DNA, 570 bp, Arabidopsis thaliana
cagccgcgtatccgattagtacgacagcaacggcgacaagtaaggcgcccatagcgatgaaaggacgacgacgaccgaatcttgacttgcatcggtcgctgaagtaaccgacggatggctggacaagcaggccggagacaggaccacagagccatatgaaagatgaccatttgttttgggactccaagaagctgcacgtatggagttagcagagacagctgaagagcccaaccgaactgaataccggcggcaatagaagccaccgatatcatctttctcatcggagatggcccattaagatccgccgacgacgaggaagactgtctattcacagccgctgcatctttgtttgcttggaggtcactcatcttcttcaccttgtcttagaggttgtgtttggtgttggtgagggaggagatgaaaaaaactgggcttgtctcttaaagacaaggtgaagaagaggaatgagacttatatttctatagatgtttttgatctgtgtttcaatagtatggaaaaataaatcttttatagtaatgctataacgcatatatccttataggattgttg

SEQ ID NO: 19743 - DNA, 595 bp, Arabidopsis thaliana columbia
atgatgatgtgctaacttctcattagactagtgtagaatcatatgttcttctcctgctgatgtaacttgcttctgtcagacaacgaagcgaacggtaccgtttctattcgtgagaggagatggagtgatattggtgtcaccgcctttgaggacgacctaaatgttcttgtgtactgggatcggagttaacaaatctggcgctgagtaaaagcacttttttctgattacttggcttttgaatttgtaattgtgtggtatgtttttctttgttgtcaaacattgaaaccgaatgtagcattcgaatcttggtaatgggtgcctcgttatagtagaatcagtgtaacatacttcgtattgtgactttcttaccgtttacgatcggatttagtttcgttttctggtttggtgtagttttctctaaagatttgtatacttcctcaaactcattgatttcgagctctattatgaatagtgattggtgacatatttagatgtgtgtaacctaggaaagacattttgattaacaaaccatcaaattgattccagtacaggaggctgaaactcaaacaagattgattctatgagaaagataatg

SEQ ID NO: 19744 - DNA, 933 bp, Arabidopsis thaliana
ggcccatccaatcagtgtcgaagagaaggaaagggaaccaagcgatccagtttagtgcagtgactataagaagcatccacatgggtctttttagttccttgaaagctccgaagatttctccgaaaaacggaacgttggaggcttttccatcggctgttggctctggcgtccatggcttctccttcacgtaacagagagatacgaaagtgactatgaggagaagcgttatggataggaaaaaacacgttttgaggtttgcgcagtagagatcgcatgactcagtcatcgtgaaaggcacaactttgtagagatttctgtaagatcccgcagcgtaacccaaaacgtttccaaccgccatgaaaaacgagaaaaacgcgtttgcggttcgcgttttcttagcgttccctgctgataaatcagccaagaaagctctgcagggtccttgtaaggtgttgttagccacgtcaagaatccaaaacccgagagcgaatatcgctatggctcgcgttttcggcggtttgtcaagctgatcgcccatgctgtgacctatatcggcagcgtaaccgataaggaaaacagcaacggtgactaaaccagctccagcgacgatgaagggacgacgacggccgaatcttgaggtgcaacggtcactgtggtaaccgacgataggctgaacaagcataccggagattggaccacagagccaaatcagagaagcccatttatgtgggattccgagtagctgcacgtaaggagtcaacagagataactgtaaagcccaaccgaactgtacaccggcggcaatggaagacaccgatatgatcttacgcaacgttccggctgatctaactcacccgtctgcgtttccaacgcagacgcaccatttgcagctttctccattggatggctgaccatatttgacaaaccaagaaa

SEQ ID NO: 19745 - DNA, 523 bp, Arabidopsis thaliana
cactgatatcatctttctcagcggagatggtccatcaagatccgccaacgacgaggaagactgtctatctacagctaccacatcgttttttgcttggaggtcactcatcttcttcactttgtcttagaggttgtgtttggtgttggtgatggatgagatgaaagaaacaaggcttgtctcttagagacaaggtgaagaagaggaatgagacttatatatctaaatgttttgattctgtgtttcaatagttttgaaggtaaatcttttatagtaaggctataacgcatatatccttataggattgttgtaataatgacaagactaacgttaatataacagaaatcggtttattatcttatctttatataatttattttgagatcgtgacagatttttcaatttcttgtttctgtaatgtatgacttttataaatgacaacaagttgtaaatgattttgacttattttaggtaaattccatgttcaataacagattatttggaaaaatattttgaaatccagaga

SEQ ID NO: 19746 - DNA, 1572 bp, Arabidopsis thaliana
ttattacaacaatcctataaggatatatgcgttatagcattactataaaagatttacttttccaaactattgaaacacagaatcaaaaaatctatagaaatataagtctcatttctcttctccaccttgtctttaagagacaagcccactttctttcatctcctcagcgccaacaacaaacacaacctctaagacaagggtgaagaagatgagtgacctccaagcaaacaaagatgagacgactgtggatagacagtcttcctcgtcggtggatcttgatgggccatctccgctgagaaagatgatatcggtggcttctattgctgccggtattcagtttggttgggctcttcaactgtctctgcttactccatacgtgcagcttcttggagtcccacacaaatggccatctttcatttggctttgcggtcctgtctccggcttgcttgtccagccatcagtcggttacttcagcgaccgatgcacgtcaagattcggacgtcgtcgtcctttcatcgccacgggtgctttgctggtcgctgtttctgttgtactaatcggatatgcggctgatttcggccacagcatgggagacaaaatcgacaaacctgtcaagatgcgagccgttgttatcttcgctctcgggttctggatccttgacgtggctaacaacactctccaaggaccatgccgtgcttttcttggtgatttagcagctggagacgctcagaaaacgcgaacggcaaacgcgtttttctctttcttcatggccgttggaaacgttttgggatatgcggcaggatcgtacactaacctctacaagatcttccctttcacaatgactaaagcgtgcgacatatattgcgcaaatctcaagagttgtttcttcctttccatcactctcctcctagtcgtcaccatcatagctctatggtacgtggaagacaagcaatggtcgcctaaggcagactccgacaacgagaaaactccgttcttcggtgagatctttggagctttcaaggtaatgaaacgtccaatgtggatgctactaatcgtcacggccttgaactggatcgcatggttcccttttcttttatacgatactgattggatgggtcgtgaagtgtatggtggagactcaaaaggagatgacaaaatgaagaaactatacaaccaaggaattcatgttggtgcattgggattgatgcttaactctatcgttcttggagtcatgtcacttggtattgaaggtattagtaggaagatgggaggagctaaaaggctttggggagctgtgaatattattctcgccgtgtgtttggcaatgacggttttggttactaaaaaggcggaggagcaccggagaatcgccggtccaatggcccttcctaccgatggcatcagagctggagcattgactctctttgctcttcttggaattcctcttgctgtaagtccaacatgtcttttatacaacttttgttactattatgatcaatttatcattcatggtttaatatttgttaacatttttttgaaactttttatagattacattcagtattccgttcg

SEQ ID NO: 19747 - DNA, 591 bp, Arabidopsis thaliana
ctcatcggttacgctgcggatttcggttataaaatgggagataaactcgaggagaaggttaaagttcgagctatagggatctttgctctcgggttctggatcctcgacgtagccaacaacaccttacaaggaccttgccgtgctttcttagccgacttagccgccggtgacgctaagagaacgcgagtcgcaaacgcgtttttctctttttttatggcggttggaaacgttttgggttatgcggctggttcgtacactaacctccacaagatgtttccgttcacaatgacaaaagcttgcgatatctattgcgccaatctcaagacttgtttcttcttatccatcactctcctcctcatcgtcaccgtcacgtctctttggtacgttaatgacaaacaatggtctccgccgccgcgaaatgccgacgacgacgagaagacctcaagcgttcctttgttcggtgaaatctttggagcattcaaagtcatgaaacgtcccatgtggatgcttctaatcgtcacggccttaaactggatcgcttggttcccatttcttttgttcgatactgattggatgggtcgtgaagtgttc

SEQ ID NO: 19748 - DNA, 684 bp, Arabidopsis thaliana
gctatggtgagaagctcagagacgcattttgggtggaggacaatggcagatggtgacgcgatttcgatctttggatcgagtcatgtatggattgatcataactcgttgtcccattgcgctgatgggcttgtggacgcagtcatgggctcaaccgcgattaccatctctaacaaccacttaactcaccataacgaggttcttttcaagacttgttgtttcattagttaataattgcttcttttctttggctgaattcggtttttgatgatatggtttgatctacttttttacaggttatgttgctaggacatagtgactcgtacatgagggacaaagctatgcaagtgaccattgcttacaatcattttggagtcggacttattcaaagaatgccgaggtatatataaaagacataacaaaacagagtgtgctctgcttttgtgttctgtttcttgagtattctccgtttttgtgcttatgacaatgcgattaacttctctttgcaggtgtcgacacgggtacttccatgttgttaacaacgactacactcactgggaaatgtacgcaataggtggtagcgcaaacccgacaatcaacagtcaaggaaaccgctatgccgccccaaaaaacccctttgctaaagaggtaattaataactcaaccaaaataagttagacccgtgag

SEQ ID NO: 19749 - DNA, 613 bp, Arabidopsis thaliana
tgagcttctcttgtctttcactaactgtgtcgtatgtagacaagcttttgggaaacggtacaatgagtacggcacagagatgaagagattcatagatatcttgtacgagacgcaagcacttttgggcactctgtttttctccgaccttttcccttatttcggattccttgacaacctcactggtctcagtgcacgtctcaagaaagctttcaaggagcttgacacttaccttcaagaacttctagacgagactcttgaccctaaccgccctaaacaagaaacagagagtttcattgatcttttgatgcagatctacaaagaccaacctttctccatcaaattcactcacgaaaatgtcaaggccatgatattggttcgtaactctatatatctaacccttattgcaattctctaagttagttaaacctcaatattattattaactcggtttgtttgtaatttcatcaggatattgttgtgccgggaactgacacggcggctgcagtggtggtatgggccatgacttaccttattaagtacctgaagcaatgaagaaacgtcaagacggaatgaaggagtgtgataggtgacacaggatatgtctctgaagaag

SEQ ID NO: 19750 - DNA, 1123 bp, Arabidopsis thaliana
gagtgtagagatgaagagcggtgagctttacagaggaagcatgatcgagtgtgaggataattggaactgtcagctcgagaacatcacctatacggccaaggtaatgtcttactaagttactagggtttcgtttcttggccattgcctatgtaggagctgtgaacagtttagcttcttaggttgtctctttcttgtgatgttgagagtagttcaattttggaggagaattgagaatccttgtgaaattcttgacccttaaattgtgttcctagtagtgattgggtttagttcctgtatatgctagtagtagagaagaaatgttattacaggtcttgcttatgttgttactatgtagaatcatgacatgtttgcgattaaacaaattacaagactatataattgatcttgaattgttactacagatatatgctcttacacatttgtagattgtgattagaaatttagtatcttctattcatgattgttactaaactttcgtttgggctctttatggaacaggatggtaaggtatcacagcttgagcatgtcttcattcgagcaggcttagtcaggtgctgctagatataaactccttttgacatctctgcttgtttcctacttatttacttttgttggagtattctttttcaacttagctgactgttatgtgacattttgtaaaatcttgacaggtttttagtcataccagacatgttaaagaatgctccaatgttcaaggatgttaggggcaaggtaaacttcttgaacgtgatggagaatatcaatcccatctatgctttataaacatggaagctaataaacatcttgtttacttgatcaatacagggaaagagcgcttcactaggtgtaggcacaggtagcggtgctgcaatgcgagccaaagtaagttcaccgttgcctaagtccataatgtttctgatttacatctcaagaagacaatgttgtcgattctgagctactaattgaattgtgtgatgtcaaactcagggtactgggcgtggaacatgtggtcgaagtcgggctgtgcaccctctgcagagatagtatacttaaccctcgtaatgtagcttcggctcgtgagacattctctgctgtctccatg

SEQ ID NO: 19751 - DNA, 716 bp, Arabidopsis thaliana
tgtgaacgatctgtttgttgtatatcagcaagcttattggagcacggtactacacacccaaactagaggggtttcctgagtccgcaagggacaacacgggacatggctcgcacacagcatccatagcggctggaaacgctgtgaagcatgtgagcttttacgggctcggtaatggaactgtgagaggtggcgttccagctgcaagaatagcggtttataaagtatgtgaccctggtgtcataaggtgcacatctgatggaattctagccgcatttgatgatgccatagcggataaggtggacatcattaccgtatccctcggtgcggatgcagttggtacatttgaggaggacacgcttgcgattggggctttccatgccatggccaagggaatcctcactgtgaatggcgcaggaaacaatggtccagaacgtagaacaatcgtgagtatggcgccgtggctcttcactgttgctgctagtaatatgaatcgtgcgttcatcaccaaagttgttctcggaaacggcaagacaattgtggtgagtaccaagaaacaaatctttgttactttaagacaacacattatcgtacatatcttgtcctctatcaatattactgcttgttgcgaaacagggaagatcagtaaattcgtttgatcttaacggaaagaagtaccctctagtatacggaaagtcagcttcaagtagatgcgatgc

SEQ ID NO: 19752 - DNA, 627 bp, Arabidopsis thaliana
gggacatccaccacaacaaaacgtgaagatatcagtgaagcaatatccggacgtatttccaattcctcatccagttccaccatcaccgggacatccaccacaccaaaacaagaaaataccagtgaaccaatatccacgcatattaccaatttctcatccagttccaccatcaccaggacatccaccacaccaaagcgcgagtatatcaatgaactaatatccatacaaatctctttgtcattcgggttataaaaaatgtatcccataaactagtatgtttttaaatggaaaatttataatataagacaacataagatatgttgtattattgtgaatttttatattataaatctatattacttcatccataattagagctataatatttagcataaacatatatatgctaatggtaccttatgtttcaatattaatgtcaaatttgaatggctaggatgctttggtaacgatgagtgatattattttgataaaatattttggctttctcttgaattctgttaagattttttttttctttttttcttcatgagaatcaatattatgaaagaataatgactttatgagtctgaaaaccctccaatttgaatttgatcgaaaataaaggtg

SEQ ID NO: 19753 - DNA, 788 bp, Arabidopsis thaliana
gttttgttgtggtggatgtccctgcgatggtggaagtggatgagaaattggtaatatacgtggatattgattcactaatattttcttgttttggtgtggtggatgtcctagtgacggtggaactggatgaggaattggaaaaacgcatggatattggttcattgatatcttcgcgttttggtgtggtggatgtttcagcgatggtggaactggatgagaaattggtaatatgtgtggatattggttcactgatatttcgttttggtgtggtggatgtcctggcgatggtgaaactggatgaggaattggaaatacgcctggatattggttgactgatatctttgcgttttggtgtggtggatgtcctggcgatggtggaactggatgaggaattggaaagacgccaggatattggttcactgatatctttgtgttttggtgtggtggatgtcccggtgatggtggaactggatgaggaattggaaatacgcttggatattggttcactgatatcttcgcgttttggtgtggtggatgtcccggcgaaggtggaactggatgaggaattggaaatactcctggatattggttcactgatatggtgtgatggaaaaagaaatgctcggttgggaaaatcgagtatctagcctgcgcaaggccaaatgcaagaaagagtagagtaccatcattgttattggagagagcttcaccacattttcatatctttgtttgtgattataaatgtttacctacgtttcttatgtatattgttgtgcataaatacatga

SEQ ID NO: 19754 - DNA, 557 bp, Arabidopsis thaliana
gaatgggctagtgcaagccatttttgcgccagattattcttttttttttgctctatccttccagttggaataaatcttaattggcctttggtgttttgtatttacaattgactttttttttatggtttaaaatagtaaagattatggtttcattttttataaaacagactaaatttgaattcaagcaaacaatgaaccaattgtatatacgaaaaaaaaaagaagacatgatctcaaataaagatacaaacaaaaagaatttatctacttggaagaaaaaaaatgtagcctgctttgctctgttttatagagaaactctcatcagctgctgcagtgcaatgcatattagaatgtgaagtgaggttctacgtccattgcccacgcaaatttctccagaagtgacttgttgaatatctacattaacgaaccagccattacaaaaaaaaaactttattagaggactctctttgtttcatggtagatcaatattcaagttttgtatataattaactacgttttcaatgggtgcttcatgacgtttgcaccatgcgaccgtg

SEQ ID NO: 19755 - DNA, 765 bp, Arabidopsis thaliana
tagcctggcccatttttgtaattatattatttcctttttagttttactattcaaacaaattcgtatttcattaagtaaaatttctaattgtactggaaaaagtcaaggaattatgcagaaaaatagaaatagccaatttataagatggaaaatacgtattaaaaatgggaatatgaaagaaaaaagagtagagaatattggaataaaaagtaaatagtgacgtggcgggataccctatgcctttacacacatatctcgcagatatataaacagcgtctgcttcacgccaaaggagagagagagagatctgatcggtgatttacttttagttcgtcggagagattttgatcagaatgagcggaggaggagacgtgaacatgagtggtggagacagacgcaagggaacggtgaagtggtttgatacacagaaggggtttggtttcatcacacctagcgacggtggtgacgatctcttcgttcaccagtcttccatcagatctgaaggatttcgtagcctcgcagctgaggaatctgttgagttcgacgttgaggttgacaactccggccgtcccaaggctattgaagtgtctggacccgacggtgctcccgttcagggtaacagcggtggtggtggttcatctggtggacgcggtggttttggcggcggtggtggaagaggagggggacgtggtggaggaagctacggaggaggttatggtggaagaggcaagtcgtcttttcaattcagatatggatggtaaagtc

SEQ ID NO: 19756 - DNA, 515 bp, Arabidopsis thaliana columbia
agaggatcccagatttattccactggaaggatagagcaaaaaaaaaagaataatctggcgcaaaaatgacttacacaaatcaataagttttccaaattttgtttctttagcagaaaatcaaaaatgttattttggtcacaaatgtaaaaattggtataaacaaggttttaacaaaaaaagaaaaatatatatatacaaaggcgaaattacccctgagaaaatctggggccttgacacgacgatcctccatcatcctcttcctcgaggaacttcaattccaatctgtgagatctctgcacaacatcttgtctattttcaatcgaaacctctgtgagatcgcttttgatttttgtaattctcgtcgcaggatatctctctcattgggatcagacatggcttttgttgtaacatccctgatattcgctgtcgtaggcatcattgcttcgatatgcactagaatctgcttcaacaaaggcccctccaccaatctgtatgtcaattttcattcctttttg

SEQ ID NO: 19757 - DNA, 892 bp, Arabidopsis thaliana
aatgtcccgactcgccacagctgtagcagcttcccccggcgccaccagctccacggccaccacctccgtaaccaccacctcctacgccgtatccgcctccacatccgtagccaccgccgcctcctccgtaacctccaccgccttcagaacaatctctcgccatgtgaccgggctcaccacacttgtagcagtcgctgcctcctcgaccaccacctcctcttcctccgtatccaccaccgccaccgccgtatccacctccagatccgcgtccacctcctcttcctccaccgaaaccgcagcgtccgccagatgaaccaccaccgctgtttccttggacgggagcgccgtcgggtccagaaacatcgatggccttgggacggttgttgttgtcgatctcaacctcgaactctacggcttcttcggcagcgaggctacggaaaccctcagatctgatggaggactggtgaacgaagagatcgtcgccaccgtcgtcaggagtgatgaagccgaaacccttctgggtatcaaaccacttgacggagccttttgcgctcgtaacaaccgccgttgtctccgctcattttgattggaatctcttaataactcacttttttctctaaatctttaaaaaaaacgaaaccctagaaaatactctgaaatctctctctcctcgcagctgctgtttatatgcgtataggaagggtgtggcaagggtatgactgccacgtcacccaccccaattcattttttccttgtttccaagaggaaataaaataaatgtttttatttagatctctatttctatatatgtttgttcgatttttgtctatttttctaaattgccttcaaaaaaaacatctgcacattccgaattgtatattcgagcgtgata

SEQ ID NO: 19758 - DNA, 749 bp, Arabidopsis thaliana
ggcacaccaaaacaacacgcactacaagaagagttctcatgatatatgcagatgtaattgccttttaccatctcaaaattcaaatctaaatctttcgtacttcaaccaatccatgacaatgtcataaaaccaacacatcctagaatcatatcaaaaccattcagaactgaaccataacaagcataagcaaaacaaaaaatgatgcacaagagacaataactcaagatctatatccacacagatcatacacacaatcacaacagctcatgaacaaaatcatcccaatgactaccaaaattcgttcgtgtttagatcaaatttcaaatcaacatttgtagactcgagggagggagagagagataaaaagtactgacgagagggaagatgtgatgaagcaagaagagagcccatcgggtgttgtagccgccgtagcctcgaaccacaacatcagccttgcgagagtaagcgtcggcaagagcagatccccaaccgccggacctaaaagactgcgccgtgatcgagtcgccgaacagaactatctccggcctcatctcgctgtctccctccggttcactgagtaaaccgttaactgtattaggaaacttaaagtctcttctgggccaaatcatatgggccgggcctttagtattaatttgttatatttttggtgaatgaaaaggtggtaatctaaagaggttttactaattgtagattaaggatgcgtgtaatgttttagtattagtttatga

SEQ ID NO: 19759 - DNA, 570 bp, Arabidopsis thaliana columbia
ataccctgatcttataaaatcttataatttttttgttaaaaaagttattatagttttaaaatataacttaaattttcttataaaagcttatctaagaagaagcttataaagcttatactgaacccttctgacgaactgacgatgcgttaagcgttagaaaagcttagaaacccttccgaagaagcgttataaaagcttataaagctaatactgaacccttcagaagaaacgttataaaagcttataaagctaatactgaaccctttagaagaaacgttgtaaaagcttataatttttcagaagaagcgtaataaaagcttatactgaaccctttagaagaagcttacaaacatcttataaaagcgcttataaacatcttataaaaagcttttataatatttttataagatgtttaaaagcttgtatgagccatttataagaagtttctaagcttttgtaatattaattgttatggctcagaaataccatccgaattagtgactcaccttggctcactatgtgcattggagaactttgaggatcaatccatatatcctacagatatcttgc

SEQ ID NO: 19760 - DNA, 1862 bp, Arabidopsis thaliana
cactgacaggcttaggcttgggaacattttcaaaaggttcacttttcgtttctttgatgccgaatcctgcttgaacagaattatcaggaatttccactttcacttccatggtctctgacttcaatggcctatgatcctttctttcagcatcctgagataagtctgcctctgttgtagaaacaatggagcttttacaactttcagtcttagggaccactggttgaaaagattgctccaccttcaaccgctttaatgaaggttgcaaattatctaaagtatcagcacaacgaggggtaccagaaaccgctccagcattagcgcttagtgaatcatttgatactacagatctattcactgagcccacagcactgctttcgttttttaaacgggccagggcacgaacattagcttgttgctgataagtcttcactggcacacagacggggcaccgaggatccttgcagtttttatagtggccaatcaatgcctttgtgtgacgacagcggggatacaaacactgaggatcagcacaattgtccatgtgactccatagtttctgaactgttacgcaattttgatcttggcatctccctcctggcggtttgcaactccgtgcatgacgtagaaacagtagccatctttgttgatttttgaacttgggatcgtgacttacgtttccatatctacatgtggtaccaatagaattttgcagattatgggattccgatatagtagaagtatgattttgaccaataacagacccttcagtcaaattattaggttgagcttcatccattccggtaattctttgacggaaatcctcctgaatgtgctttccacttgaaatagcattagacattagagtattttcctgagacttggaaggccattgaccctgtggactggattctgattttactccaacagcaagattgctaaaactgttactagaatcagaacctatattctgcgggtgcatcatttgctgaatctgctggctattttgggggagtgatgtacatatatcactctgactttcgactgggagaagctgagcgtctgcttggcagtcttctccagagttctgatattgattctggagctgagaaagctggaatcgttcagatgcttgggactgtggagcctgactcttgttctccattccaggttcacatttcaccttcgtaaccatgtctgaatccacttgagttttccccaagccatcattgcttattaatctatgttgctgcggagtctgctgcttcaatttcctctgattgagaaattgctgctgctgctgttgaatctgatttggttgttgctgaaatcgattaggcggttgctgaaattgttgttgatgtgactgcagataatgaggaaagaagattgaaagtctaaatactcaaagtgacaagtgtttaattggtctacattgttgcatgcaaagtaaaattgactgattgctcaccagagaagagttaactctggacacaggctggaaacttgctgtattgatattatgagcctttgtccctgtcccagccgatgttatagctccatcgaaggggtcaggatttgttgtgctataaccttcccctgaaatatgaaacgtgctttcaatatgctgacctgaaatgagatcatccggacagaaggaaagaagagagaagttaccctgctgtaattttttggacgcattggtgtaagatgaacctgagtctacaattttttcgttcgctccaacatcaccatttacagagctgttggccgacccgacgggtttgattgcatgtcgggtctacgccagcagccatatggttggacacatgtgactgttttgacaccagtatgttcctttgttg

SEQ ID NO: 19761 - DNA, 503 bp, Arabidopsis thaliana columbia
tgagaccaagttaaatatggctagctaaagatacatttcaacaaatttagtaagaacatttcattaaggtcaaaaacaatggcctaaccttttttacagcttaagagttgtacagaagactaattctataagagtattttattatcaattcacattgtgcaaaaaggttactcttgaggcttcagataacagcttcttcttagccactctgcttgatcttagtagatgtaatatatatccttcacctgcaagtttcattaaaacctaactaagtcttgaaactagagacaatttataaacatctgaattcatcaacaacagtacttaaagaagcataccctgcatgaaaccatcccatatgtatcatatcaaaccgtaacagttccacaaatgtcaacagaagtcgtctttgctggtgtaagcacaacgccactgattcgaccttcccccaaaatgtacatcttcctttctttccaagcaatctctatgcaccaaatctctct

SEQ ID NO: 19762 - DNA, 627 bp, Arabidopsis thaliana
  unsure (1)..(627): unsure at all n locations
ctctaatagattcggacagattttagtatcgtggagaggcatgtacgtttacacgaactaaacattatgtttaaaatatgtgttgtttttggacagccacagtgaattcagagagtaaggaaactgtgaaacctgatcaatgtggctacggtgacaatggaggaaattacaataacggaggaggttaccagggaggagggggtaattaccaaggaggaggaggtaattaccaaggaggaggaggtaattaccaaggaggaggaggaagataccaaggaggaggaggacggtaccaaggaggaggaggacgataccaaggaggcggtgggcgacaaggaggagggggaagtgggggaagttactgccgccacggctgctgctacagaggttacaacggctgctcaagatgctgctcgtatgccggagaagctgttcagactcagcccggtcactaaaacaatatattaaccaatcaccaccatgcatgtattgcattatgtatgtatgattttaagtaaaccatggtgcgtttgtaatgaactgcctcaagtttttgaggcctatagattaagaagagactatgggaataaagtttgattatgtaatgtnttatgtggtttgagttgt

SEQ ID NO: 19763 - DNA, 1179 bp, Arabidopsis thaliana
tcacttatacagaagtggaaatatacatatatatctcaaactaaaacaaatacaaatagaaacttgtatatatgtttagcagtgaaagtaattacgtttctttttctaataatatggatgatatattcccataaataattctcaatctcgtaatcttggtcttagcgatcttaattcattttcggttgatctctcaacagttttaaatctagaaagttggtttgaaccatggtcaattattaggacttgctaagtcaaaagactcgtaagaaaagacacttaagtcaaaacatgaatccgtgttactcgtatatatcaaacaatctccattatttatggtttgcacaaattttatatgtatcttatatctaacgttttaacttatttaaaaagaatttacagatctgaaatttaatagaaatttatttttaaatagatattaagtagtgcacaattgcaagagctaaagtatatgtttgatatactgtggtgttttggacaggcacggtgaagtcagagagtgaggaaactgtgaaacctgaacaacatggtggtggattcggtgacaatggaggaggaagataccaaggaggaggcggccatggtggccacggagggggaggataccaaggaggaggaggacgataccaaggaggcggtgggcgacaaggaggagggggaagttactgccgccacggctgctgctacaaaggttaccatggctgctcaaggtgttgttcatatgccggagaagcggttcagactcagtctggtcactaaatctacataatatatcaaccaccatgagtgtacgatttcatttatatatacacttacgtgtgtatgtgatatgacaatacacttacgtttgtaatgaagtgccttaagtttaagaggagaaactatcggaataaagtttcataatgtaatgcctttgtgtttatttaagttgttatttgcgatgtttgcataataaagttgtttctagttgaagttattctcttttggttttatgtgaccctattaattcttttttagtactggcctaaggaaagataaaagatgtacaaaaaagaagaagatttaaacaggctgggcaaggaaaatgctttttcttaaaagaaaagattactagatagttagagactctatcgaattttgacatgcacaatagttata

SEQ ID NO: 19764 - DNA, 754 bp, Arabidopsis thaliana
tacccaacactgattcttctcaagaacaaaaggctcctctttttcatcacccgataccatttcgaatccttctacagctgctaatcttcttaccagatacttatctgaatcgtttggatcctttaagacgacagcatctccaatgaatacaaaccttaaccatggaattcaaatggatttcataaatcatatgaaggggcacaaagatctcaggggattcaagtggttaaaagaaatgacacaaatatagtaacatttgccacagacactatagtttatttcaattaattcaatgcacaaagactatgacagtgtgtatcggctatgagatggaccacactatgtaacagaaattgatgtaacagaaacatacactggaacaccaaagattggaaattgaaaacatacctggtattagcaattggtatcttacgaataagaagtgtgttttcatttgctgtcatggttggtgacatttctggtcctttatccgagtgtaagtaggttattttcccatagaacagattcttgcagattatttgaataagttcccggtcactcagtttattactcctatgactctgtcaaaattggttaacataaaaaaaaaatcataagtttccacactaaacaaagttgttaaaatcagctatcaacacaagagtcatcatgagacattgagcactatatgcaaaacattcaaatcttatcgaaagttatacactacatcaacattgtcttgtgagtgaagttg

SEQ ID NO: 19765 - DNA, 810 bp, Arabidopsis thaliana
caaattattccagattccttcagcagtagacatgaacaatagactctgacctatctttttactcactgaattcattaaccaagttgcaaccatatcgttacaccttgaccaagatccagaatcacgatgattgggaggaggtttagagattgtaccatcgacgaatcccaatttgttacgcacattcaacgccatcctcaccgatcgtctccaagaatggaaatctgcaccagaggttaatcgatctgtaaccagttgtaaaccagcatgatcagtactatggaggaagaacggattatcgtaatgatccataaccgattgtctatcgacatcgttgtggtgattgaagttattcgatgttgcatcaagaaaagatggacgaagtggtgttgaacccatagttgatttgagctcaaacgatgatagaaattgctccggattgaagatataaagagaatcaaagcaataaggtcaaaaaaaacgaagaagaaactcagatttctctcacgaacatgaattgaaaaatcgcgagaaagatgatacaacatgaatccaaaagaaaacaaagaagatgaatgagaacgatttcaatcgaagaacaactcatgatcggagatgctctgataccatatcaggattctttaatctctgtaacaaactctagagagagagtgaaagaagaggaagaagataacagaaacaaagaatcgtttattctcattaatttggtaaaatgtacaatgtcatgtatttatactctaatacatattttatactatagagtaaaatactcgttatactaaaccttta

SEQ ID NO: 19766 - DNA, 517 bp, Arabidopsis thaliana
tgttaaaccatacgtttttccaacctaatgtaagtaacacatttaccattttctattaatttattaatcaagatcaaacatcaaaaaaatgtgttattactttttagtttttttttttgcatttcagttttgtgtgaaaaaaaaaacaagaattggtatctcaagaacgtaaaagaaaattatcattactattttattatctttggcttctacatccaattatttacttgcttaattttattcatctgaattattttttggtgtaagaagaatgtttcgccgcaaaaaaaaaaatctgatccgacatcattagaacaaaaaaaaacattggcgttgaatataagctgcttctcttgttcttcttctaccttacgcttctgactgttattagagactatgtaaatggctgattccgagactccgtatcaccccgaccctgaggatctccggcgtataccagtcgatctcttcgcttccaaaaagcttcccggactttcctccggcgatctcggatttg

SEQ ID NO: 19767 - DNA, 945 bp, Arabidopsis thaliana
catgtcctgatagtagaagatcagtctctgggatttgtgtttacttaggcacttcgttgatttcctggaagtctaagaagcagcaagtggcaaggagaagtagtacagaggcagagtaccgaagtctagctgatgttactcgtgagattctatggatacaacaactattgaaagatttcagagtgactgtgactgcaactgccaaagtcttttgtgataacaagtctgctatctatattgctacaaaccctgtgttccatgaaagaaccaaacacatagaaatcgactgtcacacaacgagagaccaaatcaagcttggaaacttgaagctgctacatgttacaagtgagaaccaactggcagatattctcaccaaaccgctgcatactcgaatcttttattctttacttactcgaatgtctttgtcaaaccttttcaatcctactgttttggattcaaaggtttgcgggggtgtataacgagtattttactctatagtataaaatatgtattagagtataaatacatgacattgtacactttaccaaattaatgagaataaacgattctttgtttctgttatcttcttcctcttctttcactctctctctagagtttgttacagagattgaagaatcctgatatttagctactagaaataataacactttcatagaattacgtctctcactataataactaaaacgtttccatcgtcccttaaatcaactgtagttatcgtctttaccaactccaaaaacaaactaaatccaagtctaagaacttgtcataaagcaaattgttttagatttaaggcataaagcaaatcaagacagagaaaaatcaaaaaggagtatgagtttggaggaagtacttgagagatgtggtagagatctgagacaccggccagagagatgagtgtccgggaatcggagacatcgggga

SEQ ID NO: 19768 - DNA, 614 bp, Arabidopsis thaliana
cacttttctttcagaaatactggtcagttgtgaaggttcaagttattgaggaggtattgggattctttaaatcaggtgttcttccagaacagtggaatcatacacacttatgtctcattccaaaaaatttgaatccttagagaatgacagatattcaaccgatcaatttatgcttagtcttatacaagattgtttctaagatcatttcgagtagactgacagtctatcttccagagatagtctcaccgacgcaatctgcttatgtggctgagaggttagtatctgataacattctaattgctcatgaaatcatgcatggtcttcagtctaataatgtgctatccaatgagttaatgacttttaaaacagacatgtctaaaacttatgatagagtagaatgaagttttttggaaggaattctgttagctctaggctttgataagaagtggatttcatggattatgggttgggtatcttctgtttcttaatcagtcatgatcaatgggcaaccttttggttacattaaacctaaaagaggcattagacaaggagatcttttgtctcctttgctttttatcttgtgtattgaggccttgattcattttctcaatcaa

SEQ ID NO: 19769 - DNA, 635 bp, Arabidopsis thaliana
catacctatcaaggctcaacaagcaacaacccaatagaacagataacaatgatatataacacgatattctagatttctagattttttttgcattagtgcgcaacataatattaaacctaatcaacaaaaatatgccaaattcctaaaaatgataagaatgtctcttaaatctcgaagttaagaccctaattaacttcattaacgcttcttaatctataaatatatagttcttcaaaaatctttcaacgcattaattattcaaaaagtaaacacatggaagccgtgtagttcacgcgccggtcaaatcgaaaccgtagaaaaaagcaaagaaaagaagacaaaaacggacttgacttatagagaaagacttaaacaatggcgaagacgaagacgatgagcaacaacaacaacaacacactagtaacaacagtagcatcagcttgaaagagagaactaaaacctagaaatcgagagagattggtggaagatttttcaccagatttcatgggagaagaagagagtcgaattggagacgagctttcgattttggttctcacggcggcgatctccgtgtagctgtggatgaagctgaatcattcaaaacagagtgtggcgaggttggtaacaagtagatc

SEQ ID NO: 19770 - DNA, 783 bp, Arabidopsis thaliana
aatgggttctgtagatcaacggtcgctaatgttcccagtctatcggtgccgatatggatcaccgggaaaagagtgaccggcgactactgctatggttcttcgccgtagccaccgccgtaaaactccttctcattccgtcgtccagaagcaccgatttcgaggtccaccgtaactggctcgctatcacaaactctcttcctcttaccaaatggcacttcgacgagactagccaatggacactcgactatcctcctttcttcgcctacttcgaacgcttcctctcaattttcgcgcgtctcgtcgatcccaggatcgtagatcttcaatcaggactcgattacaatgccgaatctgtaatttacttccaacgaatcagcgtaatcgtctcagatctatgtcttctctacggtgtttatcgatttgactcgaaaattagaaccgttgaaacgaaatctgatctgcgcattggtgatttggtctccggggctattgatcgtagatcacattcattttcagtataatggatttctactgggttggttattgctttcgatttcgtttcttcaagaagggagagatcttttgggtgggtttttattcgcagttcttctatgctttaagcatttgttcgccgtcactgctccggtttactttgtttatctacttaggcattattgctggtctggtttagttactggtttccgacggcttgtaactattggtgcggtggttgtggcggtttttgctgctgcctatggaccttttatctatcatggacaggtt

SEQ ID NO: 19771 - DNA, 597 bp, Arabidopsis thaliana
tccccaatagacgggtaccgagaagaccttatagggtattcagtttggatacagggagattgaatccagaaacatatagactcttcgataccgtggagaaacattacggtattcggattgagtatatgtttcctgatgctgttgaggttcaagctttagttaggaacaagggtttgttctctttctatgaagatggtcaccaggagtgttgccgtattagaaaggtgagacctttgaggcgtgcgttgaagggtttacgtgcttggatcactggtcagaggaaagatcaatcacccgggacaagatcggagattcctgttgttcaggttgatccagtgtttgaaggattagatggtggagttggtagtttggtgaagtggaatccggttgctaatgttgaagggaatgatgtttggaatttcttgaggacgatggatgttcctgtcaacacgcttcacgctgcgggttatgtttcaatcggatgtgagccatgcacgagagcggttttgccgggtcagcatgagagagaagggagatggtggtgggaagatgctaaggctaaagagtgtgccttcacaaagggaatacaaggagaat

SEQ ID NO: 19772 - DNA, 1602 bp, Arabidopsis thaliana
tataaatacagtttttttttggtcaattaaacacaataagaactctttgtttcatatatataatatcagtaactctttggaaaataaaataaaaaataagaagcattttcatagcaataataacagcagtgaattaacacatacaatttcatggagactataagtaagagctacattattttgtgcatgatagaaatttagaaagccacatgaatgtacgctcgtatttttatacgtaaataattgatcgtatgattttcgaaatttcgtattcaataattactccagtgtccatcatacgaaactgccaaaatatatggccccgtcgatcttgtcgtcttttctttttcgtttgtaatgtttaagttcaaccactaatatccaccacacacaaaataaaactgcatcttagagaaacaatccacttttgtttttaaggttcaatttttgaaattttcaaaaaacaaagcctatttcatacactcaccagtgcttcacaattcatcataattcataagccacgcaaaagaaaataaagtgaaagattccatggcggtaattgtgtggtggctactaacggtggttgtggtggcgtttcactcggcgtcggcggcagtagtagaatcaacgtgggaggttgagtataagtactggtggccggattgtaaagaaggaatcgttatggccatcaacggccagtttccagggccaacgatagacgcagtcgccggagacacggtcattatccacgtcgtcaacaaactctccaccgaaggtgttgttatccattggcacggcatacgtcaggttattcaataaactctaaatttcttccttctatacaaaaatataagtatgtaatgtgacaagaagcatcaacaaacaaacaaaaaatgtgacaatgagcttattctatacaactatatgtttgattgttttacgaccgaattagaaccattactttttattcaacaaaaaaaaaatacaaatgctaactgttgttctgctgattttcagttttattttttcaatttttttgtgtgtgatgttagagcatcattattggtggtatcattattggtggtatcattattggtggtatcttaaccaaatttttaagttaagatttgtgaagaaagagcttttatataagagtttttaggcttatatttaaattttttcttcataaatcttagctaagatttggctaagatactaccgataatggtggtcttagattgtttcagagccactactagtactatacagtctgtataattaattcacaaaaaaaattattatcaaaaactaatttgtgatcatggaacagaaagggactccatgggctgatggagcagcaggtgtgacccagtgtcctattaatcctggcgagactttcacttacaagttcattgtcgataaggttactttaaacttgttctagttttatattttatgaatgttaagaaacaacattatttggttaattaattgggaaagaatacggtgtaggcgggaacacatttctaccatggacactacggaatgcaaagatcatcgggactatacggaatgttaatagtaagatcaccaaaagagagg

SEQ ID NO: 19773 - DNA, 564 bp, Arabidopsis thaliana
tagaggatcgtgatccttctgatgctgaaaacaaacgactgtctccggtcagttaacaatgagctaatgcaaggatcgtctctcgagtcgttcttgatcatcgggaaagtatcttcccaagcggttttagaggcaaagagagctgaaaagaaatcgttgatgaaatggctgaaggtatggtttgaagggttctctgttgaagcaaggctttgggtaatgcaatttgcactttggatcttacaagtcagaaaatccttaaccctttaatataaaacgttcctgccaattttatattacacacctctctctattctttggtaagtgggtatcaaaaaataacatttatcattctttgtatactacacaaggctgttatgtaacagaccaataaatcaactttatatatactatgagatttgtatcatttgtatgctgggaagagcttattactttaaatttttttttatataaatcttattatcttcttaatagtatttcttacaaaaacaattgagaattctactcatttttttccacatttatgagaccttatgaaacaggtgt

SEQ ID NO: 19774 - DNA, 1326 bp, Arabidopsis thaliana
acaactcctttgcatatatatttatttttagttataaaaaaatctttttattttattgttaaagaaaaataattttattgttgcaaattgtagatttgtcaaagattcattagatttgtcactaaatataatacccaaccataatgatatctaaaagaattaatgaaacgtgagtatatttgttttcaacgactaaagaaacatataaacaaaacttataaaaatatgaaattgtttttgataatttcaaatgacaaaataaaaaactacaaacaattttcatctctaagatttcatttttttcaccaaataaaacctacgaatatgagttcttaaacaataaaataaaatcaccacactctttaaaaaaaaagaaacttatacgaaaataagacttattctcttgaataagtaacaaatccaatagtttataacagaaactccaggtcatctttctttaaatataaacagattccattttttgcattatacacccttccactctcacgtatatatatttcttactttacccttactatttaatataattccatgtttacccttcatcttccctctaaaatccaacacagagagatttcaacgctaaataaagagagagagagtctaaaagctcgtcgtcgtcttcaatggtgaatctcaaaccaattggataaataaaacaaaacaaaaaaaacttcacaaaaaaaaaaaaaagatccaaattacaaccatgccttcaggagttaacaccagaagaacgatcggaactaaaaaactcaatcgccgagttccacacataccaactcgatccaggaagctgttcatcactccacgcgcaacgaatccacgcgcctccggaactcgtctggtcaatcgtacgacgattcgacaaaccacaaacatacaaacacttcatcaaatcctgctccgtcgaacaaaacttcgagatgcgcgtcggatgcacgcgcgacgtgatcgtcatcagtggattaccggcgaacacatcaacggaaagactcgatatactcgacgacgaacggagagttaccggattcagtatcatcggaggcgaacataggctgacgaattacaaatccgttacgacggtgcatcggttcgagaaagagaatcggatctggacggtggttttggaatcttacgtcgttgatatgccggaatgtaactcggaggatgatactcgtatgtttgctgatacggttgtgaagcttaatttgcagaaactcgcgacggttgctgaagctatggctcgtaactccggtgacggaagtggttctcaggtgacgtgaaaatgaagaaaaaatatga

SEQ ID NO: 19775 - DNA, 813 bp, Arabidopsis thaliana
gggtgcggagtcgtttagaggaggttcagctttgcttgtacctcaaggtatatcatttctttcttatccaatatctctcatggcccattaatggaaagattcaaacattgtgtatccttgttggtaataatacctttgctggtaattaataggaaggagcaaaacttgaaaatttgggaacaagtgttgaagagaatgaaatggtatcagttttgttagccagtggcagagggaagaagaagcgtagtgcaaatgaaatactatgccgtagaaaagaagcgagagaaaagattactcagttgttaccgtaggttggttgtttctattgcaacagggtaccaaggcaaaggtttgaatttgcaagaccttattcaggaaggaagcatagggctgcttcgtggagctgagagatttgatcccgaccgaggatacaaactatcaacttatgtctactggtggatcaaacaggccatcttaagggctatagcgcctaaatctagacttgtcaaattgccggtgagcctccaattcttacagtttgagatggaaatgtgttacattgtatagttgctaccatatatagatgttaactatatgtgaaccaagtcatcttctattgttacatagaaaaataaaatgcaatgttgttctgggaagtgaagtaattagtgaatacatcgttttagcttgttgtgtgtagggaagcatgtgggagttaacggcaaaagttgcagaagctagtaatgtgttgaccagaaaactaagaaggcaaccaagctgtgaagagattgcagagcatttgagctcggtacc

SEQ ID NO: 19776 - DNA, 593 bp, Arabidopsis thaliana
atcaatcaacaatcattcaaaatttagttacttgaagaccgttaaagaaatcctctctgactctttattcagtaggctgaaaactacttttcttgtcccaatcatcaaacaggattgagaaaagcaactggtaatcaaaaaggagttaatggcttgggtttttctggtcagctggtttactttctggtagtaagacaacttgtgtcgtcaaagaaagacgagctttggttttgcatcaacaacaagtcgatgagattttcattgactgaggttcatcttgtcacgggattaccatgttggataaaagaagatgaaatctcagtagattttgagtgtgattggcctttgtctccttgcaaaacccctatcaaggtggattatttgatagcacaattgaaggtattggatgatgaagaaagcaagctacagcttgttatgttgattgttattttaatcgtcttcatgttgtcatatggcattacaaagcactcggttccgaaggaattttggctaatgcgaaaaagaatattcatgcgtatccttgggaaaagatgcatttgacatgctggtatcgtcggtaaaggatgatgata

SEQ ID NO: 19777 - DNA, 615 bp, Arabidopsis thaliana
ctttgataactctttgcacatctaattttattatatctatatatagtttgaacataaatcattatattattttcttgaagtgagggaaataaagaaactaacctcgttccccacggtcttggcgatggttttaatagcttcgaattcttcctcagacgacaccggaaaaccaacttccatgatgtctactcggagtttagctagctgcctggcaatctctaacttctgcggtggagtaagtgctgcaccgggagattgttcaccgtcacgaagcgtcgtgtctaatacacgcacatagttcttgtggggaagcttgttcggaatgtactccggcctccgttccatgataggtttgagatcagtagcactagttgccacatttttggactcagcggacgaacatgagacgaacagagtcgccttgtcgtatggacgggtcaggcgaagagagggaaaagaagatccgatgggtaaccatgaccggagaaccatggagcgacacgtagtggttatcatactcgacgatgtgagaagtaacgaagccattactatagagaaagtaggagagacaagatgaatactatattatggaggatagatagtggggaaatggtt

SEQ ID NO: 19778 - DNA, 727 bp, Arabidopsis thaliana
cactataactagaagaatagatggtaggaaaaaaaaacacgaataaaactacatccaagtgaaggaaaacaaaaaaagcagcaggctacaacaaacggattaaaataaaaataaataaggaccgcaaaattagtagtaaaatttaaatactaatacagtttataaattaagacaaatagtcctaatgtattcatcagccgtttttgaaaaaattctaaacacataatttgttttctttatttcggcctcaactataagggtcatgtgcaatttatcaactatatatatatagtttgaacataaaattatatcaagtttttttttgtgtgttaaaatatgtacataatcatttaagtgaaggaaataaagaaaaaacctcattccccacagtcttggcgatggtcttaatggtttctaactcttcttcagatgatcccggaaaaccgacttccatgatgtctactcggagtttagcgagctgtcgggcaatctctagcttctgcggcggagtgagggatccaccaggagattgttcaccgtcacggagcgtcgtgtcgaatacacgcacatagtttccgtcgggaagcttgttcggtatgtactccggccaccgttccacaacgggtttgagatcagtagaactagttgccgcatttttggacacagaagagcaacatgagatgaacaatgcggggttcttgtacgaatgggtcaggcggagagagtg

SEQ ID NO: 19779 - DNA, 1278 bp, Arabidopsis thaliana
aaagtttctgtttccacgagaaatagtttatacacaaatgttgttacatttaaaacacaataagcaaatatggtacaaatcgatgcgactcgacgacaagtttgacaacagagacgcaaagaacacacagatgttacattggttttattggaagctttttgtcacggagtttagttactaacaaacaggaaatgtgaatcttgtgggacaaggaaaccttttgcattcaagcagaagcaacagcttctgaaacccttccattaccagtctctgcactgagactgtcgtagtagtcaaccaacaccttccaaccagagggacacatgaaaccatctggtgggttctctttcttcttcgccaacccacgcatctacaaaacaaaaccatccgatccaagttattttcttagtcactagagtaagaaatcagatttggagctccggaattgggttttaccttggttcctgatatgaagaggaagtcttgagacctggaaggatcaaagaaggccattttcccctgagttttgtcatatgcagcgacctattcatacaaaccgaaacaatgagacttaaacccttaaagaagttttcgattaagaggaagtagcaatgattgatcttaaccttgaagggtagaatgttgaggcgttcaagtcctggtgccatgctaagcactttcttcccgtgatcggcatcataaagatctctcttctctgtcggatggcccataccggcaggatcgcgaccaacaatgtagaaattagctcccgcgttgatcctagctttggcatgccattgaacctcagttgggccagcgtatagcatcggagatgggaagatagagactacagtggtctctggatccagtacaccatcctccaacacctacatgttcaaatcaagaaacaacaatataacatttttcactccatagcgagaatcaacaaccaatatcaattcatcaaaatctaaagctcatctgaaatacactttgtatccaaagtaacgtttcttggaagagaagaaagtgaaagagataccttctcgtgctgtctcatacgccagctgagaggtacatcatcagccttagtaaacccaccaagtggattcaacaacaagacagggtttttgtacccatctcaagaagtcttctacgagtatccgtcataagaagcgcatgaccattatgcaccgggttcttaagctggaacgcgagaaccgcgtccgcaccgcgccttataaactcctcctgcagctgcgacggagtataacgaaa

SEQ ID NO: 19780 - DNA, 695 bp, Arabidopsis thaliana columbia
atcttccagttattaatcacataaattgaaaaaaatttaagaatatatgcaacaaaataatttaaaagaaaagacaaatttatgatatgtaccacaaaaaaatcactctagatattaataactttgtacaactattgatgcgttttgtagtaagtgaggatgttataatgtagttggacgtaaacaaagagagaaaatggaacgaaggaatatttttagaggtcgcaaaaggcgtttggcgttttgagaaggagtttgagagacaacgtccttgacttgttgttgagaagaaaccaaacgtggcctaaagtcacctcgtgccatgaccaacttcttcttcaaatcaaccacgtactcttcgattcctgcagccatttctctttctttggtcaaacacatacgtaattattttctctacttctctgatttttttaatcaatgaatttgattcttaaaaatcaatgatgacagctaggattaaacaaaaagatcgtggatggttcttacttcttaagagcgaataaggatgatggtaaacggttggtagcagccacgaaattagaatttaagcatatttaaaaattgattaattaagtagcaagtagcttgtgagtttaatgaaataatctttggtggtaacgtagagagctcaccggtcatcttggagacaatcttagagactctgtcttgacaag

SEQ ID NO: 19781 - DNA, 1228 bp, Arabidopsis thaliana
tcccatctccatttgccaccattacaggaacaactgcttgttcaaagaggttccaggatcgccattgccgctccgccgccattcccaaatctttcaccatatactccgcaaaccccgtcgccttatagtccctcaccgccatcatctccccgaaaagccgcataaccgccgatccagctgcaccgtccttaaccgcctcaagccatttcaccggatctaaacccgccttctcagcaaacacaatcccttcagctaatccaatcatgttgcttccaacacaaatctgattcccaattttacagctctgtccactcccagctcctcccataaacctcacaattcccatcgttttcatcaccggagccaaccactccacaatctcggaatctccgccggcgaatatcgttagcttcccctcacgtgctccagcgtctccacccgatacaggcgcatccaccgcccagcaatccctccgcctcgcctccgcgtatatctcacgcgccaatcctggcttgctactagtcatgtccactgttactccaccgggtttaagaccagagagtacaccatcatccccaagaagcaatgatctaacatcgttagagtttccaacaatcgtgaacacaacgtcgctcatctccgctaactctttggggctattggctatgcgagctcctttggtttgcagatcttttgttttccggaggtcgcgagcgtaaactgtgacagaatacctgcggcgataatatgagaaaccatggccgatcccattatcccgatgccaatccatcctattcgagtctttgaaggatcgatgagtttcggatatggagtctccatttctgtgtttccacagaacgaatgaagaatttgcgtgagagacgacgacgattggtagaacataaaaaataagtcttagctacttcactcaattttgatttattgagctcaaatctctttttcttctggattttagttatttcacatcagtcatggctatacttttgatcgaaaggattgatgagtaagggtacttacgtcattgtcgctttggatcttgctagtcttgttaacattttgtattggaggttagtcaatcaaacttttattttttggacaaatcaatcagaccttaaactatcaagaggttttagtgatacaatcttgagatagagtaacctgacatgaggctgtaattgcagttttttcgatgaccttagaccatatg

SEQ ID NO: 19782 - DNA, 1451 bp, Arabidopsis thaliana
tcgactctagattactatatgacatgatcgtgttacattaatttggaaagtagtatatgtctttttcctaaaagtttatgtttagatttttgatcactaagaatataatgtcatatatattattaacctttacacctaaatgttatattaattacttgaatgataaaacggaaaatatcgaaagtttaggctaggtctctctagcatctctagtgtatttatttagcaatcccaaaacaaaattgtgttttctacaattttagtattagattaccaaaattgttgtatatagtctggtgattccgttttgatggtcgagatcgaaagaagcaagcatccactatgtggtcgtcacatgcgaatatttctaagtatacaaccatctatcgaaagtttcgaaacaacccaaatataatagtaataaattctgagaattctcctattttttattgatatgaaaaaagcagtaaaatattatgtaaagtagagaggaaccaaaattaaaacgtgcagatttattaaaagaataaagtgggatccaaaaagtcagcgtgaaacatgtgatacgatataacgacacggtcctatgactaagtccactccaatccagtgacgtaaacagcaccatcacccatagcttcctgtgacgcacatccttacgtaaccatcgttgacgctagactttcctctctgatctctctttcttcatgtatatataacaaaaccttcctttcctaattggtatctatctttaaaaacatacttgaaaatgcaaggaacgatttcttgtgcaagaaattataacatgacgacaaccgtcggggaatctctgcggccgctatcgcttaaaacgcagggaaacggcgagagagttcggatggtggtggaggagaacgcggtgattgtgattggacggagaggatgttgcatgtgtcatgtggtgaggaggctgcttcttggacttggagtgaatccggcggtccttgagattgatgaggagagggaagatgaagttttgagtgagttggagaatattggagttcaaggcggcggaggtacggtgaagttaccggcggtttatgtaggagggaggttgtttggagggttagatagggttatggctactcatatctccggtgagttagttccaattcttaaggaagttggggctctgtggttgtgattgtaaattaataatttaaaattatttttttttcttttaattaagaatcttgattggtaattgttgtttacggtttataattgaatcgtttcatatatatgtatataaagaaataaataaaagaaaagtctcaagttgaaatttgctagagattgtacccaataattttatagcattcattgtgctctgttttgatagtactcgtttttttttgtcacagattttatatagattcatttttttttttatggtattcatgttttgatgg

SEQ ID NO: 19783 - DNA, 584 bp, Arabidopsis thaliana
ggatcccctcaagaaaaatactgcattgattttattatgtttacatatataaaggaaaaataaaattgatatagttatgtaaccaagtaataaaaaaaaaagattgaatataacaagtataatttaaactcagtgacgtagatgcaatatttttcaaggcttccaggctttaggaggtggtggagtcggagagtagagaggaggaacactattgaacatcgtgttcttatcaatttgttggccaccactgctggttaaggaaacgagagcagctacgaggcctgcgttaccagagagagtaggctcgcttgcgttataattgtttcgcaagtcatggaactcatcgaatttgtttggtccaccaaccatagctcctgtgatgttgtttggatttggattctttgtgtctctatacttcaatccttctctacagcttctcctctttttgtcgtttgggatcgtggcgcctcggtgatgaacacgtcttggaaacttcttgccgaatccaaccacatagctcatttttaaggggttgtcccaagaatgtaatcaatctgatcaaacatacaacataatgatgattt

SEQ ID NO: 19784 - DNA, 2097 bp, Arabidopsis thaliana
tcttcgtgtatgtgctagtccccgagacaagcgggaagtcactggagcagatagagttgatgtttcagggtgggctggaaagaaaagacggtgaagttgagcttggagatgctgagcgtcttgtgcgcaaggaacaggagttttgaattgatcatgttaaagtagaagaggcagaagtgaaaagatactcttatggtgttctgttcttgcattagatccaaagaacgtaagatagattttgtaagtgcgtttgatgatggtatagacccagtgcatattccaaagaaaccaactgctctgtttttttgttccttgtttcaagaagaaaccatgtgatactcaactcaaaagacaatatatacagaaatgacagaacctttgtgttcacttcatgtttcacactctccttctaacactcataaagttacaggctctccggacagttcggctatatatcaactcaaacttattcaccatcaaacaacaagaagattttgctagtactaaacacacatacactcacaccctctcttaccttgtgcatcctccataacaagagagaaggatttgatggacggagattgttatcgatcaagaagtttaaagctcgtaacctgggaacctggcttcagatgggtcgaccatgtcaaggaagagataggccatgcctgcaacgccttcaaacaaggaataaggactatcacctccatgcatttctccttttgagagtaacttggggcctctatcaagcaggaaactggcaaaggcttttgcacggtatagatactcactccttcccgtagctctgtaaagcgcaagaaaaacatatgcgttcccacttattccatgacagatccccacgcgcttgagcaatccacggttccaaaccacctctgctgcagctgcactcgcttccagaaactctctctccccaaaaacctgagttttgttttcatttcccagagatcaactctctctcaataatgtattgaaagcaaataaaacaacacacacacaaagatttcgactaaaaaggcaccatcacctcagccgccttcccaagtgtgagggcaatcccaggggctccatgacaccaatgcacaagaatatctttcttcttatcctcttcactagcagggtaatttccacttggaaaccgattcttgatcatatacttaagggttcccttcacatcttctgcctcgtcaggcttcagctgaacatccatcaatacgtgcataataccagcaagtccatgtgctgcaccccagtaccttttgccataccattcaaacataagcggtgagcttcctttcttagccattgatcttccttccttgataatctcctgagcaacttcgcgctgcacactgagtctgagtcattaagaaactgaacgagactcatcaatagctctatcatcctaaagaattgcacttacgatggtatctgaagacaaagtttctttgccgatgtacttgttgataaacagacaagcccatagataaccaactcttccatacaaaagctcgttaggaagatcactagatagtcttatctgtaaaaaatcctcaattcaattacacaaccaagagaaacaaaaactggaccaaaaacaaagctgagaagaagcacaccagacgaaattgtcccaaatagtaattgagcaaatcttcctcaccagaaagcttagctgcaacagcgccaagaccacaaacaccagctcggccacagagaaaagtaacatccctaccaaaaaagtctcatagttaaccaacaattcaaagcaacttgtttcttctatagaactaagctattagacaagggagaagaaaaagaagataccctgaggaagcagaagcagtatcacaagctttgacgatttccaagcagagggaaagatcgttggcgttgcagtaacctgataagctctaaagagtaaaaacgcagctccaagagttccagagtaaagagtgaagtcttcaacagtctgtccactaaaaccccaagtttcaatcactacctgagagatacaacaataacaacttagtgaccatttcagagtaactaaccaatcacaaggaagaagagtagatt

SEQ ID NO: 19785 - DNA, 363 bp, Arabidopsis thaliana
tatggatcttcaatgtctacctcttcaggcccatcatctagtacttctccctcccacacatcaccccttgtagcacattttgaatgaacagcataagtaggacaacgcttgcgagagtaacctccaaaggtccaatctatctgtttgcgacgaactccgcattcccaatcaccctgaccgagatggtaagtgcgagagatgcggtggtcatgacgatatatgtttatgactctgggcaaatcgatacaatctttgtgtagcatgaaatcacattcaagacaaacggaaggattacggtcaccaaccaacccacaagcgttacacgcgaaagagtccacactcgccatgagggtgaatgctatg

SEQ ID NO: 19786 - DNA, 698 bp, Arabidopsis thaliana
accaatatgagctcaattaaaatatgtaggacaaacagcattatcccgatattaagcgtatgaattcgcatgcaacatttttaaacattctactgatgacagtatttctctataactagtgatcctaggtagtactggacaggttttgcctgctgtacttggttaatgatctggtcaaccggttttgatataagaaaaatagtcatgagtacataactgtaagaaaaggagttaccgtttccttagcagtggacatggctaggaaaccagcccccatatccacctcttgcaagccaatagcgacaatgccaacatctgaaacagcagaacccagccaagacacaagcgctccgcgtgaagcccgtccttcaccaacattccaggtaccaatcaagattttaacactgtcttgtcgggcatatgccatttccttttgagacaattctgttcggattaagctgtcaagaggtcctggggatgtcacataccatcctcttacaccaccatgagtggctaagctaaaaatgaaaccaccacctgctgctagctttatcacaggttcattgtgtgaacccagcttgcaattagctttccaccaagatccaagacctgaatgtaaccacttgaataaccacatatattcgatcccaaaagtgcaaaagccagaacagcctgctgatgatgattcactcccgcaa

SEQ ID NO: 19787 - DNA, 1174 bp, Arabidopsis thaliana
catttgtagcttttttctccatagggcttggacctatcacatgggtgtacagctccgagatattcccgttgagacttagggctcagggagcgagtataggtgttgcggttaataggatcatgaacgcgacggtctcaatgagttttctgtcgatgacgaaggcgatcacgacagggggcgtgttcttcgtattcgccggaatagcggtggcggcatggtggttcttcttctttatgttgccggagacgaaaggattgccattggaggagatggagaagctttttggtggtgggggtcctcgtggtgatcgtgacggacttgagattcaaactaaaaccatctcaattggaggtatctcataagagtttctcacaattaaaaaaataaaaataatgaaaatgaaggagagagagtgtagaaagtttctcacttgagaaactttgagatactctctacaacccatcatgacaattctcatctcactattggttcaattttttaataaaaatatttttttaatcaaataatcaaattataatataatattaatatatctctggcgtgagaaactttatgggtttctcatgaatggagatgcccttagtttctctacttgtatcatacaataaaggtcacagattttgaaatttgcaaagatatatcatacattctcagaggaagcctttgtctctaagactctggaccgtctccttaaccgcatcttcaaccgcagtaaaaaccagcccgagctcaatcaatcgcttagccgcatcattacacgacgtaagcccaggttgagtctctttatcaaacttgtgaacagcaaactcagggaagagcttagacacaagagcagcaaactcactgaactgataaatcccattagtgcataaaaaccgtccagaagcgtcaggtgtttcgaatagcatcacatgacctttagccacatctttcacgtgaaccacaccgagccagtgatgctcttgcgtctcggtcgagccttgtaaaagctgtagcagaacagcacagcttgcgtttaggttcggttgcagaagcggtccgagacatgttgatggatgaatcgtcacaatgttggtccatgcttctcgaaaattccaagctgctttctagctaatgtcttcgaaattggatacatttctacaacaaaattata

SEQ ID NO: 19788 - DNA, 510 bp, Arabidopsis thaliana columbia
cactataagatttacgaaaacataaagttgaaactataatacgtacagcttcatcaaccaaaattatttcgatggattcaccagcctttacagaatattgcctccaaacatgaagcaatttaacctgaatacgccaagcgttcttgtaaggttttagcgatttcaagggagtgaattgaagaggattggcgagcatcatttttaaaaatgaatttggaaatgaaactgtgtgagtgtaagctgagtgagtagattgaaatggggcgtccgatatttataagaatgagtggttaggtcaaaaaaagatgcgcaaaagatattatccttggagttcaagtttattcgatatcaagaatctgatgattatagaaaaatatttttcatttccgtaaaagtatgtatgaatatagggaatatttaaaaaaaaatgtaagataggtgcaaaagagaatcgaacgaaatattagatgtgttagaattatggagaaatgtaaaattattccaaagaag

SEQ ID NO: 19789 - DNA, 773 bp, Arabidopsis thaliana
tgcttctcctccaacctaagcgaaagagatttctccatagattcccaagtccatatctttatcacaccaccttctgaacatgaccacaaatcgcctgcattttccaaatacaaacaatgggtttcagattgaattcattacaagactatatataaagtatatgaattttttttgaggtagaaattattaccataagaactcatgattacggaattgacaggacccttatgagcttgccaagctagaccttccttgaaaggagaatcatcaccatcatcaagcacataatccatcttccaagaccgaatctttccatctttatgaccactccaaacaagcctattcccattatcaaccatcaaacaagtggtgggagaagtactagccgactcttgaaacggtgcagcatcctcatcacctctctgtacacggccgcttaaaccacaacctggctcaaaggcatcatcaaagttccagaatctaacaccactctcttgtccagcccacaattgcgtctccgtacaagcaatgttcctcaagaatctcccaacctgagtctccttcaacggatgtggtctcaactctaaacaaggaggacgcgccgagtgcaaaggagaccgcgtcgggactttaaacatcccaacaccgcctccggatccgacgaattcaggaagaggttgaaaatcttctccgatctcaggctggtgcaagtaatcatcagaatctcctgtatctcatccggtgaaagggaaagatgaggaattggtgggtac

SEQ ID NO: 19790 - DNA, 532 bp, Arabidopsis thaliana
tccccgaataacccacatatattcgatcaccaaaagtgcaaaagcacagaacagcctgctgatgatgattcacctcccgcaagcggcttccatttccgtcccactgagcaattacaccattcatgcttccagtccaaattgatccatctgccgctatcgcaatagcttctactttcctagtgtcttctgcaaaagctcctgcacttctagtggcagctcgacgaacagctcctgcagctcccataatggcatggcgcgatctttgcagaaagccctgtgatttttccttttttggtgcggagaagaacttcgctttcgtgtcttcaacttgttgaccttgtgttggtggcatgtccactcgattttcgacttggccatcaatattaaaaactttcagaagctctttattttgagcatccctgcacaagatagatctctttgaaaaagttccaacaattaagactaacgtatgtcattattttcagagaaaaagggcctccaaagtgagaatgagaggtgttgacagccaaac

SEQ ID NO: 19791 - DNA, 803 bp, Arabidopsis thaliana
ctctatgattgctctctccgtctgccaagtcgttgacactttcgtctagagagtacgttttctcttcctcataccctaattccaattttaacttttctgccaagttatctccaaatttattctcatcttatttgttggtatttctgattgcagggttcaggccttgatattatccccaacaagagagctggctttcacaaacagataagacgcatgcatgcattggtgggaagagcctcggagaagacataaggaagctggagcatggtgtccatgttgtgtccggaacacctggtcgtgtctatgacatgataaagaggagaagtctaggcaccagagctattaaccttttgattcttgatgaatcagatgaaatgctgagcagaggattcaaggaacaaatctatgatgtttacagatatcttccacctgatattcaggtttgcttggtttctgcaactctacctcacgagattttggagatgacaagcaagtttatgacggatccggtgaagatacttgtgaagcgtgatgagttgactcttgagggaattaaaaacttttttatttctgtagagaaagaggagtggaaatttgagacaatatgtgatctttacgacacacttatcatcactaaagctgttatcttctgcaacacaaaacgaaaagtggactatattagtgagaaaatgaggagcagcaacttcactgtctcatcaatgcatggggacatgcctcagaaggagagagacgagatcatgaatcagtttcggacaggtgaaagtcgcgttttgatcacaaca

SEQ ID NO: 19792 - DNA, 2184 bp, Arabidopsis thaliana
agttttagtccaaataaagtcaaatggaataaaaggagttaccgtttctttagcagcagacatggcaaggaagcctgcccccatctccacctcttgcaacccaacatcgacaatgcctacatctgaagtgacagagcccagccacgacataagtgcatcatgtgaagcccttccttgaccaacattccaggtaccaattaaaattctaacattgtcttgtctggcatataaagtttccttctgagacaattccgttcggattatgttgtccaggggtcctggagatgtcacataccatcctcgtactccaccatgagtggccagactgaaaatgaaaccaccacctgctgctagctttatcacaggttcattgtgtgaaacccagcttgaaattagctttccgtctaaatccaagacctggatgtagccacttgcataacccacatatattcgatcaccaaaagtgcaaaagcacaaaacaggccggtgatggtgattcacatctcgcaagcggtttccatttccatcccactgaacaattaggccacttatgcttccagtccaaattgttccatctacagctaacacgatagcttctgttttcctagtatcttccgaaaacgctcctgcacttctagtggcgactcggcgaacagctcctgccgctcccattatggcattacgtgatcgctgcagaaagccctgtggcttttccctttttgaagctgagaagaacttcagtttcatttcatcatcaacttgttggtcttgtataggtggcagatccccacgattctcaacttgcccgtcaacatttaaaactttcagaaggtctttactccgagcatccctgcgcacataaatctctcataatgatcatcaacaagtgactgaaaagacccagtccttcaaccaatgtgagaaaaataaaagcctacttaccagattgagaatgagagtgactgcacagcccacactttagctcttactgaatcagctaacaaaaacttgacttctgaggaagatatgctacatgtcccatttacagtaacttggctccttaggtcaatggcagatctctccactaatagagcagccatgtgtttctcctccggtttaagcagcagagatttctctaacgtatcccaaggccatatttttataacacctccttcagaacatgaccacatatcacctacatcacaaccacaagcataagcaagattagagaaagaacatatttttcagatcaatcaatcatagtctaaagcaaaaacaactaaccataagagctaatgacaatggaattgacaggaccacgatgagctagccaggagacacgctccttgaaaggatcagaatcatcatcatcatgagaaacagagctctgatccatcttccaagcccggattttgccatccttgtgaccactccacaaaagcttgttgctttggtcagccaccaaacacattgttggagaagtagtaacagactcatgaaacggcgccgtatcctcatcccctcgcgggacctggccaccaatcccacacccagcctcatacgcatcttccaaattccaaaacctgataccattctcttgaccagcccaaagctgcgtctccgtacaagcaatgttcctcaagaatctcccagtctgcgtctccctcaacggatgcggcctcagctcaagacacggcggacgtccgggatgcaccgccgcgcgcaccgggaccttaaatatcccggaaccgccaccagcgccgataaattcaggtaatggctcggtgtcgtcatccccaagaccgacattgggaggaggattaacgatggtgtactcctcagctccggcgttggtttcatcagcggcgttttctgtgatgttacctccggtggagaattcgtcgtcggaggaatcgaaataaacggcttcggatgctaatgtagcggatctaggaacctcgtccaggctgtgtttgcggatctgatggtgaggcttgtgatcgaattgtaggctataggaatgcgttttacgccgcggaggaacagggacgagcgtggccaacgcctcttcgtcttcttcttcgataattagcgaatccatcgacaatcagaggaattcaagaacgagagaatatgggaatggggacgaatggtgaagaagagaaaagggagagtgagagagaa

SEQ ID NO: 19793 - DNA, 924 bp, Arabidopsis thaliana columbia
atcacagacttggataaattgactgataagtcattagagtttattactgagggttgcagatatttgaaatcactcaaacttacaagtaacagatttaggttcgtacaagtctcccaatttgttctttttgtacataacatccgttgagtgttctgaatatcatcaatgtatgggattactttgacagtgacgaatgtattgccgcgtttcttgaagtctcgggaggttctcttagagaactctgcctaaacaaagtccgagatgtgagtgtttttagtacctaaagtcttgttcatgttcaagttggttttcgaaagtgtttgaggagttttgtttttaacaggttggtccagagactgctttttcgcttgccaaagtttgtaagatgttacaattcttggacctctcgtggtgtcggagactcaaagaagatgacctaagacggattttgcgttgttgctcgtcacttcaatcactcaagctatttggatggacgcaggtatgatattatagagaaacctgtaattcaggttacactggtgcctttttttgtttatgttgaattgaaccttggggtgatctgtgtcaaaagtacttaaatgacagtattatcgttgtaggtggaggatacatatcttgaagaactttcaagatcagacgttcatattaccggattgaaactgacttcactctatgctcaccttgataacttttacccaagtgtaggtgccaagttcttctgatgagtagacaactggcgtttgtatatatagctttgaattgatgacctttcttcattgttagaccaaattatagctgttgtacaggttcatagtaaagaaaaaaagatagtgatatatgaacaatgttacaatgtcttttagaatcagctttttgtaaaagattgactaatagaagagaaga

SEQ ID NO: 19794 - DNA, 543 bp, Arabidopsis thaliana columbia
tgagttagctaccttcaaggtaagttcatccaaagcaggataagcaaacttctctagttctgttgtccttgcagctagaaaactacaaatagcttccaaggccacctctagcgcccggaattcaaacggggattctatatagtaacaaacaaacacttcaataccaaaagtgaaaagagtgaatggttcattagttcttatgtaggcatcaaaagatcaaagatttttccaatttatatccttaaaataacaaaagttgaggccttgaggggtaccatcttcttcacccaaatcaccatctccgtgaacaccatgtgcctcgtttcctacaggtaatcttctctgaaactcctccaggacggggataacattttcatctgacgaatctcggatcaaaacctaaaaagcattttcaaataaccaaatcaagccatcatcacttcaaaaggagacaaaatgttccaaatatcacataagtatcaagccgaaatagtgaacttttaaaaaagtcttcacatttggctacaagccagtaagaaatga

SEQ ID NO: 19795 - DNA, 552 bp, Arabidopsis thaliana
ctagtaacgtatccaaatacatgatgatatggatactcaaaatgaagatggaggtgttcaagagataaccgatcaccataccaccactattcagccggatcctactccacaagcttctccaactttaagacgaatactcggattaagagaaaaatcttctcgcttgtattacaacaataaggcggtactcaccctatacaagcagtgtgttctcttgccctcttaccacaagatcaccaagcttttataggaaagatagaagcaaactttgttctgcaaacctatgaagaagctaaggagagtgaagaatggataaatgcggtggcggatgaaaccggagctatgattcgtaatcatacttgggatgaagaagacttgcctccggggaagagagccgtgagctccaaatgggtcttcacgatcaagtacttgagtaatggtgagatagagagacataaagctcgcttggtagcatgcgggtatactcaaacttatggtcgtgactatactgaaacctttgcacccgcgccaagcttcacacggtgagagttg

SEQ ID NO: 19796 - DNA, 1707 bp, Arabidopsis thaliana
cattcttgcatactttgcatgattaggatagctttgcatacatattgcatttctaagttgttttcaggtgatttggagctgtttgcaagcaaattggaagaaacgtgccagaactagaagacatactcgacccccaggtcgagtgactttggagccattcttcccacatactcgacccccaggtcgagtgactttggagccattcttcccatccactcgaccaccaggtcgagtaacctcagctcaggccactcgatgacactactcgaccccctggtcgagtatcactttgccacaccacctgacaacactcgaccgttcactctaccacaccactcgaccccacggtcgagtatcacttcgccacaccatcaccatcactcgaccattcactctaccaagttactcgaccccctggccgagtatcatcactcaccaccatcagcatcactcgaccggacactcgatcatgtcttcacagtctactcaaatccgcactcaaccagacaagctgagcacaaggaagagaagaggagaagacaaagtgtttggaagcggcctggatctccatcaaatcacgaagcccatcacggcccattatctctctgtgggccgagcgattaggttattggcccgtctactatcattttatttcgttttgtataaatagatgtcttagggttctgtcctgagacatctagtcgacattgactttttgcatcagttttattttctattttactctactgcgccgcttttgcttcttcaacctgtaattcgagattccgcatttgatttcatctgtcatcttgtttctctactctttatctctttacttatgcaatattatcgtttatctgtgtttatgtctttgagcatgttgtctgagtagtgacttagaattcttagggatgggatagagtacttgtggaatccgtagtctgtagaatggttaagctttagaattaattgaatccctttaggactagttgcgtttactgcttatttctttctgatcaactggaattcgatcccaagctttcccgcacccagaaggtgttcgatggaatgcttgatccactagttcctgagatatgcgtctctatcccaagggattggccgtttagagtgtgtattgactttatcagtctgttcttattgcctgcatagttagattccgttaatgggaattagtttggactagctttgcttgaggatttctatcacgggagtgaattgatctgttgttgaacctgttgtctagggatagcttgattgcgcttgttaaccattcgaataggctaggataccactctactcgattaccccatccttaggaatttctcgtctatcttatttctctgttttatcgttatcgcttaatcgttctcattgcctgtttcttagtttttacaatcactcgaccatcttactcgaccacacccagtgtctggcaacagactgtgcagtcgagtaagattgtcttgtttcctgtctattactcgacctgttactcgaccacatcctccttctggcatcagcctgttgtggtcgagtggttttagtaattctgctattgcttctgttttctgcatgttcgcttaggactgttagaaaccccaaaactgttattgcttggcttgacttagtgacttctgatcacatctcatctgtttgcatcacacccatttggattgacactaaaat

SEQ ID NO: 19797 - DNA, 1278 bp, Arabidopsis thaliana
tgtgatctttctcttccatggatttcaccaacatgtcgtcaatgtagacttccattgtcttcccgatctgtaaggcgaagattttgttgacgaagcgttgataggtcgccccggcgttcttgagtccgaaggcatcactcggtaacaaaaaatgccttgctctgtgtaaaaagcggttttttcttgatcttcgaggttcatcatgatctggttgtaaccggcaaaagcatccatgaatgacagtagcttgtttccagaagttgattccacgaggcgatcgatgtgtggtaatgggaagctgtcttttgggcaagctttgtttaggtctgtgaaatctacgcaaactctccatttgccgtttttcttttttactacgactgggtttgcgatccaatcgggatatttcgccttagtgatggatccaatcctcaataatttttctacctcggcttttacatcttctgctcgctcccaacccaattttctcctcttctgcttgatgggtttgaaagttggatcgatgttgagctcgtgtgatacgacgttaacacttactccgggcaaatcttctggggactaggcgaaagtattgacgttttctttgaggaaggcggtgagttcagctgttagttcttctcctagatctccgccgatttctacgcatcgctcgggctttgcgtcgtcaaggcaaaatgatgctataactgctcggagagttggtgtcgtagattcccgagcttcttcgatctttagctgctataactgctcggagattgacttttcttcagctcgaccaagcttggccttcttatgattcgcgtcggccgtcgactcagtgacggggttcctgagcttgtgcgctgccatgaagcagatgcgagcatttttcttgtttccccagatggttttcacgccgtcgtttgtgggaaattttaggcatagatgatacgtcgaggcgacagctcggaactgatttagccatggggtgccgataatcgcgttgtacacggtctgctggtcggtaacagagaaatcgacgatttttgttacccctttggctcggactggcagtttgatggttccgagagtcatagtggtttcccctgagaacccgagcacaggtcgtggagttggcacgatttgcgtcatatcgatctttatttctcgcagagttgtaaggaaaatgatgtccagtgtgcttcccgtgtcgactaggactcgttcgacgttgaaatcagcgatggtcaatgtaatgactaagggatcgttgtgtggttg

SEQ ID NO: 19798 - DNA, 1570 bp, Arabidopsis thaliana
accaccaattgcatacattatccatttatcgtatctatggtttgccacatcgagcgtagcctcgtcgtacgctgcacccaccacacaattttacatcattacatgtctttgtggtatgctcatcattacatttctaattctgctctaaaaattcttaatagttattctaatatttttgggcaaataatgttagttttttagatgaaaaaagacaaggaaaattaaatagtaattaccttggcattctctccacaagtcctggtccaaaatgattgaatgccacggtcactttcattttcacatctttcacaaaattatcgttgtgtccgagcaacatcacctatacatatataacaacccatatcaaaatgtgatattaacttcccaagacattaaatagctatgttaatgattttgaaaaactgaaactgactttgtcatgctgagtgaaatagttgttggaaatagtgattgccgtggaagcatggattacatcgatgagtccgtccgtacaactcgctaggtaacaatgatcgatccaaacattcgacgaaccaaaaatagtgatggcatcaccgtccgatcccttacggtgaccgacatgcgtcgggctgctcctcacctttccagatttccctggtttgcagtcgtggatactgatcccatgcacaatgacgttcgtcacgtcttgtatcgtgatgcatggtccgtatgcaatttctacttttgcccctcgcccatctatggtcttatagctattgaccatgagctcattcgctagggttatgaccatatccttagcgaaagtaatccacaatggcttggcttggatcacgccgtaccgcaaagaacctgggtgggggttttgtgcattgtcgtaagggtttgtgacaacatatatattacctttcttgccacccaaggtagatgaaccaaacccaaccgcgcaatctgctaggtcttcacgattgacatcccagtcagacttgagccgccaacaggagtccaccggattcatgatgttctgaggttcttcggcggggtagggtgcagccgcggggctatacccgtaataaccgttatatgcggcatggaccaaggactgacataagaatagtgccacgaggaggcacgaaacggtgaaatgagtcatggtccgatgggtttaaggtttgagtagggatactaagaaaagagaaaagatcggcaagtatacttaagggagtgttagatgagatattgtgtcggacagattagaaggtgtggtaaacttgtattggtgagacgtgagactttggtgttgttgcacaagatcatatatatactcaacggcgggcccatgtttagcccctaaaattatgaaatcagtcattagttatagcaattaaatctaaccctctatttcatttgtttcctttttcttctatgatcagtttctttgcattcattatttaatttattttgtttctagttatcttatttattttttagtttccaaatttttaaaaatcctttttgtattttgatttaaaaatacaattttattaaaattttacagaaaattaattat

SEQ ID NO: 19799 - DNA, 2357 bp, Arabidopsis thaliana
tttgcgaggaaaatttgcggtggaacaaatcactcacagtttgctaggagatagagagacgcgtgcaacggcagaaggcaacctcgctactccctcgcaaaatttgcgacgaactcttccctcgcaaatttgcgagacgattgcgaggaatctgcgtggaaagcatcattcctcacaaaaacgtcgcaaatttgcgagagatttacgggtaacatgtctccctcgcaaattgcgacgaatttgcaacgtctgtttattctgtcataacttttgcgacgaagtagcgagtcttgtccagttaggtgagcacgttttaaattatcttaaaggtctggttggtaggtgggcttccctcgcaaatttctcgcaaaatcctagcaaatccctcgcaaatgccttgcaattctctcgcatatttttttgggacatctataaatagccaatgtaatgtctaagaaatcataactcaaaccaaaacatttacttacaaacaaaaaaaaaattcaaaaaaaaaaacttattacaaaaataagaatgtcttgggcggagagcatgagatttacacattacgaagttggatgtataatcatagaaatcaagcgaccggggaggtgacgatagagtattacgacgaactgcgcggtttcatgtatcaaacgacaaacgaaccatttgctcgtgagaacggtacaatactctgtccatgtcgtaagtgtctcaatgagaaatatttggaatttaatgtagtgaagaagcatctttataatagaggatttatgccaaactactatgtatggttacgtcatggagatgttgtagagatagcgcacgaactagtaatacaaattatggtgtcgagcaatctagtaattttgataatgatgcgaattatggtcagcaagtacctgatcaatttggttatgggtataaccaggaaaatagatttcatgatatggttacgaatgcatttcatgaaactattgcttcatttcctgaaaatattagtgaagaaccaaacgtagatgctcaacacttttacgatatgttagatgctgcaaatcaaccaatttacgagggatgtagagaaggaaattctaagttatctttggcatctaggatgatgactattaaagctgataataacttaagtgaaaagtgtatggattcatgggcagaattaattaaggaatatttgccaccggataatatatcggctgagagttattatgaaatacagaagttggtttcgagtcatggattaccatcagaaatgattgatgtatgcattgactattgcatgattttctggggagatgatgtaaatctgcaggaatgtcggttttgcgggaagccgagataccagactactggcggaaggacgcgagtgccatataaacggatgtggtacttgccaataactgatagattgaaacgcttatatcaatcggaaagaactgcggcaaaaatgagatggcatgctcaacatacaactgcagacggagaaataacgcacccatcagatgcaaaggcgtggaaacactttcaaacggtatatcctgactttgctaacgagtgtaggaatgtgtatcttggcttatgcacagatggatttagtccattcggtttgtgtgggcgacaatattctctttggcctgttatcttgaccccatacaaacttcctccagatatgtgcatgcaaagcgaatttatgttcttaagtattttagtgcctgggccaaagcatccgaaacgagcgcttgatgtcttcttgccgctgattcatgaactcaagaagttgtggtatgaagatgttcatacatttgattactcgagcaaacaaaatttcaatatgcgggcagtgctaatgtggtcgattagtgacttcccggcatatggaatgttattggcatggacaacgcatggaagattatcttgtccctactgtatgggtcgtaccgatgcgtttcaactaaagaaaggtagaaaaccatgttggtttgattatcaccgtcggtttcttcccctacatcatccgtatcggcgtaacaaaaaactttttaggaagaataaaatagttcgtcttcctccgccatcttatgtttctggaactgatttgtttaaacagatcgattattatggtgctcaggaaacctgcaaacgtgggggtaattggctcaccacggcgaatatgcctgacgaatatggaagcactcacaattggcacaaacaaagtatcttttggcaactcccatattggaaggatctattcttgcggcattgccttgacgtgatgcacatcgagaaaaactttttcgataatatcatgaatacgcttttgaatgtgcagggcaaaacaa

SEQ ID NO: 19800 - DNA, 2050 bp, Arabidopsis thaliana
tatattgtgtgttttaagaactttgtggaattcgatccctaagtgctataactgacctctttatttgagagagtaatttggctcatatcaaatttggtgtcgttgccgaagttctcttcaattcaccattagattaggttgcagacacaacctgggtgtgcctcgacactaagaagacatcagagcagatggtcgtcggatgactcttggtgactacaagtctacaacagaccaggtctcttctattccaatcggtctgcaatacgaccacctaccttcgaaagaagcaatttcgaaataaaccttgcattctatactcttgtgagtatgcacccctttcatggtcaaccacaagaacatcctatggatcatattgagcggtttgaagacttggttttgagcattaaggcagaaggtgtttcttatgactaccttccctgcaagctcttcccctattctcttgctagggaagcagcttcttggcttaagcagttgaagcatgtatctttgactacttggaaagaaataaaggttactttctcaacaacttttataatgacgcaagatctgaggagctgagaatgcagatctctaccttatctcaagaagcagctgaagcatttcaagccgcgtggataaaatttagaggatattagagagattgcctgcatcccggtttcagtgaggttcagctgttaggtatcttgataacactgtattttactcattttaggtgtgtgtttatcatcattcagctttgcatctgctcattgtatcatatcattttgcactattttggcttattttgcacacttaggcatttagaatcatcttgcatacatattgcatgttttggtgtgttttcaggtgtagcaggagcttacaaggattttactcgaccctctactctatccaaccaggagggaagcaacatagcaatctactcgaccagtttactcgatccaggcagctacagaggaggcagtaattcactcgagcagtttactcgatccaggcagccacagaggaagcagcagatcagtttactcgcccctcttactttatcctctactcgacccatttactcgaccaagggcgacctactctacaagatttgttgatctatcaaagcctcttcggatcctcctcattccccaatcaacaagacatctaagcatacagataggagaggaagaagcatctactcgaccaattgatcactcagagcatgcaggcaaaggcgcagactttgcagcaccctgtttactcgatccccaagatcgagcaatcgtccaaaccgcctcaagtctcttgtcttctagtgaatctagagttttcaacattttagtataaatagatcactttgggatttgtccgaaggatctagcttttatctcttagtttttctttgtgttcttgaatcttcaaacttaattactcttaatctatttcgtttttgcattttgttcaaactttcacttatgatttctccttttccgagttttcttggagcttgttccaaggctataagatgaaggttccacctttccatgggtagaatgatccggatgcctatttggattgggaaaagaaaatggaacttgtattcaattgtcaaaacaacactgaccttaaccgcgtgaaggtcgctgcaaccaaattttacgactatgctcttagttggtgggattagatcgtcactacaaggcggcgtaatggagcatatcctattgagacatgggaagggttgaagcttctcatgaggcgtaggtttgtgccaagccactatcatcgtgaacctcattccaagcttcgaaagctcatccaaggaactccattttagctttacttgaaactgtaataatgttgcgttggatgtgatcttcatcaagaagattataaatctctacaaggtctggaattgttttcttcataaagatttgactgtgaatcgttgagtatgattcattcaagcctgcaagaaacttcacaatctttgcacaatctttgcagcattcatagttcggacaagttttaacacaagtagcgt

SEQ ID NO: 19801 - DNA, 853 bp, Arabidopsis thaliana
tttaagacgaatactcggattaagaggaaatcttcccgcttgtattacaacaataaggcggtagtcaccctatacaagcagtgtgttctcttgccctcttgccacaagatcaccaagcttttctgggaaaaatagaagaaaacttcgttccgcaaacctatgaggaagccaaagagagtgaagagtggatgattgcggtggcggatgaaaccggagccatgatccgtaaccacacttgggatgaagaggagttacctcagaggaagagtgcggtaagctcaaaatgggtcttcaggataaagtacttgagtaattgtgagatagaaaggcataaagcccgcgttgtagcacgcgggtttactcaaacttatggtcgtgactatactgaaacatttgaccccgtcgccaagctacacacggttagagttgttctatcttttgctactaacctctcgtgggacttatggcaagtgaatgtcaagaacgcttttcttcaaggagagctagaagaagaagtgtatatgactccaccaccgggactagaggattccattgctctggggaaagttttgcgacttcggaaggcaattcatggcttaaaacaatctcctagagtctggtatcataagtcgagtactactctaaaggaaaaagggttcaagaagtccgaagctgatcacactctcttcgcacttcaatccgatcaaggtatcattgttgttctcatttatgtcgatgatattatcatctctggagacaacaaagaaggtatccatgacaccaagctctaacttaaatctacattggacataaaactccttggcgaactaaagtattgaccagggattgaagt

SEQ ID NO: 19802 - DNA, 1146 bp, Arabidopsis thaliana
tccccttgacgtaaattataaagatctctggacaagtcctatcttgtctctttggaaagcttctactacttttgaaggctttttttgtgaatcttccgtttggccgtggctgtgttgatgtgtgtgtctgtttttttttttgtctgcatatcttttgtcaaaaatgaatgctctgttttggtctgaaactgagatcttgagtcagattttttttcattatcagaagattactgatacagaatgggacttgagattgtgctttctctcaatgatttttgggctctataatatttgttcttcttacaaaagttgttttctgaagtagatgaaaacagaggagatttttcaattaatttatctgatcaatagttaatcaaccttattaacaaaaatgattaaataattaatctcgcttataattctaagcctgaagcaagaagacacacattgatcctcgttcataattcactccccagtccccacattctgtcccatagtgagcttcacatgtttctttttctcctcctcctctctgcttcccgctccggcgaagagtcgccgtccggagacgccgtcccattggccaccggcggtcttggcagaaagagttttccggaaggattcttgttcggaatcgccacgtcagcttaccaggtcgaaggcgagacccaccaagatggtcgtggtccaagcatttgggatgcattcgtcaagattcctggttaatctcataatcaatctaattacaattcactaattaaactgattagttaatcatttcgatttcttatttaccattggtaaaaaaacacaggtaagattgccaacaatgccactgctgagataacagtggaccaatatcatcgttacaaggtacttcttgtcactaatcttttgttcctaaatcatcatgtatatatttttttttgtgtgtggttatattataatgtacatcctttggtgttcatgttaatcacatttcaggaagatgtagatttgatgcagaacctgaacattgatgcctacagattttccatttcatggtctagaatattccctggtattactggataatgtatacaattaattacattgcttatattttagattaagattagtctatactgcaggttatgaatcagaggg

SEQ ID NO: 19803 - DNA, 1157 bp, Arabidopsis thaliana
taaacatacacctaaaatgagtaaaatacagtgttatcatttaccctttggcaatggagctaacatgttcagaaagcactaatctcttcgactagtctttcttgaccttcttcaacagtatggaactgatatctctttaagcaggttggcttccttggagttgattccaatgttgaccaaatgcttgacatatctaataagttgagcaaatgagttctctgaggtatccttaggaatggtggtcaagttcttctcctttattgccttgcacttcgtatcgtgtacttcctgcttagaacgacggtttctcggatatggaaccgtaagagtgtaaacaaggttgggttgcatagggatatgaccctcgtaaggtgcaatgcgtacccattgtcgatcgacgttaggagtgtgtccatcgacactctattcagaagtagttttggaaaagagtttaccatatggtgtcgatcgacaccagctctagagctgtgagctccaactcgtcctctgtatccaattcctcctatacattgtctccatctctgactaagataacattgcagctcttcgttggattagtattaggggtgccagaaagaaaaccctcttgtctcttgatagactaatcagtttaagccaattgaacatctagcttcttcatgtgagagctcaaattgtcgatcttcccatgaagatctgtgtagatagcgtcaaactttctattgaagtccacaactaacttggcctgaccctcaagaatctactcaagcatggattccatcttactatgggcagacggtggaggaggggtttggtaagaagaattaccataagaccttgtgaagttgctctgaggataggtcttctggaaggtaggtttggggctgaaacctgaagaactcttgttcccagtaaacctgttgccactaaagttgccttctggctgtccaaagttcttgtaaccttgaccatcaatgtagaagacaccttcttctgactcaggctcaggctcaaagatgtagcatctgccggatacctggtattgaagttaacattcctctctgaatcaagagccatctggtatctttgatcaactcctctaaagaaggtacctagaatttgtacctcactaaaaccatgatacgggcaatgtagtg

SEQ ID NO: 19804 - DNA, 2254 bp, Arabidopsis thaliana
aaggcaaatcagacacaagtacacaatattttaattcagacacaaaactacacaaagtaattaagacacaacacaacaacagaaccaatagagtgacaaagctaaccgggactatcaagtacacaacacaaccacataaccaataaaatgacaaagctaatcagacacaagtacacaatacaaagcgcatgagaaaacagacaatagaaagcaattcaaacagaacactacacaaagtataatgaataagctgccaagatgacgagaaccttataccaaaaactagagacgcacaacataaacatttcagacaccatacataacacacggactaaggactaaagacacaacaagcacaaaagaaaaagcacagaaaatttacctcaacaaaaatcttgttcttggcatgaacagataatccacatgatccagtgctctctggattgtcccctgaacacatatgagactcttcctcttctatcctagatgtcactttcttgtagatctcctctgacttcccatcgatgaaagttccatccgcttttctgtgtgtctcatctagcagctcaaggaaatcaggagttgtgtctccagtcttttcacactgaaacacaaagagataaacaagttagattcataaaatggtagtttaagtaatggtaaggagagaagaatacttatcttacccgttttcttgcacgagctttgtatgaggtctggcctgaacgatgtttatagatgtctttgccatccagatcatgatatctagcatttctgctgttgttactctttttctctgactttggatcttgccaaaactgtactagacctttccacacatcaggatcaatccattttggcttggcttcatcacccttctccttccaatttcccttccaccttgacacttgattagacatcctagactttagctttgcttcaaactcaacccttactcttttgttaattgaacggtcccagttatatacttgctacaaaacagacaaagcaaacatcagactatgaaaccaaacaacaaaacaagcataaacatcaaaagagcacagaacttactgcaaacgtttcataccatcgatcgattgtagcctttgatgtctatgaccaattggcatgaggttctttgaaatctctttcaaatatgctgcggattgttgctgcaactatagagtcatcgtcaaacctacaacaacagcaacaaaacacataaggatctctatgtctttatacttctaagaaactacaatgctaagtacaaccaacctaaatccagagacttctaaggcaggaccaaacttctaaggcagaaccaacctaaatccagagacttctaaggcagaatcaaacttctaaggcaaaactaaccaacttacaagacctaattccagagactataagcttaaccttaccatagagtacccggaggacgctttgggtctagccttgtcaagccagcacgaccaggactatcgaggagctcttccagtgtcagattgttgagacggtcagcttgaacatcagaatgattgacaaaaggctgagtcgttggcgttggaggcgatggtggaacggttgaacctgaacctgaacctgaaccttgaacccctgagatattcccaccactaagcggagaattgacatgcaacgggtcacgctgctgttgtctaaaccggacataagtattatccgacggcatcttgcacaaaaaacaaatcaagtgttagatctgggaaaaaagaagtaagatcggagaagaagaataggtcagatttgagagaagaacttagatcggagaaacagaggttacctttgaggcaaaatagatcgagtcagagaagaagagccgcggcggttctggagcacagatcgaagaagaagagaggcggcgaagagagtttgcgccgtaattagatcggagaagaagagaggcggcgatgagtgtaacagattagagaagaagaagaagaagagttagatctgggaaaaagagtaagatcggagaagaagaataagtcggatttgagagaagaacttagattggagaaacagaaattacctttgaggcaaaaccgatcgagtcggagaagaggagacgcggcggttctggagcacagatcgaagaagaagagaggcggcgaagagactctgcgccgtaattagatcggagaagaagagaggcggcgatgagtataacagattagagaagaagaagaagaagagaggcggtgacggaatg

SEQ ID NO: 19805 - DNA, 879 bp, Arabidopsis thaliana
taagcttattttcatcactttgcagaagctctgaaggttaatgttgagtttgaggagaccagaagatgtgtgacatctgaaggtatgtttcgttggcaccatttgcacttttgtagcatgacatgattttatctatctgtttctattcctttctggtagttttcgcccccaacaataccaaattctccccgaagcagaaagcagaaccaaacaaatgtttatatctacttgttatatatgtttgtatctatattagatcgtttctagtgtttgaagtcgtgcaaatctgggcatttggcacgaaagtatagggaagtgtttgatgtttgttaaagatgtaataacctacttgccatatgatggtttgtgcatgagcatgaagattcatttagacgacatcaactttgaatacttcatagcgtcttgcatagctgcattttttgcacaactgtatttagaagttctactctgggatttgcaggtatcacctggcgtcactatccagaggcgaaacaatgggatctgatggttgaggagttgttgggatgttccgaccccatgaaaagggcgatcgaagaatttaagtcagacgatgcttatggttccgagagtgatgagataggcagctggttttcaggtcgttggtcttgcaaaggcggggattggataagacaagatgaagcttctcaagatagatattacaaaaagaaaattgttctgaatgatggttcccgttatgcctgatgcagaaatctggtcatgaggatcctcggtggcatcacaaggatgacttgtattatcctctcagtagctctaggcttgaacttcctcctgtgggctttttctgttgtagatgagagacacagacgaggggagtaa

SEQ ID NO: 19806 - DNA, 676 bp, Arabidopsis thaliana
actacttgtctgaaagcttgtaacctcaaagacttccataaactatcatactctttctttcttaatgttttaaccttgttgagaaactggttatcccatgcttgaagcttcagaatcttcatgtttttaagaatctctgaagttgctttcattctatcatctttggcattcatgatatctgattggtagtttctctgaagccttgtcagggggtagttgcaagccatcaccattaaagttgtgaccaatgcagctaaagctccaagtcccagatgtttttgcaagatataaatcgccgagaaaatctgtattggtaacatccatatgttgtttacataccaaatgaagtcagtgattctctgaacatctacgctcatgtagttgatgatctctccgctcgtgtggctttgcgagattgacttaataaaagtaaacctttctggtagatatgtgatatcaaagctgctcgaagacgtagtcctagctgacgagctccaaagatccattgtctttgagtaactgtctcaacgattttcgcagttagaaacctgagtgcaagaaggtaaccatggtttatattacgatattacgaagatatgaaggactactcttgcaattagacttacttggagaataagtagaagatatcgattagacttacttggagaataagtag

SEQ ID NO: 19807 - DNA, 917 bp, Arabidopsis thaliana
caggagaaatagagacccacattcagttaactaatgtgatttaaacggtaggacctaaatcaataattgatcatcgctcccgtgaaaaaagacattgcaggatagctcgtcaagattgtgtatgcatctaagaaaataagttgaatgggatacatctcgctatattatgcaggtcataccagtcatcacatattctggggcagcatagccataagtacccataactcgagttgatacatgggtttcatcaccctggggtccagctttagctaagccaaaatctgaaagcttggcggtgtagtcctgaaggttcatcagcccaatcaaggatatattagttgtggaaaggtattcccaatatcttggagcaactttggcaaagcagaaagaaaagaataactgcttacggagtcaagcagtatattggaagtcttgaaatccctataaataaccggtctttcagcattgtggaggaaagcaaggcctttcgcagctccaagagcaatcatcatccttctagaccaagatagcggagctgtggtttctgaagagagagcccatggtgacttggttaaataagagacgagtatgacaagactaaaaggcagaataagcttgtatatgtaggaatgaacagagacttcaaaaaatggagaagggtgcggggattacttcgaaataggtgattctcaagactgcctcgcagcatgaactcatagacaagtaatcggtgatcgtcctcgcagcagtaaccaataagcttgacgaggttgggatgacggagctggccgaggaagttgacctctgtaagccattcacggtgaccctggagtccctccttgttaaggacctcgacggcaacagggagagacttgaggccgcgcggagattgtcatcaatgtacccttgtagacggt

SEQ ID NO: 19808 - DNA, 555 bp, Arabidopsis thaliana
tgataacagaagaaagaagaagacttggttgctgattttaaaacaatggagatgtctaatacagtcgaagagggaaacacagagttaaccgggacagtgagctaactagaagaacatgtagtgtttttggtttggttttttaaggatcaatataaaccgtccgattgtttcggattgctttgattttattacaagcgagatggcttcttcttctattgtttcgttgtatggtgtaatgttgggttttttcttcactttttttttttggttttgtgttgtgtttatgatatgttttgcaatttgtaatcattggcaaaaatgataggtttgattttatagtgatataagaaaaccgggatacaaaaagaaaagaggtttagacataaaatgagtttctctaccgttattaattctctcttcaaggagcctccttggataagtctaattgttcaaccatacccactaaaaatcatggtgggctaggggattgtccacgtccaccacgtggggctcgaccaccacgaggcacaatcggcctcctctcgaaggtttaca

SEQ ID NO: 19809 - DNA, 790 bp, Arabidopsis thaliana
attatttacccaagaggctacatacttttattatgctcttattttggccaactcatattatttgcaactaataatattttttagccgaaaacttctatattgtgccacaatctagataaaaaaaattacgcaggtatttttgttttggagaaaagaaaacacctatattttggatccaaaaaaatttacttttgttttaaattgtacaattcgtacattgagatttttgtttaattatagtaagagaattagtatcagacgcaaatgggaaatatatatcggaacatttggggatataaaaattagaagagatgaaacaaacttccttaattaaaatggaacacaaccacatcaaagaaaaaccggcaacacaagatacaacacttaaaagttaaaacacttatcagaggtcaccagaggcatgaagagacctcaaatgaccaatttataagataaagataaagatctccatggaatcaaagataaagatcttcatggtcagttggaaacgggacggacatgaactccaattttgtggagcaaagcatcggctcttccatggaagccaacgattttgtggccttcctctttgagttcgaaggcagtgccagcttcaagtccaaagggaggggacgtttgcttattagtcttgaacctaagcatagttatgactgagccatcactcccaaagattttatcgtaggtgtcttcgactgcgatgatgtattcacttggatagtcaagtacgaactgcagttattggaaccttgaatacgtcatcatggaaatc

SEQ ID NO: 19810 - DNA, 935 bp, Arabidopsis thaliana
tgtaagaacatgtttccacagcattgtacattatttcaaacagtaaaagtataattgaaatcacctaagagaaattagaaccaagagtatatatataatacaattttctgtaacgctcaatctagaaacaagaaccggttcgtattttttggccaactcatatacttttaactaataactttttatgtttggagaaggccaaaaacttcaatatggtcacacattctagataaaaactttgtgcaggatttttttactgagaaaatacgaacaactatatatttgatccaaaaaagttaacatttgcattttaaattgtacaattcatacgttgagattttagtttgaattatagcaagtaaaattagtatcagaaccaaataatggcaaaagtaagtattatagaacatatagggaaactaaagatcagattggaacaaacttcctttattaaaatagagcacaagaagaacaaagaaaaaacaacatcgcaagagacaacgcgtaaaacacttatcaaagatcaccattcaccagaggcatgaagagacctcatatgagaaatttagaagatagatttgataacttattagatgcatggaatcaaggataaagagctccatcatcagttggataaaggacgaacatggactccaattttgtggagcagaacatcggctcttccatggaaaccaacgatcttgtggccttcctctttgagttcgaagactgtgccagcttcaagtccaaagggaggagacgtttgcttattagtcttgaacctgagcatagttatgactgagccatcactcccaaagattttatcataagtgccatcgactgcggtgatgtattcacttggatagtcaagtacgaactgcagttattggaaaccaaatacaacaattgaatacattatgatggaaccggaagag

SEQ ID NO: 19811 - DNA, 1293 bp, Arabidopsis thaliana columbia
ggtctggccccttctgtatcactgaggtccgtccttatggagcagtcactctagctggtaagagtggagtattcacagtaaatggtcaaaggctcaagaaatacttagcaaatcaaatccttccagaggtgacatcgattcatctccaggaacttcttgatgattaaaggagaaaaggagtcaagctaatgactttaaacaagctcacttgggaggaagtcccatgactatctctgtaaataattttttcttcacttgttatttttgatttgtcttagttgtgattgtggttctcaggaacaaaataacaacgtggagatagagtaaaaattcaaaacttttactctacagaagacctggagatcgagtgtatagcccgttgaagtacaaaattttgaaaatcttctgttgcacctggagaccttgcactcgagtatattggtcgagtatgtgtgatgtttaaacccaaaaatttttaaatcatcattttactcgaccaacagaagctacagagtcttacagggagtttaacaagtttacagtagttttcccagtcaacagagtgtggaccacgcgctgaggaaaagatggagagagaatctcaaactcaatctccaccaccccttttgaaacttcactcgacctctgaaacctaagccgcgctcgacctcgctgaaatcactcgaccgccgcctgaaagaattctctgccgtctcagacgagttccacgactcactcgactaccgattccggttcaacctgaatcactcgaccgctacgtaaccgactctccaatcattctactcgaccacgaatcgccatctctcaccaaagagttactctgactcaatttcactcgagctcctcacttcgacgttcgccatcaccttgttctcgccacactcgaccgtttctgcgccgccgcagtcgagtcctttactcgacctctgaagatctactcgactacatccagcagactcgacccccgatttttggttttgttcctcccaattctggctcaccgataaagcactagaccttctaaactcaccagctgtactgatttcatcaatctcactcgaccccgtaagatttactcgaccacaggtttcttttcagcttgattcacttaagcagaactctacgagagcccagtttactcaaatacaagacatactcgaccaatttggttcattccattgcttgttgataacaattttgattcaattgttatctttgagactaacctattgacatttgggttttcagttgtaaatcttctgcaggaaaatc

SEQ ID NO: 19812 - DNA, 1715 bp, Arabidopsis thaliana
caagctcctcagctcgttctctagctcctctgctcgtcctcaagcttatcagctcgccctcaagctcctcagctcgtcctcaagctcctctgctcgtcctcaagctcctttgctcgtcctcaagctcctcagctcgtcctcaagctcctcagctcgtcctcaagcatgaccgagtaaattgtatcaccagagctaagatgggcacgaaaggttgcggcgacatcatcccatagtgataagtagacaataacagaccttaaaataaaaagacggaagtatcagttcaattttaaagttttgttcattatttttttttggtttggaagtgctagcttacgaatcaatccggtatcgcaaaaccaaacgttgagtagaagttggatcattcaagtttgacccttggacgaaagtgatttggcctacaacatctagatcatttcaaaggtgttataatcatagttcatgtttaaaaaatgtaagaatcatgaagaatattaccaggaagttcaatgttggtgttagcaagagcttgaaggttgtcaaagttacgtagcataaatttttccctctcaattgtagggccaacatctgaaacttcaataatcgttgtggcagggagaaaacggaggagaaaaggattgtcagtgatcttgtagagtttcgtgcaacgtcccacttcaaacccactaacattgaagattatgccttcacgcaaaacttggcggaaatgtgaagcaagagctgctgggataaaagcatggattacggagcactattaatgaaacaaattaagtgttagttggccatcaattacatatgaaacaaaaaaaacattaaacatctaagatgatttactttttcatcaagtaacaggaggactatgcccatgaattggccatctttcttgatgttgcgagcatcccaaaaacgaagtaggcgaccaacaacctgttgagtagagcgaccaagacgtaaagcatcaaaagctacatagtttgctttagaaggaattgcaacaacatcaacttcagccattttcagagtgtgtaatattttctggtggaaattgataattgtgtttgggggtgatgggagatgatgattttatagtagtttaaaggaagatctataggaggtttttgcttttctccagttacagtttcgatttgagatattaaaagtatgaattaaattgcaagtagtggaattttgtaggaattaagccatgtatttaagtaccttttagtaaataactgttgatgtttgagcttctggggaagaaaaatacggaaagctccatggggcatgttgggggatggattgcacccctcattttagctcggcccaaatcaagaataaactaatcaacatcaagcccaaaaagcccataaaagttggtccattatcctatcaccagcttagtttttctataaatagagaggcatctcaaggaaaaaaggaggaagaaatccatattaaaacgtcttcaagctcctcagctcgttctctagctcctctgctcgtcctcaagcttatcagctcgtcctcaagctcctcagctcgtccttaagctcagctcgttctcaagctcctctgctcgtcctcaagcttttcagcttgtcctaaagctcctcagctcgtcctcgagctcctcaagctcctcagctcgtctttaagctatccagctcgtctttaagttcttcagctcgtcttca

SEQ ID NO: 19813 - DNA, 1756 bp, Arabidopsis thaliana
cacacactgtgctgactaacatacttccgaataacataactctcagatccaccagccctagtcgcacgtagtctccaactacagttttcatcaatacaatgaagaacatacctcgtgagatctgatttcactgtatgaaactcaaagttgtgcttcactgcaaacatccgcaacgtgaataccatttcatctttgtctttgaaaattttttcaataaacaaagaatcaacatcacttagaccagttgaaaacgcggaactagaatactgttgatcaagaatactagatgttttagatacacacgcctcaataatcctagaggttaacctcggctgccaaaataaaaagcttacctcaaacatcaatctatcttaaataatgattttacaaggatttttaaaaggggtttaaaaacgttaataatgattttacaagattttttaaaaggattattacctgagtagtagatgcagaatgagaagcaaaaggatttgaagtcgtcccagcctgtaataaactcaatcactgacttaataatgattttacaaggatttttaaaaggggtttaaaaacgttaataatgattttacaaggatttttaaaacgattagtacctgagcattagggacagaatgagaaacaaaaggatttgaagtagtctcagcctataataagcacaatcactgacttaataatgattttacaaggatttttaaaattataacacaagaaggttattaaaaaacctgctcaactgtcacagaaatttgctctacagtcaaacataactgaagcaatcctccactctgtgagaatttgtgcataaaagttgcaagctgtctatcgttcctagtataaaaaggatgagattgtatggttgtagacgtggagactaacttgtaactaagcttcaaagaattggttgaactatctatttgaaaatcctctacaagaatatcaaccaacgcgtgataggtaatgtgctcatcaatgagcactaaagaagctcccaattcaatgtctaattcaaattcccaagtcatattgtttgtcaacttccacaagccacaaacagaatacaattctagcattataacctgataagataaataacaacacaatcaacacccacaaaaacattttcactacagagagaagcaaggtttacaaatcgttttatagagtaagtaagtagcatagaataatttacaagggattttaaaagctttgaaaagtggttaacatggtttacaaatcgttttaaagagtaagtaagtagcatagaataatttacaagggattttaaaagctttgaaaagtggttaacatggtttacaaattgttttaaagcgtaagtaagtagcatagaataatttacaagggattttaaaagctttgaaaagtggttaacatggtttataaatcgttttaaagcgtaagtaagtagcatagaataatttacaagggattttaaaagctttgaaaagtggttaatatggtttacaaatcgttttaaagcgtaagtgacatagatctatcacgaaagcatatgcaaaagaggtaaacactaaatcagaaccaaaatctattacgaaatagtataacgaattcacataagcaaatctatcacgaaacagtataacgaattcaaaaggattttagaacagtataacgaatgtacaaggattttagaaacagattcaatcatcaaatctcaaacaagattcaaattcgaagctgaagcaaatgtcaaact

SEQ ID NO: 19814 - DNA, 1136 bp, Arabidopsis thaliana
agtcgactctagcccccggagcacgctgagtagctgcagtccagcttatggtgcaatttagataacttcttagcaatttccatggagcaacatgcttgtccttgtagcagctgttgtaccatctgtttcatttcagcatcaggagcagcaagaccttggttttgctgaggtgcggacccaagtggtggttgcggctggtagttcccctgaaattgctgctttggaacaaaaccttggttgtagggaacaaaaggtttgttctgaccttgttgttgctgtggaggatacacctgatcctgaggattagcaacgttggtgctgcggtaggagaggttggggatgttggttttgaagttgttataccctttgtagccactttggttgttgttgatgtagctgacttcttccaactggttaccctccccatcttggacttgatacttctcgtcatcaacaaggaagtgcacatgcttctgctggctaagaagaattttgtccagcttgtcattcagcgctttgatctctttcttgtgtttgtcatccgagtcagttggtcctttggtggtcctatcgcagtcctcgttgtaatttccatctgactgagctaggttctcaaccagttcccagccttcttcaacatctttgttctggaaattcccattgctggcggtatctagaagaactttgccaaaaaggccttcttgcaatcgtcccaagtggtgattgagtcatggggcagattcttttcccaaatgtgtgctttgtcgcctaaggagaatggaaacaaccggagcttgaatgcctcttcactgacaccattgatttttgttaggttgcagagtctatcaaattcatccaagtgatcgagtggatcctccattggcagacccattggcataccatggaatttgttcccctatatcatcgagatgagaccactctaaatctcgaagttgttgttttggatagcagggccattctcttgattttgttcgtcagccatttcgagtggttgctggggtacaaggttgactgtgtttctcctttctctgatttcgcgagctatgtagttgatgttatcgttaaaaaggaggttttggttgcaggttgatcgagtttgcatacagtagaggtgt

SEQ ID NO: 19815 - DNA, 1995 bp, Arabidopsis thaliana
catgaccatctgaaccaggtctactgaaccatttgaactatagcacttgaaccatcagaatagaccaagtgaaccatgtgaactataaccatttgaaccatttgaactagagtaggtgcaccatgtgaactatagcatttgaaccatttgaactagagtaggtgcaccatgtgaactatagcatttgaactatttgaactagaataggtgcaccatgtgaactaaaaataggtgaaccgtttaaactatatcatttgaaccatttgaactaatcccaaaaaagtaaccatttgaacttactgctgattcaatatcttgagagaaaacttcacaccgtcgatgccttcggtcactcggctctgccaaataatcgcacctaccacatcttgtgtataataatagaagtaagtattcgtacaatttctcaaagaaaatactataaaattgtcaaaataactcaccgaccaacacattcttgttaaccgtcttctctatgatgttctcgaaaggagtaaaattccaaaacgagagtgcatccgttttcaaagctttagtaacaatagtctgttccataaaccatatctggtagtcatgggatgttgctctcacagactcagcgtcgtttcggaccgagaaattagtgataattatccactcatactcatattctcgtattcgatcaaagtaaaatgacgcaagacgacgaggaatggtagccttgattcgggaacggggaccctacaccaaataattttaactatatacatgcaagttatgtgaaagaaacaaaattaaacatattcgcaatatataaccgtttgatctgccaatatgacgcccagttcgaactcatccggtgccacaaacttcttgaacacattcacaacgaaaacgcaaataatccatccactgatagtcggacaaagttcggaaacagaatgatatccatccatgttgacaaacgacggcttcctttattagtggggtgggttctttttttggataggatgaaatatgaatggtgtaaaatcgattgtaatcctgtcttaaataatattccaaccgacgcgacgattggtactcgcagtgccacctgtcaaccgacgcgacgattggtatttcaactgacgcgttgactgggatgccacccgtatttatagttgacccagatgaacctgttgtactaggtttgccaaacaacgactggttcatagttgaacctgttgaactatgtttggcaattctgttgaactaaaaaacttaactatgcttcaaaattccgaaaacacaaatttaaaaacaaaggattgttcttaattgaacatgtcgaacaatatttgacaattccgagaaacacaaatttacacacaaagactttatcgtagttgaactccttgtactagttgacgagttaacgtcaatcatcattggtttcaggctgcaaccacctctccaagttgatgccacgcgtagctttgttatttgtcttctttcggcgcttctcacctgtggatggaaaccgggtttcttgattccttcctttttttggagtgtaatccggcggttttgcgaccttctccacataatcaggaggaaagaaccagtgagcctgatgcggcaccacataaattgttctgtaatatgccaatgcccacgtctcgatcaagtaatacttcgagcaaagaccatagatacttacattcaagattgaacggctattctaatccatctagatcgctttatggttgcagctatagcatggacgcacgggtacttgtctatatcaaattctctgcaagaacaagtattcctttccaagtccaccaaataagaacaacatcaattccaattacgttgtattcttgtcggaaactgtttagttcagttgcatttagctttgcaccaattggacagcgcgtatgtaatatattctccacaacatgcaccacttgccttgtgttcgatgtagacgcggaatctttgcgatgtgtgttg

SEQ ID NO: 19816 - DNA, 2401 bp, Arabidopsis thaliana columbia
tgtttgtaaaaattagttttgtcatgcttaacggtctaaatcaaatgacacataccatgactatagcgattctgaaccgttttagaaatagcctgggtagaatcgtacaggtgacaagtacttcgcacgggccgatccaggtttaagcaccaaactcgtccctccaacctgcccacgcatagtaccgtccctccaaatcccaatatccggcttgccaaccttttaccgggaaagggagttatgcggttcagacaaaaccttatatcatcaaccatccccatttgtttttagaaaacctttttatacatagtataatatgataaaaatcgcacaaacaatcatataaggtttccggggatcccgtttcacaatacataatacacaatagtagtatttacaaatatacccaacaatctacaccaagaacctattgtcccaacgaccctctatggtttttccccctaaggtcacctgcaacagaaatggtggaatcatgaatataagtactcaatgagttcggcgcctaatctcagaagctaaacaacccagcccataacaataaacgttagttaagcaacaagcaacaagcaatcaatatgcaataataatgcaatataatggatgcacgggtaaatgataacaatgcaatcatatggccatgtgaacgatccttcccatcaaaccaagtgaacaatccgctattagccaccaagtctacaagcgatgtaccacatgggactaccacaacatgtatcctcgttgcatcgtcatgcaacactcggccccttgggagcgacctagtctcgctgagtcgaacaaaacagggaagcgcactcgaacaccacaaactctatatgcatttaactaagctacgacaaagtgtacttgaagcatcaagcatacatgacgtaaatgataattcttattaattctatgatcaatcaacaacaacatcaacaagcacataatcatcaaagcaagcacataaggtaactcatgtgccaccacacatgcttcggaactcactatgattaagcggatcggatgagagtgatcacttagcggaatgacaacgtcgatcgggaacttctggttgatcgcgaagacttcatctaccttcggaaactgatcgtcggatggttcatggaaactgctacaccgtttggaattcagtcgtccacctctaccgtcggcttcaggagcggtcgtcacttcacgaagattttgaatctatctctctctctctcacgatttctgtttagctccaaagcctttgttctacttatagaggaggagattcgacccatgatggacaaatgtcgtgtcttaggtgacgcaaaacccacaaggacactcttcctctgattggcttggagtttgcgtcgtccaaccctatgggacacgccaccttgtcattgggtcatagtttgtgtcgcccaactcatggcaacactcgttctccatgattgactcgatgtttgtgcggcgaagctcatcattacctcgttttgtccaaaagaggtaacttgcccaacgattcgctcagaactgaaatattgccttgatttcgcccaaggaagataacttataccatgggcaatatctttcttttgattggggcagagatataatcattgtgtcgatcctgtaaataaggtggactttctctctccgaccaatgattacttttcttacgctttttcctcgattttcggaatttatgcttcaaatatttctctaaattcgaccgttccaagaatcatctaggccacaagttaggccgtcctcaaccatggaacgctcacatgggagggtcacagcattccccagttccatgaccaaaactgacttagtcaagtaagaggattttacttagcattccaattataagtcttttcccaagaccttacaaccccttggcatataactccgactcaaaatttcttaccacaaccgcccctatagtcaatgaccgggtcactacattcaccctctcattataattcgtcccgaattcccaatgagataaattgtcgacgttcttaacttggttagaactttcactttttctgtggggatccagcaagccaatcttgaaggtcttctccttctcgattgaacttcgcgtgacatgacaaggcaagtccgcgatcttttctctcgatccggttcctttcattccaccatgccatcttataactggtcgtctaattctcaaagattctgttacttgagacttaaactctggtacaggtgctgaacatcctccaacaatccaagttgtgcaagtgtggtcaagcatggataactcgtgctacaaaactctaagtttgaagagcatgatatattctcagcaggctatacatcaggtttgtggagaagtttggtggctcagtgagta

SEQ ID NO: 19817 - DNA, 1630 bp, Arabidopsis thaliana
ctgattaccacaacaaatgatttaaactttgaacttttgaagttatcgagcaacatggcaaatcctggtcctatatgacataacatgagttcctctgcctattgtaaaattaggaaacacaaaaccaaaatgattatatctggtattatagtgtggtgtataacatatactcacacaagatatgctcttaagatgataaatgtctaatcttccaagtcccaattttgaaaacgttgatattaatttcccctcaaccccactagcctcaaattaaattagcagccttagtgtgaaattaaaagatagctaatgaattgcatttcagactttcacctccccactcacgtagctataactccttaccgtttcaaatctcttcacttccccaattttgttgtgtataaaaacctcttctccacttcactctttccaccacaaactttctaaaactaatcaacaatggcaacccaaattcttctctgtttcttcctcttcttctcggtgactctctcttcatcgggtcacccaaaaaacttcagtgttgagctgatccaccgtgactctcccctttccccaatctacaacccacaaatcaccgtcactgatcgcctcaacgctgctttcctccgctcagtctctcgttcccgccgcttcaaccaccaactatcccaaaccgatctccaatccggtttaatcggagcagacggcgagtttttcatgagtatcaccatcggtactccaccaataaaggtttttgcgatcgctgacacaggaagtgacctaacttgggtccaatgtaagccttgtcaacaatgttacaaagaaaacggtccaatcttcgacaagaagaaatcctctacttataagagcgagccttgtgactcacgtaactgccaggccttgtccagtacggaacggggatgcgatgaatccaacaatatatgcaagtaccgttactcttacggtgatcagtcgttcagcaaaggagacgttgccacggaaactgtctctattgactctgcttcagggtcccctgtttcttttcctggtactgtcttcggttgtggctacaataacggtggtaccttcgacgagactggttctgggattatcggtctaggtggtggtcatttatcactaatctcccagctcggttcgtcgatttcgaagaaattttcttattgcttgtctcacaagtcagctaccacgaatggcacaagcgtcataaacctaggcactaactcgattccttcaagtctaagcaaagactccggcgtggtatcaactccgttggtcgataaagagcctcttacttactactacttgacgcttgaagccatctccgtcgggaagaaaaagattccttacaccggaagctcgtataacccaaacgacgacggaatactctcggagacatctggaaacatcatcatcgactctggaacgacactgaccctcctcgaagctggtttctttgacaaatttagctcggcggtggaggaatcagtgaccggagccaagcgcgtgagtgatccacaagggcttttgtctcactgtttcaaatccggaagtgcagagatcggtttgccggagataacggtgcatttcacgggtgcagatgtgaggctga

SEQ ID NO: 19818 - DNA, 1706 bp, Arabidopsis thaliana
cagctatagtcaccgtctctctattttactttgtgaacactaatgtaagtagtatataactaatctctaaattttgcttttgattgttttctctaaaaaatctattgtttattcatacatttgacagtaatctttttagaaaattataagaaaagtacaatcaaactatcaaagtccctactattggtgaactctcacttctcaacgttctactcttcaccaatcaatgtgaaaatacaaataaaatcgacatcgattacatatacataaaaacgacagctatttttattcagctaactacattgcaattcaacctataattaaataaaagaagaagaaaaatccaaaataaaaaattaaatcgagaaaaataaaagatgaattctcaaagagtagagggtagtaaacttttgtttttaaaaggaattacaaaatcgaatcataccttttttttatcaataacaagtataaagagtcttatatgatgatttattgattaccgttgagaaactaaaacaaaaacgccgtgcgtacaacgcttcccatgtgagcgacaataatatccaataaaatatcaccacgtgtcaaaagatctcaacttgtgaccccactacgctactccggtgacgaaacaccacagaacactccggcaactcgccgagatcgggaacaaagactcatcctcttctcccatcggaaagaacaccgccacgtcatcagcccccgagacagccgtctttttctccgacgagaaaatcgggctctcaagaatcgtcgaagatgttgtctccatctccgtaaaccatgcgaactcgtcgacacatgatggcgtcgtttcaatcccccttccaagaaccataaacttattatcctcctcctccgcctctggctctacctcaggctcaggttcgggtttgggctcgggtttaggtttaggcccgtttcttgtggaagaagtgagaggccaaggatggttatgctcagaagtgtaagtgatgagaatcatcgttggatcatctctgcttctctcgacttgcttcctcgccggacaaccttttgtgctactacaacggtaataacctctagggtatggagatcccttaatgggcttttggccgtacttacgccaagcccatgaatctgagggcggagttgtgtcccctttgtgccgagatccttccatttctttcatcggtacgttcactactctcttctctacggatctcctgctgtaaagtaacaagtacatcaatatatgaatatactttagtcaaatgagaatttttcttgaaattgttatataattcgaatcacatatatctacctaccttcttttaggcgaatgagaagagataagagctttcatgccgttaaaggttgaagaatttggtgattcgggtccggtttcttgactactttcatgatcattgtagcttctcgccatatctagacctcgcttcatgtttatatatatgctctatagagtatagactatagttatatatatttacaagaagttaagctaagaaagaaaggtcggatcaagattcggatattttgttgatcttgatcactttttggaaatatatgagttgcagatggagaaagaggagtagaagtagacagagagatatgagagaaagagaagatggagagaaggtggagaagaagaggggttgtgtatgaatgaggacgtgcgagcatat

SEQ ID NO: 19819 - DNA, 858 bp, Arabidopsis thaliana
gtgttagaagattatattcacagagaaacaggggatcttacctgcactcgtggattctggaaatcatccatagcagcagcaagtgcggggagcactctctcatgatgttggttttgcaaatctggacccaaatctgtagacaactgtccaatcgcatttatagcagcccaccttacgcgaggatgaggactttgaaactggctcaaaaccattgacaccacttggtctagattttttatcatcacctacatcaaagttcaagatattcactatcagattgaaaaccacaaagataaatcaactcagaatcaatcattatttaacatccaattgaaagtaaaaacaatgaaacaattaaggaaaaagttcattaagacatgttattcactaaaaattatacctttgaacaaccttcagcaatctgagcaagtgcaatcaaagaagcatgatgtttctgccactcagaggcagccaagtaagcagaaaactgctgatatgcaaccggaacaatggtgtttcctcccagagaaattgctaaccgatccaaacactcttgacccatgctgtagttgcttgtctcgccagcatcttcatcctcagtctcagcgctgtaccaagcaggatcgtcctcaatatcctcgagcatcttcataagaacagcaaacaacctgtcaataaactgaggaagcttcctgaccataccaggggcacgctcacgcgcctcagccagagtaaccaaaaactcaatcgcaagatgacgtgtactctcctcgagggaatcagcctctgcaatctgaagcatcgaaccaactatgtcaacaagttgccgtctaaggaaccgtggctcggtaccagcaa

SEQ ID NO: 19820 - DNA, 606 bp, Arabidopsis thaliana columbia
gtaacagaacctgatttacagtgataacccattagatggtatcagacacaaagaagagacataggataataaatgatgtcatgcttgaaacagggcacggtcatacccgctgtgtactagatgcatatggatctttgcaagagcataagcagcagcaggaagaagagattcgacctcttcatcactgacctaaaaggcagaacgatcctagataagcaaaagacaggtcctgatcgaagcaactttcatctagaaactgactattctacaattaattaatattcgagttctcaaaagcatagtgtcatgcatccagaaggtctctctacatcaggagatgtgcagtcttgaagaaacacatgaagaaagattcattaaggataaaacttacagctgaccatccatcaatatttgtgctcttcaaaatctgaactggcctgaagcaagaaattaatcaatcaaacggaaaagaagaagttgctaaaatggtaagagaagaagaaaaacagtacttacgtatccacagggcaaagaagcatacaatcctctcctttactacttgtaaatactcttcttacacacaatccaaagggctattgtttgttg

SEQ ID NO: 19821 - DNA, 535 bp, Arabidopsis thaliana
caaaacttgtaaaagggtttgaaaaagtcagattacgaaaccctagttctctctccggcgaaaaccatggtggcgcaaaacagtcggcgggacttctagcagcttccctgatcctaactttagctctaattcgtctaacggaagcaaactccgaagggacgctcttcacgcgcttcgccggagcttatcagatccagacaatgttgttcagagttgggatccaactcttgttaatccttgtacttggtttcatgtcacttgtaatcaacaccatcaagtcactcgtctgtaagatcctctctctgtcacattgttttgatgattcttgaattcgtttcttgtacaagttgttcaatttcaattggaatctatcactgtaatcttgatttcattctttgatatagagaagaacagaaaaatacttcattgttgagaaacttcatatacttatctgattcaacattagtctctgttttgctcttatatttggcttcttagtttcctagtatgttttcttcttggcagggatttgggg

SEQ ID NO: 19822 - DNA, 2143 bp, Arabidopsis thaliana
tttaaattccctgttttcttgttctgtatactctattgtgaatcaaaccgaaaatgtgaaccttgttggctgttgtgttgtgaaacattgttggctcttgtgttgctagtgttttcgggttaggcatttagtcaagtttagttctagactcattagtttatgtagtaatgcctgttttattgttgtttgatgctctgttgtgaattggtcaaacatagatgagtgttgtgttgtgattacattagttcttggtcattagtttagttcagttctaaactcgtgttatgttgttctatattacacaaatgatgatgctttgattgtgaatgatgctatattgttgagacagtactattgtggaacatagtttatagtcgtgtgtgacttgtatttcttttgggaacataactttgttcacttttgtaacatgtttacttctttctttgttggatttggaatcaaaccaaaaatgtgaaccttgttggctgttgtgttgtgaaacattgttggctcttgtgttgctagtgttttcgggttaggcatttagtcaagtttagttctagactcattagtttatgtagtaatgcctgttttattgttgtttgatgctctgttgttaatcggtcaaacatagatgagtgttgtgttgtgattacattagttcttggtcattagtttagttcagttctaaactcgtgttatgttgttctatattacacaaatgatgatgctttgattgtgaatgatgctatattgttgagacagtactattgtggaacatagtttatagtcgtgtgtgacttgtatttcttttgggaacataactttgttcacttttgtaacatgtttacttctttctttgttggctttggaatcaaaccgaaaatgtgaaccttgttggctgttgtgttgtgaaacattgttggctcttgtgttgctagtgttttcgggttaggcatttagtcaagtttagttctagactcattagtttatgtagtaatgcctgttttattgttgtttgatgctctgttgttaatcggtcaaacatcgttgagtgttgtgttgtgattacattagttcttggtcattagtttagttcagttctaaactcgtgttatgttgttctatattacacaaatgatgtgataagtgtgtattttgcatgttttgagcatccatttgtcatcattttagcatcatatcatcactgttttataccatttcacatcatttgtcatcactttgcatgtttaggatagttttgcatgcatgttgcatatttgcgttgattttaggtgatttggagctgttgacgagctatctggaaggagcggacctgatcatgacaaaccactcgacccagaggtcgagtaggagcttcaagatctcaagagaccactcgaccaacaggtcgagtagaggacatcaccaattcaaccaccactcgaccccgaggtcgagtgccatcatctcatcaccagacagtcactcgatcacttcactcgaccatgaggacgagtgtcttcacctccatcatcagacaaccactcgacctcctcactctacctagaggtcgagtacctccatcacaccactcgactgcatactcgatgacaagcttcagagccttcttcattctgcactcaaccagacactcgagcacaaggaagaaaagaagactccagctattcactcgaccacgttggtcgagtacagtgcttaacccgtcccaatacttcgtcgttttgagtattagggttttgggatatttggctataagtagcaatgtacttcacattttcgcagacaagaagtttttatctagttttatttccgcagaccttgtgttctagactttttgtaatccggatttctctttatctattcagtattcagtattcagtttctgttcttgatttcgtttactgttgttcattctgttatcatcctgttgttacattgttgttatcatgttttcaatttgttcaacgtttatgctttctgttatgatgtctgagtagtgaatatgtttctaaggatgggttagagtagtgtagaattctcagtatactaggtgattgagtattggttgatagatcccttctggattagtttttcttaatgcctattgctttctgatacg

SEQ ID NO: 19823 - DNA, 2000 bp, Arabidopsis thaliana
ttgctcatataatttgtacaatacacaatacacaacaaaataaatggtcatatccgcaaatatcaaaacaatatttactttagtaaaataacaaagtaaaatgtctcctcgactcctccaattgcttataaattgaggtgatcccttatttcattatctcaataaattccaccaacgtcactctatctcttctcccaaaagcctcaaccaaacattttccctcccaaatctctagaataataacttcaaaaaatcacactcttatctccataattacactaaacctactcttctctcctcatttaaccacaaacccacttctcaatttctctaattctctacccaatttttttttttattcaaagggaaaagaaacagagtaagaaaatgaaaatgagtgattattggacaacaatggcttctctacttggcatgttagccttttgtcaaacaatcgtccaactcgtgtttccgcctgaactccgactagctttcctccacttcttgacacgtatccgccacgtgttctcttctcacatctacttcgacataacggagattgacggcgtcaacaccaacgagctctacaacgccgttcagctttacctcagctcttccgtcaccgtcaacgacgcagtttctagcagcaacaacaacacacgtctcagcttgacacgtgttcctaactcaagctccgttactttcggcctctccaacaacgacagaatcaccgacgtatttaacggcgtcactatcctctgggaacacgtcgttgtacaacgtcaagtacagagcttttcgtggagaccaatgccggaagagaaacgagggtttacgttacagatcaacaaaagagacaaagcccttgtcctagattcttaccttgattacattgtcggaaaatcagaggagattcgtcggagaaacgaggagagactgctttacacgaactcaagaggtgtttcgctcgacgcgaggagccatccatgggattctgtaagattcaagcatccaagcacgttcgatactctggctatggatcctgagaagaagaagcgaatcatggaggatctaagggagtttgcgaacggacaagggttttatcagaaaacgggaagagcttggaaacgaggttacttgttgtatggaccacctggaactggcaaatcgagtttgattgctgcaatggcgaattaccttggttacgatatttacgatcttgaactcactgaggttcagaacaactctgaattgaggaagctgttgatgaagactagctctaagtctatcattgtcatcgaagacattgattgttctatcagtttgacgaaacgaggaaagaacaaaaagaagaatgggagctatgaatatgatccaggtttgacaaacgggtcgggtttggaggaaccgggaagctcggtgactctgtcggggctattgaacttcacagatgggctttggtcttgttgtgggagtgagaagatatttgtgttcacgacaaatcatatagagaagttagattctgctctgatgagaagtgggaggatggatatgcatgttcacatgggtttttgtaagtttccggctttgaagattctgttgaagaattatctgaggcttgaggaagaagatatggatagtgttgttttgaaggagatggaagaatgtgtggaggaagcagagattactccggctgatgttagtgaagtgttgattaggaataggagtgatgcggagaaggcggtgagggagattgtgagtgtgttgaaggagagagttgtgaagagaaggaagagtgttggattgaagaagaagaaacaggaaggtcaagaagaagaagaagaagcagaggaagaacaagagaagagagctttggatagtcctaatagaagaaacagagaggtttgtgggtttcgagaggaggaagaagaagaagatgagaaggagaagtgaatgataagagactgtttatcctaggatcatcatctaatggtggttct

SEQ ID NO: 19824 - DNA, 1006 bp, Arabidopsis thaliana
agctatgcaattacgtagatcgctcttccaacaggttgtatcatatggtgcattcattgtgcttctgaaaatccattatgctgtggcaatgtttaatgtgtgtcttctttctctaggagagaagtcactgcctggtagtcgatctctgtctgagataattgctagtattcagaggagtaggcttgggattgaaggttggacttttggtgatcttactattggtctctatcttatataccttagacaagcatccttgtctccatttgaggacgtcaagggcgtagaagttgtttcagagtctacagtaagaacattattctaatcattgtcatgttgataacttaccttttactacattctaagtagctttcttttttttccttttttcaggtttatgatctgatatataatgcggagttagcaaaaggttgttacagggatagtgtgagtggtcttgcaaagaacaccatgcttcgagagaataacattcttaaatttgtgaaagattcaagtgttatgaggcctggatactacataggagttgatcatcgaaggaaacttgttgtctttggaatacgcgggacacatacaatttacgatcttatcactgacattgtctcttcaagcgatgaagaagtcacttttgaaggctactcaacacactttggaactgctgaagctgcacgatggttccttaaccacgaattgcaaactataagaagatgcttagcgaaatacgaggtgatgatataatccttgttgttcctttttttttgtgaggcatgagaaggatggatttttattgcaatgaacgcatccatagggatacaagctacggcttgttggtcattctctcggcggtgctatagcctccttaatggcgataatgctcaagaaaatgccaagggaggaattgggattcgatgctgaaattatttcagccgttgggtatgcgacacctccttgtgtttcaaagagcttgcagagaattgctctgagtttgtac

SEQ ID NO: 19825 - DNA, 1861 bp, Arabidopsis thaliana
cccatatttcatgagcaccataataatcgatctgctcatacaaatcatttccacaaacataagatggcggaggaatacgaactactttattcttcctaaacaatttcttgttcctccgatacagatgatgtagggaagaaaccgacgataacaatcaaaccaacatgatttctgcctttctttagctgaaacgcatcggtacgacccatacagtagggacaagataatcttccatgcgttgtccatcccgataacattcaatatgccgggaagtcactaatcgtccacattagcactgcccgcatattgaaattttgtttgctcgagtaatcaaacgtgtgtacaccttcataccacaacttcttgagttcatgaatcagcggttgcaagaagacatcaagcgctcgtttcggatgctttggaccaggcactagaatacttaagaatagaaattcgctttacatacacatatccggaggaagattgtatggcgtcaagataacaggccaaagagaatattgtcgcccagacaaaccaaatggactaaatccatctgtgtttaagccaagatacacatttctgcactcgttagcaaagtcagaatataccgtttgaaagtgtttccacgcctttgcaactgatgggtgcgttatttctccttctgcagttgtatgttgagcatgccatctcattttcgccgcagttctttctgattgatataagcgtttcaatctatcacttattggcaagtaccacatccgtttatatggcactcgcgtccttctgctagtagtctgatatttcggctttccgcaaaaccgacattcctgcagatttacatcatctccccagaaaatcatgcaatagtcaatgcatacatcaatcatttctgatggtaatccaagactcgaaaccaacttctgtatttcataataactctcagccgatatattgtccgatgacaaatattccttaattaattctgcccatgaatccatacaattttcacttaagttattatcagctttaatagtcatcatcctagatgccaaagataacttagaatgcccttctctacatccctcgtagattggttgatttgcagcatctaacatatcgtaaaaatgttgagcatctacgttgggttcttcacttatatctccaggaaatgaagcaatagtttcatgaaatgcatctgtaaccatatcatgaaatctattttcttcattatgcccataaccaaattgatcaggtacatgctgaccataattcgcatcattattaaaattactaggttgctcgacaccataatttgttttactagttcatgcgctatctctacaaccctttccatgacgtacccagacatagtagtttggcataaatcctctattataaagatgcttcttgactacattaaattccaaatatttctcattgagacactcacgacatggacagaatattgtaccgttctcacgagcaaatggttcgtttgtcgcttgatacatgaaactgcgcagtccgtcataatactctctcgtcacctcaccggtcgcttgatctctatgattgtacatccaactttgtaatgtgtaaatctcatgctctccaccccaagacattattatttttgtaagaagttttttttttgaaaatattttttttgtttgtaagtaaatgttgtgatttgagttatgatttcttagacgttacgttggctatttatagatgtccacaaaaatattgtgagggaattgcaaggccgctgcgagggatttgcaaggaactaagcttttttgctaggaatttgcgagggaacccacctaccaaccagttcggtaagataatttaaaacgtg

SEQ ID NO: 19826 - DNA, 1679 bp, Arabidopsis thaliana columbia
tgtctcatgtagttctagttcgcgtttttcggactggataggactaggtgggcgcttatatcatgggttgggatgtgtttaaaagaaaagggtgaattcattgttgataaggaaagggaaagaattctaggggaagtaagctaaagaagttagaaaaaaatatagtaaaggttttgggaatgttaaagaaaagaatgaggtccttgttagctaaagaagaaggggtaaaagcctttggttttaaagattaaaaacaggaaccttagttgttaaagaaatccaaatccgctagatgtatcagagtattcagaaagcttctcctagagttaagagaaaagaaaagaatgatatgaaaaagagttcatgagtgcaaagggtagagttaagttcttgtataaggactggagttgggattaccattagagcttcattgttatactctgggtagatgggatcttatctatgtatgcataacttgggacttacctttagcattctactaaagctcaatcattcttgagggatccctgttacttaaacctattctgtaagggaccatctttgtctcttgaccttcaccttagccaaatgagttcattgatgatgcattgcttgatttacgttccagaactaatgaatgttaaagggattgatagatttgaaagcatgtgtaggtcgagtataagagtcggattgaatcataacaaggcatggctaacgtttttgagtagaattcgatcttatcgcatctttaaactgccaaattggaaattgattttatctatttatttgatgctttgattctgaatccccaactttaaaccttccttcagctatgttttcttatttacttaaaggcaagcaaaaaactaagtttgggggagttgatatgcctataatttgcatgttttcttcattcattcatcatcgttttgggtctagtttcatagcattcatcactgtttcatatcatttctcatcattcttgcatgctttgtgatatatccctattttcactgattttatctaggtcttagggttaggattttgagtctttatgttatttctcgagtctttttagtgtcttttcaggtattctatgcagtgggacaacaatggagatgaggagacattttggagcaaaagttaaggaaaaggaagctaaggacgattttcagttccacattcagaggagtgtcgatcgacacactcttgttctcgatcgacctagtttcagcccagcaaagtccatgacgctttcatgtttacagaaaaggaaatttgccccagaagacttccctatttgcattattagtccatggacgttttataagttttttatattgtttttagacctaagttctcttttatcaagttttttgcaaaaccctattttgagagacataagccattcatccatttttcttcagagattcattgagttttcaatacagtgaagagatcctttctttcccttatcttatttgctgtgtttatgctttctatatcaaatatattgtttgcttcaatcatcgtttctggagactccaccgccacaatcgatgtcaaactcatcctccgctacacagcaaacatacaacatcactcagaaaggaggcctacttctctagaagctcatatttagtgtataagcacaagttgtcttttacgtagtaatt

SEQ ID NO: 19827 - DNA, 2062 bp, Arabidopsis thaliana
  unsure (1)..(2062): unsure at all n locations
taaaacaaaatcatctaaaacgctgtgttctctcggttaaaagttttcttcttatgaaatgggtaaggcctgaagaagtcaaggtatccagtatccagatttgtattgggcctatgtatatcttttaggtaaatttaaagcccataagttattacaaattttcaattaaaaaattactatgactagttatcaatctaaattgatggttgtgctaaagaaaaaatagaaagatgatttgttgtttggtttagactttagtgtaaaaaaatattattattaatttttaggttaagaaaatattaatttctttttctttttttcttaaacacttgtgtatggtagacctttgttttttttgcatccttgtctaatgtctaagataaagatttatactgtaaatgaaattgttggaaaaaaaaagatttataaatgaatcactttactgttgggaaaaaattgaagtaaataaatgaatcactttactgagagtagtaaaaagaaataaatttgtgttgacatgaatagcaaaatacttaaaaaggaattaaatgaaaactttagtgttaattgacttttatgtgttgctaaaatcccaaatcagtaaaaaaccacaatctctcttctcttctttctctctctcccgcgcgcccaagtcgcctcctttcgctagtctctctccgatcgtcgtctcacctctctttactttcgtcgtcctctggaatcttacgcattctccgtcttccaagctctcgttgcgccgtcggcggatagagattccgtccagatttgtttgagcttccgattcgcttccattcattggttcatcatctccgaacatttctccggtccgatccgtgcgtactctctcccggcattgatttctataagcattttatcctttcatagttctagatgatacactcggaatgtaattttcttatgattttcaaaatcgatcctctctgagatctgacagagaatcttctaattgattgttttctgaagatttttgagctccttttgcagatttttgatgctgtatatgttaaatttagtagatccaagtgagtatatatatggatcattggttcagatgcatttttgcaggtttatttggttcaatcacagtgtcgactttagttctcatcttcatcagtgtcagatgcatttttctcagaagctcaacttttgctctgtgtaacaggtggagggtgagaaaacgctgtgaatgtctgtactctccataagtttatagaatggaagacgatgatgaaagaaagctccctgaagctgatatagctaatctttgcancataggatagaggcatttgatacgactttgcaagggatcagttcagctgatagagcctttaaggatgatgattttgaacaagtttctctgggagatcaggaaaaggctgcgaatgaatctcagggtgaccttcaggaacctggaagcttttcaaattctgatcatgggaggtcttcatttggtggcactgaagtagttacttatcaattatccgggactcaggagatgtatgatctcatgcctatggacgatgtgcaaagtgaccgactttctagccctggacctgagagagaggcagcttattccatgcagcagtccctttctgaaactagtctggattctgtccaccatccagaatctggatattcccctgttcattccccgcagaagcccaagccaaaggccactgttccaaatgtttctccagagctactgcatcttgtggattcagccatcatggggaagcctgaaagcttagacaaactaaagaatgttgtatgtggtattgagaattttggctgtggagaggagtcagaggccactgctttccttgttgttgattcacttattgccaccatgggtggagttgagagttttgaagaggatgaagatagcaaccctcctagtgtcatgttaaattcccgtgctgctattgtttctggggagcttattccttggcttcctggtttaggtgataacgtaaattttatgtcccccaggactcgcatggttcggggtttgcttgttatt

SEQ ID NO: 19828 - DNA, 556 bp, Arabidopsis thaliana
aaatagaagaaaatatagagttgaaaaaaatagtagatactaatagtttttcttggaactgcaaatcatttggatttcaactgaaacttgagggtaaaattgaattgggttatgtatatatcttagaacttctagataaaaacttaaaaagagaagccacaagctttgagatgagatttgggaaaacgtttattttatttctattcaattaacaagctttgttttcttttttacattccattgttatatatatagtgtttaaatcgtagcccgctttaaaaattaaacttcttgacatttatttgattacaaataatttcattagcgatgaaacgacatggtttaagttaaccagaagttgtctgaagactcaccaatgagaaataaatacctgtaggaccttttgacaacaatgaagagtgagtccacgttccacgagtttgcctttgtctaaaacagcaattgcatcacaattctgaattgtgctcagcctatgtgcgatcaccacactcgtcctccctaccataacacgctcgagagcatcttgcaccacacg

SEQ ID NO: 19829 - DNA, 2101 bp, Arabidopsis thaliana
attagtaagaacctctccctgactaaaatggcactgtctccagtggcattcaaatccgaagaaggagggaaaaatgaatcaaaaataaagaaaataaaagaaaggaaaagaaaaatcaaatcagtgggttgcctcccactaagcgcttgttttgagtcaatagcttgacttggcggagttcaggatgtggtgggataatggaagattgttgctgccttctcgccttccaaggcggtgcgtaaactgatctggtcggggcagctgcaagtgtcgatcgacactcatggtgatgtcgatcgacactctcctcgtttcctgcaagaacaacaggagaaagaaactttcgaagaactctaggcttgttatctcgtgaagcagacttcgaagaatctaaagaattaatcgatgggtaagcaggagaaaagatagaagagaacttatcacagagggccgcaagaggtgtgggctgaagagaatgtgcagtattctctgtctgtgaatcccgagggtgtcgatcaataggagggatggtgtcgatcgacactgttgctctgcaactctcattggcgagctgagctgatgggagcgttgtttatggctctggctggggattctacgcagtccgaggaggtgtttctgtgctagaggcaatgatattgatagtcttagtgaactctgaaccatccatgccaaactccatctccaaatcacaaactttgagagagatcctacctttcttcacatcaatcctaacaccaactatagttgggaatgctcttccaagggtaagaggatccttgggttccttatcgtagtccaggaccacaaaatcagcagggattaaggagttacaaaccttaacaggaacatcctcaaggattccttcagggatgcatttggaacgatccgcaaagaggagagtgattctagtcggcatgtagttagtcatgcctaatctctctgcaacagacttaggcatgaggttgatacttgataccatgtcacacaaagagcggctgaacctgcttgtggagatagagcaatcaagtacaaagctacctggatccgggagcttctcagtggtctgatcaagagtgatggtgcggatgtactcagcaatgtccactctttgtgccttctctttcttaaccttaggcagcatgattgcactgatgtcccttgtcagcaatttagcttcatctgagctaataccattgtcaacaagttgcttgacatacctattgagtggagcagaagatgtctcagaaacattcttaggaagagaagtgaggatcttctccatgatggctgtgcacttagtagcatgaatctcctgcttagatcgacgcttcctcggataagggataggggggcataggcagactcaggctgcatcgggattctcacctcatatggtgcagtccggacccagtgtcgatcgacatcaagtagaactttcactcgaacataatcttgagcatgtgacgtttaagggtcaaaagcacctgtaaaaccttaccttcacacttatcagtttccttaattgtttcctctgtgtaataattgaccggaatattacggaggcaaatctaagttggaagaaacattaggtaatcagcctgagcctttcaatacatttatccatgagcacacaccagtcatcttttgtccaaactcctgtctttaagatttcaagtaaatcatcttctgatttgaaaataaactgaaacctttcttgagataaagccacttcatagactctattatttaatctccaaattctaggcatgtctaaaatccaattagacatcctttgattactaggattcaagaacctacccataagactgcaatgattcttttcagaagaacataacttagcttgatttggatgaacaagaggtttatcatctgaaattgacaactcttgtatagctttgttcagatccatattcatatcctttttcttgattaaactaaaaccctgtaaacactgaaacacccaggaaacctttttaatcacctcaatctttcttctttagaaaccaaacttgaaacgaatcgaaaggttatgaagacaattagaaaaccttttgaacac

SEQ ID NO: 19830 - DNA, 1827 bp, Arabidopsis thaliana
ggttcagacatttcatcgaacaccttttgggcgcagaaatgtctgggctcaaattcctgttgattagaaagcaataggcattaagaacaactaatccagaagggatctatcaatcaaactcaaccacttagcatactgagaattctaaactactctaacccatcctcagaaacctattcactactcagacaacattatagagaacataaacgttgaattgaatgaaaacatgataaacaacagtgtaatagcaaaatgataacaggattaacaacaataaacgaaatcaagaacaaatattgaatactaaatagattagagaaatccagattacaaaacatcaagaacacagtgtctccggaataaaacttaggttaacgaaaatgtaaagtacatgctccttatagcgaaatatttctgaaaccccaatactcaaaacgacgcagtattgggagggattaagaacggtactcgacccaggtggtcgagtgagtagtggagtgataagctggagtcttcttttcttccttgtgctcgagtgtctagttgagtgtggaatggagaagactctgaagctggccatcgagtatgtagtcgagtgatggtgatggtgatactcgacttcctggtagagtggtgtgatcgagtgatggtcaggtgtggaggtgatgatactcgaccaggtggtcgagtgaagtgatcgagtgactctcatggtggtactcggccaggaggtcgagtggtgaggtgaattgatgaagtcttctactcgaccaaggggtcgagtggtctgttgaggtcgtgaagcttctactcgaccagggggtcgagtggtttgacatgatcatgtccgcttcttccaattagctcgccaacagctccaaatcacctgaaaaacacaaatatgcaacatccatgcaaaactatcctaaacatgcaaagtgatgagaaatgatatataacagtgatgatatgatgctaaagtgatgacaaatggatgctcaaaacatgcaaaatacacacttatcaggtcggcccaggaggcaggcgtatcctttggtgggtatcctttggtggcttatcttatagcggaatccagcatccatgttgaaccgtctacaaaatccactaggaaatcatactcctccttttcttctattaaagctatctccaggggatcctccagaatgatttcccctacacattctaccagacgcctcttctatctcatcgagatagataatctgatcatgagatgaagcttgcttgaaagtctcattcatatcaaacttcattatgaaatcgccaaggtgaaggtcgatttttcagttcgggacatcgataatggcgctggcggtagacaggaatggtcggccaaggatcagtggtccttatgctctttgtgaacttccaggataacaaaattaatagggatttgagatcccccaatcattatcggaatatcagccaaaatcccaacaggatggcggatagaacgatctgccagtattagggagattttagtttgtttgaaggtgtagtatccaagacggttagtaactgtgagcggcatcatgttgatgcttgatcctcaatcacataggcatcactcaaaaagttcatcatcaatagcacaagacaacacaaaactctcaggatcacctttctttcatgtcgtctggtcttgcaggatggcgctacactcttgggtcatcatcattacctcgtcttctaggctgatgttgttggttaagatactcttcatttatttcttgtttaccttttattacagatctataactggattattaaaaatgtgaaggggat

SEQ ID NO: 19831 - DNA, 474 bp, Arabidopsis thaliana
ctgctgaatccatgggcaggcaaggggggagggggatcgaggtcatctgagggggagtgggggactccattgatgaggatcggggctggcatggagggaggagtgatggacggatggcaagagcaaaagcttggtagcttaccatgaagttggtcatggagtgtgtgggtaagtgagaaacatattaaaagcctgtctgtatattattactatcaaaaacttactttaaagttatagactttggttttttacagaacattgactccaggacatgatgctgtgcaaaaggtaacgttgataccaagaggccaagcaagaggtctgacttggttcattccatcagatgacccgacactcatctccaagcagcaactctttgcaagaaattgttggtggactcggtggtagggccgctgaagaaatcatctttggtgattccgaggtgactactggcgcagttggtgacttcaacag

SEQ ID NO: 19832 - DNA, 963 bp, Arabidopsis thaliana
cagataaccttcttcagcgccgaagtcagagcaacaacgaaattgcagatcgccaccggagtgagctgggagaacgccatacgacggcgatttagaaaggagatgatcagagacggaatgggaaaccaaagatgacactgtctgaagtaggcttcatacatacagacatatcctcgagggggattccaaggacgctcatcttctccgagaatcatgtaagtgagtgggcgatctccggagccgcacaaggtaaatacttccgcgactgactcggttgttgaaagggtcttttttacggtgatctcggtgttccaatgaacaattgggtcgaggtcaaattcgacataatcctcatgaagtaatctcgcattaacttcagcctctgtatactgcggatgcgtgttgtaagcatcctccaggtcgatgagtgggtcgaactgagctaaaaaatccaccgaatcttcaggagcagcgggatgtccaccggaaccttcccgatctggctcatcaagcaacgtcggaatttcgatccgattcgatcgactagattgagcttcgtcacttggattcccggttaaccgagagtttcggcgaactaacgacgcttcgctctcggaggaagaagaggacggagaaacaagaacagccttacccattgccggaaaaatcgataaagaatcgagaatacaaaataattcgtagaggagagagcgaaagctacctttgattcttcttgcaagcggcagaaaatgatttcccgagggtttggtcgaatataaatagagacgaatgggcggcaagcctacgaggtcatcattaaacctacgggacgcttcggttcttgagcttcacgcgcgcgtacagatgcgacgatttgacacgtgtcaaatacgttcgaaatacgaatcgattcggagatctaatgattaattcacgtcttccaagatttaaatcaaatattca

SEQ ID NO: 19833 - DNA, 1342 bp, Arabidopsis thaliana
ttggtgtatggtctgcaaaaactgcaacatcattttcttccaaattgacgattttagctgcaggtagctctcgttgaagcattggatttagctgttttccactctttaactcaatagcacgaacatcttctttatccacactaaatcgctttatttgattgttcaatacttgaatcttcccattcacatctttggataaagcatcaagtttgtgatcaaactcttttgtttgcttctcttgacctttgagaatccgtgggagcatagattcaatcgtcctaatggtctcgggtggagggtgggcttgggttgaagaagcataagtcggagtgaaacttgtagattgttgaactggtttctgatgtgtagattgttgattgaagctcatgtatctctattgatccatctttcctgaagtggctaaactgtcaacctgtgcaacatactgaacttgcattttccttgccatgtcaacgcttttggtactaatgctggaagctaaactgtcaatcaacattgttgcatcttctggatatcttgacatgaaattcccattactagctgcatccaaagccatctgataacgccaatcaactcctctgaagaatatacctaacaactgaacctcactaaaaccatgatgcgggcaatctctctgatatcctctgaatttgatccaagcggctttaaatgcttcagctgcttcttgagagaaggtagagatcttcattctcagctcctcggaccttgcatcattataaaagttgttgagaaaaacaacctttatttccttccaagttgttagagatccaggcttcaactgcttaagccaagaagatgcatccccagcaagagaatatggaaagagcttgcaaagaaagtagtcagaagaaacaccttctgccttaatgctcgaaaccaagtcttcaaaccgctcaatatgatctataggatgttcttgtgctagaccatgaaaagggtgaatactcacaagagtaaagaagacaggttgaatctcgaaatcgcttcttgcaaatgaaggtggtcggattgcagaccgattggaatagaagagatccggtctgtatgtggtcaccaagagtcatccgatgaccatctgctctgatttcttcttggtgtcgagcgacacccagctggtgtcgatcgacaccatcggcgatttctggtatcaggtttccatgttcatctattttctgaccctcttcgttgtatgcctgaccagctctatcgcgtaacacaacagccacatcatgtattactatcagcatcttgagttgcgtttgaattccttaaactcctgaaacacaagaagaagaacaaa

SEQ ID NO: 19834 - DNA, 1668 bp, Arabidopsis thaliana columbia
tgataaagtcaatacacgctctaaacgtttgacgctattgatatatgctaatatctctaattaaagatgaaatcgaatgcggaatctgaataacttggaaaaatctcgaattacaggttgcagaagcaaacgtggcgctcgtagggctcgaagtaaagatcatcctcaaccttcacctggggaaacaagggttcagacacatctcgccaattcgatgttccagcctcgttagcagttgggacatgaggccttcgaacaagagatggctcaggatcctctcgaagatcgagttcccgagatatatcagcggaagtatcttcttgagccatgaaagggctcggctcttcgggcgtattagatgatgaagtcgcatcaccctggtgactcgaactcggttcggcatcttccgacgagctccaaaccatcctccttttatggatcggagggagatcgtctcggtgcacggagttttgacaaagcaaaagccgtaaccagaaatttctaaccaggaaaatcaaaacaaacctaaaagacgacggaggttcaccggaaatatagaagaatataaagaaatcaagattagaggagagaaagaaaacctcgaaactttttccttcggaacttcaaatgaaattcttaaagaatgctttattatttatagaacttttagggtgcgttgggttcggaggaaatcacgaaccgcgtcgttggcgcgtggcctcgtcaaaatacgggacacccgcgtgaacctcgggaattagcgaagacatttccccttctcgagagaaaagagcggctacacgcaaagaagtttgaccgtcccggaagttgaagcgtcaaaagctgcgggataggaaaacgatcggccagctcggtcaccgtactcatacagctcgttgtttctcgcaataaaaataacgaggtgggggcaaactgttggggcggatttccccagaagaccgagccaaacaaaaaggcttcgggagctcagcctactacaaacagtagggaaactattcacaggacgctactcgctcgggtatccgtacccggttcggttgtcattccaggaaacatacccgagccgggaaaggaaacacttgggattccgagatgaaactaccatgcggcttggttgttattccaataaacacacccgagcagagaatggacgtctagaggatcatttagggtcgtctaggaggacttctggtcgcgtagaatatgcaccgagctgattcctagcgtttcatagtagcctgaggcaaagactttgcacatcttaccaaaacgatccaaagaccatttccgaagaatccagatatgataatgaagaatcttcgagggtatagccgaatgaagaaatttcggttatgtgagtttcgattctcacagtgtcctaatgcgaggtagctcctacttccatcggagagccacatggcagttgatgtgacggagtttgctgatctacttccgcttgtgagttttggatactcgtactaacggttccctgaaagtcgagctgtgcttagattcatgcggtacacagcgttcctgtagagagagtgtcaactcgatctacatacgcgttgtgagcttccctgatttcggaatgactggtggtgagcgctgcgagctggccactgcattcttcttttcggacaaaga

SEQ ID NO: 19835 - DNA, 928 bp, Arabidopsis thaliana
ggtcaagtgaactatgatttttatgctttaaaatgttgtccacgatgaaagtgaacataaatttatattgcaacactacaaacatttggatgtgaaattagggtttcactctcatgttcatatatatctcaagtagtagagagattatggtaaaacacgtttccgaaaagctaagctcatgcgtatgtatcgctacttgctagttgctaacatgaattatgcgtataatgtgaaactttaagaaagctgtagtcaataacaaataatttcattacatactgattaaagaagattacaaaaacgaatatataaagtatatataggagaatatcgtatctaacgtatactaataggtattcaaaacagagtcgagcaagaatctgttttagggtcaaacaaagccggtaacaaatattttctcccattcagtcccttaacgttataactcccaccggtcgttgcatccacaagtaactctccagcataaccaggatacgaacctttcccatagactccagtacaagccgatccagcctcaagcggtgccgttttaggcccttggtaatatccatctccgaacgggttcgttgccgtcgcagccatgagactcgccaagttaatcaccatcccgtctaaaccaacgtcgttgtttggtgccactagtggtgggctttgcggtccgtaaaccggcgcgtggaatggccacgccgattgtcctggacattgtgtttctgagtttccaacccagatgtaagcgaatcttgatcctttcttgcctgacccggaaccagtcccgtgtgacccgcatctgttcatgcaaaagccttggaccgtcacgtcagctgaggtcaaacgacgttaacgcgtactttggccacttttgcggcaagtctttgaggttttctctgttaaagattttcgattgagt

SEQ ID NO: 19836 - DNA, 879 bp, Arabidopsis thaliana
aactatattccatgttgtttcactttgtaaggtcgtcgaaagttcaaagtttgttgtctttctttctggtatatatctttttgaaagtgtttccgttggatttaagataatcaaatttgatccttaagaattttcaaaacacgaaaaatctcaaactagtcacttgaaacaaactacttttcagtttttgaatcgctagtattatttacagagatgaaatggcgcaaacctctatgcttacaaaattaacagagagtcgcgctcatttctccgtttctgtttgttactttctacagaagcattaaattgcttagaacacaaatttctttatatctcttctccgtctactcattctgatccaataccaagttcttctgaatccattagtgcaccagatgctttgtgttcttcatcaatcgggagtgtacgttttgagccatccaacgcaacaccaagaacaagattctcctccagtaaagaactagtaccggacccaccaccatctcgagctttcgactctccattgtttttctcgctcccttgttttgcttttgatttcagtgtctgctctattgtagcttcgtcatcagaaacttcatccttctctgctttatgtggatctcccacgctctctttcttcttttcttctgacttttgtgctactggctggtcagatgttgaggttgatgaacccttagtgcctgtattggagttggaaccaagagccgctttctggttttcctttttggcatttgaaaccggcaccgatccgttgttttctgtttcggccttggtttccgatggttcttcttgaaggtccctttcttcactcttttgccctgggctgggtgacttttgccctgtgctgtgtgtggtggc

SEQ ID NO: 19837 - DNA, 961 bp, Arabidopsis thaliana
actctcagagtcatccccttagtccaaccgaacattacatgactttcttcttcccacggcttttaattttgtctatagtttcatttcccaaaacacttggctgttttcattattttttactcgtaatatttgttaatcaacaagtaacagtctttttaattaaaattaactcccactgccgcataaactcttcaatttctccgggcagctgtttcaaattttagataccacaactttagtccaaccaaacctccttgactttatacccgcggtttcatttttgtctttaataccgtttcccaaaaacacttagctgttttcttactgtaacatccaaacgcgctctttgcctaactggcaaccaaatcttggttaggtttctatctctttttataataccccttttacccctctcttcttctcatatataacacaacacaacacaaactcatacaggcatcactactacctcaaagtcctttcgtacttatcaaagctttattagtctctttgttttcttgcttctacattacagaaattaaatggcttcttttgtgatgggatacttcttattgttcgctgttgctttcatgtgtttggatgcgagaacggacaaaacgcaagattataacgtcgtttcagtaccataaaggagctctcctcaccggagacgtttccatcaacctaatctggtacggtaagtttaaaccgtcgcagcgtgcaatcgtaaccgatttcgttgcttccctctcgtcttcccggagatcgaccatggctcaaaatccctcagtcgccacgtggtggaagacggtggagaagtattaccaattccgcaagatgaccacgacacgtggactcagtctctccctcggagaacagatcctcgaccaaggatactcaatgggaaaatctttaacagagaaaaacctcaaagacttggccgcaaaaggtggcaaagcta

SEQ ID NO: 19838 - DNA, 483 bp, Arabidopsis thaliana columbia
gatatgtgttttctgttgtgtaagaaaaactgttttcttccttcaaagttaaagcctcaacaacagaagagaagattgtaaaaagtacttaaaagaaaagagtctctactcgtatgtaaaagatgcataagcttatgagttttttaagagtcaagaaggcaaaaatcccagttttaaagtattccaaactacaacaagacagcttcgcttgatcactccgttcgatctagagaacgtagtagtaacccaagacaagaagcaacagtaccaccagagccgctggagcagcataaacccagtaattagtcgacttcttacgcttaaggatcgctcttgggatcgtttctggtcccctaacgcgggtcctgttccctaatggtttctccttgaagactttttccttctgcggtttctcctcctgcaccggagcttcaatctcctcctcagaagcttctggaactatctcagtctcggtttctgtgt

SEQ ID NO: 19839 - DNA, 344 bp, Arabidopsis thaliana
ttcaaatctaatggctcctgctttgagtagaagtctctacacatctcctttgacttcagttccaatcactcctgtctcttctcgtctctctcatctgagaagctcgtttctcccacacggcggcgctttaagaaccggcgtttcgtgtagctggaatctcgaaaagagatgtaaccgattcgccgtgaagtgtgacgccgccgtggcgagaaagagaccactgaagaagggtcaggtgagaagtttgagtaccaagctgaggtgggttctctttcatatctcctaaagtttcaatcttgttgtctgggtatctctcaacttgatggggatataaagttttaaga

SEQ ID NO: 19840 - DNA, 285 bp, Arabidopsis thaliana
gccatcccccaacctccctcaatcataacattccacaaaactatttcaccatctctctttcttctatcagtcatcaccaccatatctttctctataatgttctaataaaacaacacacgagcatctttcataaaaccacacatcacatacattctaacaagattactcatcacaaattcatcaccaccaaatccatacttcaaagccaaaccatgaatctgcttactttcttgaatcatcgcagttgtcgcacaagccttaagaacagagggaaacgtaaaccga

SEQ ID NO: 19841 - DNA, 980 bp, Arabidopsis thaliana
ttccctcttcgattatcaacagtgtctccactcgtatcatcaccgcctccaactaatttcgccatctctctcgttgttccaatttgattctactagtgagctccgatgtaatttagggttttgaaagatgtcagctttgaaaaattacggcttgatctccattgattctgccctccattttcctcgatcaaatcaattgcagagctataagaggttactctctctctctctctctctctctatgcctaatcttattgggattatagttactggtattggatttggtttcgacagctctctagtgtaattgaaatttttgtatcacaggtagaacaatgaatatattgctttggttactaaagcaataactttttctcttgaagaatcggatttgtagttgtgtttatatctgttgatcgattggctagattaatgcttagacattgccttatgatctctgagtgattgatttatttgctcatcaaaccagaaggaatgcaaaatgggtctctccaatagcagctgttgtacctaacttccatcttcctatgcgcagtctcgaggataaaaacaggtgcatcttctattccttctcatgtttactattgtttttgttcatacttcagcagctttctcttgtatttttgtgttggcaggacaaacacagacgacataaggtcccttagagtgatcacagccattaagacaccgtatttacctgatggaagattcgacctccaagcatacgatgacttagtcaacacgcagatagaaaacggtgctgaaggtgtgattgttggtggtacaactggtgaaggcaattgatgagctgggatgagcacataatgcttatcggccatactgtaaattgttttgggggaaggatcaaagtcattggaaacactggaagtaactcgactagggaagctattcatgccactgagcaaggattcgcgatgggaatgcacggggcactgcac

SEQ ID NO: 19842 - DNA, 598 bp, Arabidopsis thaliana
ctctagcaagtattgtgagcctagttcagagtacggaggcgatgattgtgttgtttgtatcgatggatttagacaaggacagtggtgtcggaagctgcctcgatgtggacatgtgtttcaccgaaagtgtgtggacttgtggttgattaaagtctcgacttgtccgatttgtagggatagggtttatagatttgaagaaggaagaagatggagaccacaaggtgaaattttttgatcggtggttttataattagatttgaaagtgtgtttagtttgttatcatatttagcagcaattttggttttcatcaatagtcatgtacagtgtcttttttttttttttacacggcttcacaattgaaagcttgtttcttcaccgtttgatgaatttgatccaataagagaatgatgggtttctgtagaatttaacttagtttgaggtttgattatcatgccaattattaaattcaatctagtcaattactgatagaaatgttgccatttgtcactttaaacatgttgcttatgtaccttaatgattctcataattcacttgagatcagtggtaatcacaatgttctgttcaatttgccatgatg

SEQ ID NO: 19843 - DNA, 601 bp, Arabidopsis thaliana
tttttggacgaagcaccaacaccttatttaagaaaataaaacaagtacattatgggttgacactaaccagaccatatagacaatgccgtgtatttggatcaaaaccaggaagattacgttggagacgaatgtatgacattatcttgtgttctccttctcccggaacatttgaatcagaaagaattaccttcaaataataatccacgacttcttagggagacaaattacctttaaaaccaaaagtaaagggacaacaccaaaaaaaaaagagaaactgcaagaatgcgaaaagtcttgtacagtttggaaatagctgctaagttagatgaaacagtatcacaccttaacatatctccagccagggttatggtttaacctagattggatgtaatactgaagagcgactgacagtatagccataaaaggggtcccaggagtaatgacatttgaatcacaggtttcagctttctctttagcggacaagatttggccctccatctcaaaatcttttctcaacctctcttcctcagcttcctattaaaccagaaatagtataagcaacagtgacccatgtaaagccaagagtaaatgtaaaaataga

SEQ ID NO: 19844 - DNA, 1428 bp, Arabidopsis thaliana
aatgcaagatttttgtagaaaatgatacgacctagaaactgtgatagctttaaccttatatatcgtggatttgtcaatattttagttttaaataatagtaataacaataaaaaacttatgtaaagaaacttgtgacatgaacaaactgattcaatttgatgaggacgatgaccacaataccacgtggttgtgctttggcttttaacgagtctttatttatacaaaatcaatgatgcatgtccaagaagatcattgacggtgatggtccgggacagtgtgcatgttttcttctcaggattttttttaatggtttaatcgatcaaagtaattttaaatttgattttgacattttatacgtactctctttttaaccacttttgaataaaaatcaagagaaaatacataattgttaaaccggtaacaaacataaatcaaaccaaacaagaccaaaatcagaactaattgtttttggcggtgttctcaaaactccagctccaaatgtcgtgacgctcgacgccacgacccatcgaaccggaaaagccggtatacatagtctcaagaaccacctccgagagatcaacttgtgtttcgatcaatggcctcttcggtttctttaaatgcgcaggtgcaagccaaacaatgactttactgttcttatactcaatccaagctttgtagttgtctccgctactaagcttcacttccttaaacaaccattgattcttccctctagttcttgtctgaatccaatacccagctttctcagaaacctttgagttaacagagttaatattaacaccaacatgattatcattaatatcaccaaaacgtttgtcttggaaaacatcgaattcgaccgcaaagagatggttattaggattgccattggttgtgaggttaactagaccgaggaagccgcgggttgagtcttggtcgtactcgtaggctacggttgggccacgatgaaggcgataccatgaccagggttagggtttgaccgtcgaggagtgatggagaaagtgaaagatgtcttgaaagagtaaacagaagaagatgtgttgttggaagatttgaatgggattggatctgtgtagagaccttgaccatgtgagaatggaatgttgtcacgggtcatggagagagctccggaccggctcatgccatcggttgctggtcctagctcggcgtacccgatgaagattagatttgttccgtcgaaacggttgaagttgaatttgacggcggaaatggttttagagcttaacaaagacacgaacaggacaagaatacagagtttgtggatctgcatcacgcgtttgttgtttacgtgtgtatgttgttgtttttggtgttatggaagtggaagtggtgctgtaatacatagtgtgacgaaagccagtgaacttcaactatgacttttcaaacata

SEQ ID NO: 19845 - DNA, 585 bp, Arabidopsis thaliana columbia
tgcttacagtttctacaactcatacgcccgtgagctcggttttgctatccgcgtcaagtcctcctggactaagcgtaacagcaaggagaaacgtggtgctgtcttgtgttgcaactgccaaggtttcaagctgcttaaagatgctcactcccggagacaggagaccgcaccggctgccaggccatgattcgccttcgactcatccactttcatcgatggaaagttgatcaagtcaaactcgaccacaaccactcctttgatcctcaacgtgcccacaattccaagtctcacaagaaatcctcctcctcagcttctcctgcaactaagacaaatcccgaaccacctccccatgtccaagtccggactatcaaattgtatcgaacccttgcccttgacacaccacccgctcttggaacttcactctctagcggggagaccagcgatctcagccttgatcacttccaatcttcaaggtgcttggagctcagagggtttttttggttttttttggttttcttcttcctaatttagctttccagcctcaactttctttacctcttggaccttgccgacgacgggattttc

SEQ ID NO: 19846 - DNA, 1606 bp, Arabidopsis thaliana
tctctcccttgaagaagacattgtggtacaagttagaattccgaaaagagttaaatatgtcaaaaccacaaacgatccgagacgccatgcaccgagcctcagattacgtttcccatgatgaggagatggagttgctgtcaaaaaggcacgacccgtcaaagcaaacacctcaggctgataaatcccaatctagcactctgagccagaaaaagggtgctctagacagaaccttcgtgcatcacgaggggcgaaacttctcctaggcccaaaattaccaagctgatacaccccacgctcgaggacgtgaaatcagaagaatgcccgaatgtgctttatggcaacgcacaaactcagaaaccccatcaccgagtgaacacccgacgcaaacaacaaaaaggctaagttgggctgagctgaagaaaaagctatcgaagaggctcgggaatcggctgtaaggctaagacagtaatcccaaacgatgtgtcgaagtaggtggagatttaggcgaagagcttacagccgagctgacttccttcctcagagataacgtcataactttttcctggtcgccagaggatttgccttgagtaagcgttgaaatcgtgtcacacgagctcaacgttgacccaacttttaaatctgttaaccagaaaagaagaaaattgggtgggaacgtgcggaagctgtgaaagccgaggtggaaaaactgctaagaaatggctctataaccgaggcgaagtatcccgacaggctcgctaatccagtcgtggtaaaaaagaaaaatgggaagtggagagtctccgttgacttcaccgacctgaacaaagcctgtcacgaagcagctttctgttaccacgtatcgatcgcctcgtcgagtcacctcagggaacaagttactatcgttcatggacgcctttgttggatacaaccaaatcatgatgaaccctgaggatcaggagaaaatgatattctacacgaagcaaggtgttttctgctactgagtgatgccgttcggacttaaaaacgttggggcaacttattagcgctttgtcaacaagatcttcgccttgcagatcggaaaacgatggaagtgtacatcgacgatattttggtaaagtctttggaggaagaggaacatataacctctacaacgtcaagcttaatccagccaagtatcgcttcagagtaagatccggtgagttcttggggtatcctgttccacatcgcggcatcgaggaaaacccaaaagcaaatcgaagcattgataggaatggcgtcaccgcaaaacaaaggctaagtacagcaataaaccggagagttgcagcccttaatcgattcttctcccgatctaccaataagtgttgggccttctacgatgtgcttcggggaaataaaaagtttgagtggacaactcagtgcgaggaagcctttcaagaactcaaaaagtatctagcgagcccacccatccttgcaaaacttgttatcagagagccactctacttgtatgtctccgtatccgatactacggttagcaaagttttagtccgagaagacaggggtgagcaaaaacccattttttatgtttcacagacatttactggagcgg

SEQ ID NO: 19847 - DNA, 1932 bp, Arabidopsis thaliana
atccaactacccaaagcccaacatgattggttaacctcaggatccaggattacaaatccgtggaggagtataactcccagctttttaagattgtctctatcctgaggctgtgtggtgagaaggtgactgagaatgacatgctcgagaaaactttctcgacctttcacgcgaacaacgtactgcttcagcaacagtaccgtgcgaaagggtttacgacttacacaagtctagcctcctgcttgcttcttgctgagaagaacaatgagctgttactcatgaacagcgcattgagacctcccggatccacagctgtgcccgaagccaatagagccgaaatggccaaagcgcctaatgaacctcaggcgaccaaggaatccaactacgtccataggggtaaccctcacggccgtggccatggcagaggacgtggtggaagaggtcgtggcaatttctacggccaaggaaaccactatggtggtagaggccgtgggaactatggccgaggtaggggtagaggccgtggtattaacaaaccgcgaggaaaggctaagtccgtgtgctataggtgtggcatggacgaccattgggcaaagacgtgcagaacctctaagcacctcattgaggcatatcaagagatgataaagcaaaagggacccgaagcaaatttggttcatctcgatggtgaaggggatttcgaccacgagaaagatgacctaatggattatgagacttcggacatcttgggagaatagacatctaattttaaatttgctttgtttgctttgctttgtagtttgatttctattgctcgatgtcttggatttatttatttttatggaattgctttgcttcattattgtttgctttatcgcctaagatatagttcttgtccacatttagaaatggccgaggacaaggacatactcatagtggacagtggctcaagccacactatattaagagacaaaagatattttataaatctaacattgagaaatgccaacattagcactatagcgggtatagcgagtctcattgagggctacggccaagcccatgtactcttaccaaacggcacacatcttgaaataagtgatgccttgtattcacccagctcaaagaggagcttgttaagtttcaaagacatacgtcttaatggttccacgttgaaacaaagggtgaagggaatagagaattcctacatgtaacagagatcgcccaaggacataagaaagtcctagagactatacccgcagtgtccactggtctttaccatactaagatcacatgatcgaagctaatttggcaatgaacaaagagttcatagaggagttcactttgtggcatgaccggcttggcatccgggtcataacatgatgcgaaacgtaatgataagttctaaggggcacaccctaaaaggaaaaagagtaatcccaaagaagctcacgtgtgctgcatgtgcacaagggaaactcataataaggccatcaccggcaaaggtcaataacgagaccataaactttctggaaaggatacaaggggacatatgtggaccaatacatccaccatgtgggacatttcgatacttcatggtcctcattgacgcatcgacaagatggtcacatgtttgtctgttgtcctctaggaaccaagcatttgctaggttactggcccagatcattcgtctgagagcccattttccagattttccgcttaagactatacgtctagataatgccggtgaattcacgtcccaagcgtttaatgactactgtatgtccatgggggtaagtgtggacatcccgtggcacatgtacatacacagaacggattagcggaatccttcattaaacgaatccaattgatagcccgaccattactgatgaggtcgaggctcccagtagccgcttggggacatgctgtattacatgc

SEQ ID NO: 19848 - DNA, 545 bp, Arabidopsis thaliana
gctccaaggcttccctcgtgatcccggtcttctcccatggccgtagatcctcgtgaatccatcggaagtaatctgggcacgtggcggatggagaacggtcagattctccttctccggcgctagatcggaaactcgtcggataattgtcctttgggcaagttccagtgtcgttgccggagaaagcagcgcagtttagcgtaaactcttttggtttttccgtaattagcttagtcgactgagggtattctggggattgagtggtttctctctcagtcacggacaccgcttctttctctatcaaaacctatagacgaaaacgaagtcgtttagcaaaaaccggtagttagttaatgactaaaaacaatcacgtgattattaaagctcccgtgtagacacgtgtcaagcgtaggaaacttgtttgacaaaaaagtaatggtgacacgacaaattaggcgcgaacgagttttagcgccactaataccgtatacgacgtggcaaacgacaaacgggactgtggttttgatgtaattagacgagaacacaag

SEQ ID NO: 19849 - DNA, 1932 bp, Arabidopsis thaliana
tgggcttcaccttccagcccactcgagtctccaatccgggtagcttggacttcgatgtcacgttcacctcgcgaattaaacacttcacctatattcttgctcaaggaaacctgtgggcctttcctctcttgggcctctcctacttacgtggcaatctttgaccggtcccgagcccatggtgcgggatccgacaccaacaattagccccccaagtctttcgaagtgatactccaatttggaagactttaatgctctaatgggcaaagattgcgccaagtgactctctgatttcccgccaaaattacgttattcctatgatttcggaatcacccataattactctcgtgacatctgtcacaattatgaccgtatatcaattacttactattaaagcggggaaaactcttcccacttccccatgacttccaaggcggttccgtcatcatctctagcttgcgtaaggtaaattcactttactctctccttattatttttcactctttatctttcttttagaacaaagtttctttcttcttcctctctgcactttctctcctacgaacccccagactgttcattttcttacgatgaattctgaaaacaaaaggcctgaatctccatattttaaagaaggtggctctagtaatgacctttacacccggccgaatgacatcgccagtccacattatcaatccacatgcactcttcaatccctcaaccgactgagagaactctgccgaatcccactcgaagttatgagggattcacagatgccagagcccaccgaatcgtcggaggaccactgtcccagattcttttgcgtttatgaaatctacttcaaaggttgcggattgaccttcccccttcccgaagctttggttcggtatttggctgctcttgaaatcgccttacctcaattgacccctaatctcctctgaaccatcctatgtattattaccatcgcggcggaggacggtttcgtcatcggggttcccgagttgaacgaacttctcagtgttaggagttcgtcgaagaaaaccgggtacttttcagcatacccgaacgccaacaggaatctcatctcgaatctcccaaacaaggatgagaatcggcaccatctttggttcttgattaagaaaacccctgcctcgattggaaatctttccgatgtgctcccatcgaagtggtctacgaaacctggtagaaattaggtcgtatatgcctttttgcttatttttttcttctatttaatcgactttatgatttccacttcgcagctttcattgctccaactctcccgaccgtagaattcgttgaattcttcaagattgttatcgagggagagaccctctggaactctttcactcttgatcggttcattgaggccaatcataagcttagaatgagtccacccggacaactactccaacttccaccacctccacctctacctcacgaaacttctactacggctatagcttcccgtcgaaagacgttatccaagacgatgacagaggcttgtgaggcgaacaagtcattccttcagtctgctgtcgacaagaaagaatacagtagaactctgctggtcgacgatggtagctgtcgacaccgcaccgtgaaggtcatggcggccggtcacctcgtagagaccgatcaccacgtcgtgactcacctcggcccgcttctcggactaggttaagcagcagtcgatagcagacttgcttcggaaaaagagagaaagaccaactcgcagcagttcctctcctaagagagatagcacgagaccccgaactgatcgctctcctcgatcatctcccccacctcgatcaatgggtccccctcctccagtcatcgcatctccttcttctagatctgggggtgaaaagactggtcggagtgcagatcctcgacaggaagaggctgagtcccaag

SEQ ID NO: 19850 - DNA, 1056 bp, Arabidopsis thaliana
ttgcactgcactcatgacttaacaccaccattcctttgacttctttgatcctttctgtgatcaggtctttcacgtagttgtgagagtcaggtatcagcgcgaaatagtctaccaagggcatagtgacatcaagatcctttatctgtttttccaaaagagcacggtatttcgcaatcagaacttttttaaaacgaccagggaatggaagcggtagtttgtagggcgatggtacgaagactgtggctttggtttttgcagctaccagtttttcaacagagggagtagctggtgggacttgtggttgagtgggttgactcgtgagagtgggctcttcgattgttttgtcagccaaaacatcatcttgataaatatcctccccctcttgaaccatactgtcctcagtgttggggttaggctctcctcttggtggcaacgctcatccgcttcttagagtaattgcgtgggcatactcctttgaattatgtattggtttccctgggatgtatcctggtgtggttgatgtagaagcgattgtgccttctatatattgtacccttttactcaatgattcgatcccgctactcatttcaacgaactttttgtcaaatttgctgtttaagtcagccatcttcttagcggcttccattacccccgcgacacttggaggagtttgttgattttgtcatggagagctttaatatctcggcggtgcttgtcatcagattcagtactggtgtggatgcttctgtcataatcctcgttgtaattgtcatccgacttagccatgttttcaactagctcccatccgtcttcgagatccttgtttaggaaattcccattggaggcggtgtcaaggagcatacgtattttaggcaggacgcctctttaaagtgtgctgagaagggaagattccttaaatccatgatgagggcatttggtttgataaccttaaagcgctccaagcttcacagaagctttcattttgcttctgagtgaatccggatatctcattccggagtcttgcagtcttggagttggagaagaattttgccaaga

SEQ ID NO: 19851 - DNA, 2278 bp, Arabidopsis thaliana
ggtaaaagaactataacaatttcttattatgcaaatccgaattgaaaaactttatttgttgaagggaattgttttcaaaatacgattatgtcactacaagaaaacaggcgatttgcaagggaaatttgcggtggaaaacatcacttatgccaaactactatgtatggttacgtcatggagatggttgtagagatagcgcaggaactagtaatacaaattgtggtgtcgagcaacctagtaattttaataatgatgcgaattatggtcagcaagtacctgatcaatttggttatgggcataacctggaaaatagatttcatgatatggttacggatgcatttcatgaaactattgcttcatttcttgaaaatattagtgaagaacccaacctagatgctcaacatttttacgatatgttagatgctgtaaatcaaccactctacgagggatgtagagaaggacattctaagttatctttgacatctaggatgatgactattaaagctgataataacttaagtgaaaactgtatggattcatgggcagaattaattaaggaatatttgccaccggataatatatcggctgagagttattatgaaatacagaagttagttttgagtcttggattaccatcagaaatgattgatgtatgcattgactattgcatgattttctggggagatgatgtaaatctgcaggaatgtcggttttgcgggaagccgagataccagactacaagcggaaggacgcgagtgccatataaacgaatgtggtacttgccaataactgatagattgaaacgcttatatcaatcagaaagaactgcggcaaaaatgagatggcatgctcaacatacaactgcagacggagaaataaagcacccatcagatacaaaggcgtggaaacactttcaaacggtatatcctgactttgctagcgagtgtaggaatgtgtatcttggcttatgcacagatggatttagtccattcgttttgtctgggcgacaatattctctttggcatattatcttgaccccatacaatcttcctccagatatgtatatgcaaagcgaatttttgttcttaagtattttagtacctgggccaaagcatccgaaacgagcgcttgatgtcttcttgcaaccgctgattcatgaactcaagaagttgtggtatgaaggtgttcatacgtttgattactcagagcaaacaaaatttcaatatgcgggcagtgctaatgtggacgattagtgacttcccggcatatggaatgttatcggggtggacaacgcatgcgagattatcttgtccctactgtatgggtcgtacagatgcgtttcaactaaagaaaggcagaaaaccatgttggtttgatagtcaccgtcggtttcttcccctgcatcatccgtatcggcgtaacaaaaaacgttttaggaagaataaaatagttcgtcttcctccgccatcttatgtttctagaactgatttgtttgaacagatcgattattatggtgctcaggaaacctgcaaacgtgggggtaattggcacaccacggcgaatatgcctgacgaatatggaagcactcacaattggcacaaacaaagtatcttttggcaactcccatattggaagggtctcctcttgcggcattgccttgacgtgatgcacatcgagaaaaactttttcggtaatatcatgaatacgcttttgaatgtgcagggcaaaacaaaagatagtttgaaatcaaggttggacttggcggaaatatgcagcagacctgagttgcatgttacaagagatgggaaattaccggtttcaaaattccgcttgtctaatgaagcaaagaatgcgttgtcgagtgggttgttgctgaagtgaagtttccagatggatatgtgtcaaaattttcaagatgcgtagaacaaggccaaaagttttctggtatgaaaagtcatgattgccatgtattcatgcaacgattattgccatttgtattagtagagttgctaccgacaaatattcatgaggcaattgcaggttatatatatatatttattatatatatacatactatatgttttttttactcaattattacttggtcattattaacttacattaattaaatacatgataggcatcggagtatttttcaaggatctatgtacaagaacactgacaacagataccatagaacaattagacaagaatatcccagtgttgctctataacttggagaaattatttcccctgccttttttgacgtgatggaaca

SEQ ID NO: 19852 - DNA, 1949 bp, Arabidopsis thaliana
  unsure (1)..(1949): unsure at all n locations
aagataagaattatcttttaaattactgttaaatcaaatattaatttatggattttttctgtttaaagttttaattatattaaattataataaagttatttcaacaaaaaaatatattaaaaattaatttttaaaagaaaaaataggatagagtatttttcaaataaaactcggaaagaaagcatttttcaaatttactcaataaaactgatgtttttgtggcatacgccggaaaaatagattggaactcattcacttaaaccatttgaactatatcagttgaactcgtccgattgaaccagatgaactagatcagttgaactatttgaactagatgagttgaaccatttgaactagatcaattgaaccaatttcagttgtaccattttgttttgcaactatggattgatttggggagcaacacgattcaattactacattgtactgactatcattgcaaatatctaaacaacccttttcgtttcgttcacttactttcttcaatcgagacctatagatatagtagaacaaacaaggcgcttgtaaaaaaaagaagacgctgcgacggaggaaaaggcgaccggtgaaatatatgagtcgaccggagatgatatctctaaaagaggaacatttccagagtgggcgaagtaaatattgagatatcgatctagatttcgatccaacaatatcaacggaggatgacgcagcaccggagaatcgacggctaccgaaatggatgagccggccagagatggtttttccagagtcgacagagccaattgaatttatacacaaaaaatggtgaaaaaacaaaaaaaaacatggtttccatcaaccagagaaaaacgtcgcaagaggaagaacaaggctatgtctgggatacacttgtagaatttgttgcacatgaaaaaattaagggagatttacaaaactgcccttattctaataaccttttgtaaaaatgccctttcctgaaggccatttttaaaactaccccttcttatatgccaaatgactgtcttaccctctgaatgattaggtttcacgttcgtttcacaaacttcttctttttggcacaaacttcttcgttttcctctccgattttcctctccgatttcactcaaaatcgccgacgaatttccttctgatttcactcaaaatcgccaacgaattccctctccgatttcactcaaaatcgccaacgaatttcctctccgatttcactcaaaatcgccgacgaattttctttctgagaatccccaaaatcgccgacgaatttcctctccaataaacctgttcttcgctgaaggattcagatcatttctctacgacgcaaacaatccccagagatatcgatagatnagacggtaaccgtttttataatcgattttatagtcgattttatagtcaattttatagtagatctgacgctgtttcataacatgttttgcagatggattcagagagtgaaatccttacattgcctgaacagatctacaaagaaggtaacgaatctattgcaatgggtacggttcagcaacattcggattggattttagttaataaagtagaggaagcgttaggcgagagtttatttgacaagattagaagttctttttttggttctttagttgaattgggaccaagaatgaaggcaaagaggggtgtaaaattttcagggaaatttttccactacctcatgcagaagagagtgatgactaaaggataaactctttggtttagagttgattctcaaccaatctgtttctccttgaaagagttcttacttacgacagataatatgatttagaaatcgaattcacataagcaacaacaaaatcgaataaaccaattcgaaatcgagacatttaggctaacattacaaattcgaaatcgatatcgaaaacaaacctgggaaaagcangagattgaatgaagactgagacggt

SEQ ID NO: 19853 - DNA, 1276 bp, Arabidopsis thaliana
ccagcttgctcagagtgaagtctgatacctcctttgatgcgcacctcgcctccaggtcatccagctcagcttgctaccaaggtctctccacggtcagatcgatagcagccttagcgatttagtcgatcaaagccaagttcgactccacctcggctgcttgaccttccagcacggtgaactccttcttggcgatccacttctccttgatcccaactagcaacttcgagtacacaacagctaggtcaaccttagcatcgtgaaccgccttctttgctccttgtgcgatcgaagtaagatccatcactattttagagagctcgtccttcttttcagtcaggcgatgaatctggttccttgttgtgtgcttatctgcctccaacggcccaacccccccccaatctcaatttccatggccccgatcttctccgcataaccattctcaagatccttcgaagtggacaactccattttaaacctctcgatctccgcctgaaaccacagccaagtcagaaccatcacatcatcgataaaatatatacaaacaaatcataatcgaagcatacctagaacgagacctcgcgttcttgaccagccttcacacttgctgtcagctcctaaatgagggtcttcccttcttcgaactcgctctttgaggaaaccttgttcagacgttgctcatagagagcaaccagcttgttggtagcagctatcgcctaccaagggcaaaacagagattagaactggcataagaatggaattagaaggacgcaattattaattattggttattgactttcaggaacgaatggtgatcgtgggaaggacttggcttaggcgcgagagactcaaggtcgagatgatgggtggtgatagctcggatagtctagggatcgattatatcacttgtaatagcttatatgcaaactcataagttgtatcgaatcctttgcttaattaataaaatatccgattgtttgtttactctatacgtctcatatattgaatcacggaatcatatgaaacggattatactaggaatgaacctcataaacggttagggccgagtcacttagtggcttgcgtcgagagatctcgcccggacttaggcagtccggatcggggcctttcaagttggtatcagatcatgcttggttctaaggctaggtgttgggttaaggggtatcaccacttgtcggcttgagaatctcgcggtagttgatctttactcttttgcaattttactatgagttatgtggattaactttggtggtttcgc

SEQ ID NO: 19854 - DNA, 424 bp, Arabidopsis thaliana
gcctgttttggccttcgcaaggatatctttacctggaaaaccaaggaagaataattaatagaggaatagtcaagcttcaaaatgtttaagtcatgacaaaacataaggaatcatgaagaaagatgcaaaagtttctgccttttaggcaagttcaccttggagaatgagaggaagagtagcctcctgaacaacagtcattgtcttaaatccagcatcctcaattccttttaacgttaagggagacagtgggaactgatcaaatctgtaagaaccattttaccataaagagaaatctgaatctaacaccactaagaatagctctgaagctatctccgaaagaaacgcaaaaaatgtaccttgtctttgacaaataagaatctgaagttttagcaatttgagtcactagaggcgtagtagaagctgg

SEQ ID NO: 19855 - DNA, 486 bp, Arabidopsis thaliana
agcaatttgagtcactagaggcgtagtagaagctggtttcttaataagaggctcatcaacatcagatttgccttctcttcccctctttagactcttattgttgtccttgactagctttcccgagccatcttcgtcactcgtcaacttcttcacaagtttagcacgaatctcctcgtctcttcttaccggatttgggtccatcggaattcatgccaacgagtggagaaaagacggaagagaacggtgaagcgtatgcctttaactgtaaggctctgcaactaccaaattcccgccgtcggttattttagggtttaaaaggttttgtaggaaacacaatttagggcttaagggtacagatgcgagtggcccaaaatgtcaacaaatatacaaaacggcatgtagttgctccctttgctttgaaacgtgttgttttatatcagaaaaaagttttgttaaatcttcagacacgtataatccaacttaata

SEQ ID NO: 19856 - DNA, 2354 bp, Arabidopsis thaliana
ctgaggatgagactattgagcctgaccctgagtcagaggaaggagtcttctacatcgatggtcaaggctacacaaagtttgggcagtcacaaggcaacttcagtggcaaccggtttacagggaaccagagttcctccaactacactccaaagcctgctttccaaaagacctttccttagagcaacttctagaggatctatggtaattccttagagcaacttccagaggatctatggtaattcagcttaccaagcaggccacccccccacccctccaccctcaccagagacaagaatagaatcgatgcttgagcagattctagagagccaaataaagctcgttgtggagtttaatggcaagtttgatgctgtctaaacagatcttaatgggaagatcaacaatatgagctctcacctgaagaagctggatgtacaagtagctcaaactgcacaatccatcaatagacaagagggttttcttcctggtaatcctgatgctaacccaaggatgagctacaatgccatcttgattagagaaggagatgatgtgtgggaggaattggacactgaagacaagttggagctcgcagttgtagagatggtgtcgaccgacaccctcttatgttgatcgacaccatatggaacgctcttctctgagacgagtcaatacgatggtgttgatcgatacccctctcgtgtagatcaacactggatccggacaacaccttgtgaggtgcaaatccctatgcagcccgagtcagtttacagccctccagtcccttatccgaggcagcgtcgttctaagtagaatattcatgctgctaagtgcacaaccataatggagaagatcctccatactcttcctaaagatgcttctgaaacattttctgcctcactcaacatgtatgtcaagcaagttgttgacaatggaattagctcagatgaagctaagctacttaccagagacattagtgcaatcatactgcctaaggccaagaaggagaaggcacagagagtagacatagctgagtacaaccgcaccattactcccggtctaacaactatgaagcttccagatccaggtagctttgttcttgattgctctatctccacaagcagattcagccgctctttatgtgatctgggatcaagcatcaacctcatgcctaagtctgttgctgagagactaggcatgactcactacaggcctactcgcatcactcttttcttcgcggatcgttccaagcgaatccctgaaggattccttgaggatgttcctgttaaggttggtaactccataatccctgcttatttcgtggtcctggactatgagaaggaacccaagaatcctcttatccttggaagagcattcctagctatggctggtgctaggtttgatgtgaagagagagagaatctctctcaaggtttgtgatttggagatggagtttggcatggatggttcagagcttactaagcctattagttgcattgcttccagcataaacacacctccccagactgatcagaatcccaccacagagccaaaaaaaatgctccaacccgctcagctcgccaatgagagttggagagcaacggtgtcgatcgacaccactacccctgtcgttcgacaccctcgggtttcacatacagagcattctgcacattctcttcagcccacaccacttgaagacttatgtgataagttctcttctctctcttctcctcctttacctttgattaattttttagattattcgaagactgcttcacaagataacaagcctagagttccttcagctgctccaaccagatttgtttacacaccgccttggaaggcgaggaggcaggagcaatcctctaccactccacccacatcctgaactccgccaagtcaagctattgactcaaaacaagcacttagtgggaggcaacccactggtttgatttttcttttccctttcttttattttcttttatatttgatttatttttcccgatttttctagatttgaatgccattggggacaatgtcgtttaagtctcggggaggttcatactaatattgcttttatttttgtttttttattatttttcgttttacagttcatatggttatttcttttatttcccttcttaaaatttttttttttaaaaaaagttttttttttgtttaattaggaatcatgatctatatttctcttgtttactgcctgattgatgagtgctgcaggttcgagtcagtccgactattggaaaaactagatgggaaagcaacagacttgaggatatcctagtttccaactcaaccactaaggctggagctaatctcattgctcttccttttacctcttca

SEQ ID NO: 19857 - DNA, 1173 bp, Arabidopsis thaliana
taccagttccaacctcctccccatgggcttcattcctcgagtgatgtctgccttgttcctcgaaaattcccttgcagaggacttactcgaccttcgggatcgagtatttctagcgggagagctgaaagtttcttcttcttgcatcacttcctcctcttggcttgattcactgtggtcaatctcgaaacttgcttgttcgctcctgctcgaccccatgggtgatggttttgtaagtcctcgagctgctgcatgtgaagaaggtgttgggtacctcttcgatggggagagagctttgttccaaatccttgacaaaagcgagcgcatgtttgtcattgagaacaaaagtgggagaaacttaaaaccaaaattcagtaggttaggagattagacaatggaggaaacaaatgaatcgcgaaaagtttttgataagaaagggaagtgaaggaggtaaagagtgagaattataaggatttgagaatgctttggtatgggaggtggagagatgaggttgttgagttcgggaattgcaatggggggaccaaagtgattattgggggggggggggggacaagaagacaaagggacaacagcgtttcaatggaggcgggtcacaaggcattggtgtctacgaagagggtctttttggttttttcacttgatcagacggtgagaaatgctccatcttcaattactcgatcaaacggaccaaaatgaatcgcaagaaatcactcgatcaaacggtggtgatgcttctctcatttagtcaattcaaatcaacggccaaaaatactcctcctcattctactcgatcaacggttgagagaaaattggtaagatgatcctagatgcctaagtatgcaaaacaagctaaaatggtgcaaaatgatatgatacaatgagcaaatgataaacatacacctaaaatgagtaaatacagtgttatcaaacaacaaggtcaaaacaaccttttgctccctacaaccaaggttttgttccaaagcagcaatttcaggagaactaccagccgcaaccactacatgggtttgcacctcagcaaaaccaaggtcctgctactcctgatgctgaaatgaaacagatggtacatcaactgctacagggacaagcatctagctccatggaaattgctaagaagttatctcaattgcaccataa

SEQ ID NO: 19858 - DNA, 597 bp, Arabidopsis thaliana columbia
atgcaaacattgtaatttgtatatatagtatgatgaatgtgaaagtgtaagcaggaaggtgtggacgtagagattgcaaaatggcaaagccaaggcataaacataaggtgtgaaaggagagataacaggaacggctacaaagccggagctatgaaagaagctcttacgcagagctacgtcaagcaatgcgacttcgtagcagtcttcgatgctgatttccaacccgagcccgattatctcatccgcgctgtccctttccttgtccacaaccctgacgttgctctagttcaagcccgatggatatttggtatgtttacaatcattttaatttgtgtaatgtatttttttttccagtaataatgaacggtaattttctggcagttaacgcgaacaaatgcttgatgacgaggatgcaagagatgtctctcaactatcatttcaaagtggaacaagaatcagggtcgactagacatgctttcttcgggtttaatggtatgactaattaaatctccaagcatatcaaaataacacaagctattagaaaaaatgataagaactatgagactacttactaattgagtacatatgagttggaag

SEQ ID NO: 19859 - DNA, 475 bp, Arabidopsis thaliana
tcgtgggacgcgagctagcctacaatggccaccggtgagctagcttgcacttacgcagctctcctcctccatgaccatgtcaccgtatgtactttctaggctcaatcttgacatcaatcctactggagccttaattaacttgtaggttgtttgttttaattaacatgtactcaaactattttgtttacttgtaaactaggctgagaaagatgtcaacattggtgaaaacagccaatttgaacattgaatcatactggcctagtcttccgtcagaacaaaaacatggatgatctcatcatgaatgctggtgccggtggatctgctgcttctcccatggccgttttttcttctgcactttcatctggaagtgccactcaagctgccccagtagctgaagagaaaaattaggtatcgtattcttctctctttgaaccttttactaattaatatactatactcattaattcataattgt

SEQ ID NO: 19860 - DNA, 579 bp, Arabidopsis thaliana columbia
tgagcccaagatttgtgaaaatttgttgaggttttgccgtccatgatgacatgatgggttgtgagcccaagagagaagccttggtttgggaagagagtgatttgtagagcaagaatagatgaagagttagaggaagtttctaacgtagggataagagaacgtaacttgctctcgagacgaggctctttgccggagagtcttgagaagtcagcgtcggactcaaccacagtgaagagacagtgtcttgtgggaagatgatgacatgtggcttaggatcttgtggatcccatttgatgtgaccagagagtgggaggaagttagtgagggcaagggagagagattgctcgagctttgggaggattgtggagaagaaagagtcgtgagatgatgactcagagagtttgtaaaaggtgactcgctcgatgggatggtgttttagccaaagtaaatcgaagaaagtgagtgggaggaagagcggggtgactgagttagttgcatggctgactcgggagatcttgatcatgttaagagccatcgttgatggagacaatttcacttggactcaatttcaggtatttg

SEQ ID NO: 19861 - DNA, 543 bp, Arabidopsis thaliana columbia
tgttctatcagtctaacctgctgaagtgctaactgcccggctgactggacttttggatgtgtatccgtcaaaacctgtatagttttaactaatgaaatcagataatacaaataatcaagggagggaaaatcattcccaggtttatacttaagaagcaactgaattctacatacatacacacctctgtaagttttggcacaaccctaggaagacattgggacagttgctgaggagcacaaaatgccatagcaccgaggagctgtacactgctttgctttgttctccatgctttatcttcaagtccctatcagaaagaatgaaatcaacaaaaaagtacctgtcatgtaagaccaatgaacaaatgcaactaggtataccaagtttagtatttgaaccttatttctaaggagcagcactcaaatagggtaaaagtagaagggaaaaaggagttataatcaaaatactattattgaagcattagtaaactttcaatctatcctagtcaagcgcaaaacatattaaaattagaaagaagatagcaat

SEQ ID NO: 19862 - DNA, 611 bp, Arabidopsis thaliana columbia
taagcttgacgaacagcagtttcttggtgaggcaacatgtgcattgtctgaggtatcatttttgacattgacaatatatgtgcacttgtttttgctggttctctgagaggcacatcagaaattttgttttattgcctagcttataagagagagagagagagaatactttatatttaacttttcaaccacgcagataatcacaaaatcaactaggacgagcacattagaactcaagcgcaaagatggctttgctccacaggctcagcctcaccacggaaagcttatcatccatgctgaggagtcccttgcttctaagatttcaacagagatagtatttagatgttcgaatttggaatctaaggatcttttttcaaaaagtgtaagttttgttgtttattctctttaccattttaataaaattctagttctgacatcaatataacactttttttttgttgtggctcaactttaggacccctttttggtggtacaaagattgtagagcatggaacccaattcccgtgtctaaaactgaagtccggaagaatgatcttaacctatttggaagccagctttcttagtgttcacaagtgggaagtaaggtcgggaga

SEQ ID NO: 19863 - DNA, 559 bp, Arabidopsis thaliana columbia
catttaatggaacagggagattgcgttggactctattttattaacagaccagagtggttggttgtggatcatgcttgtgcagcatattcatttgtctctgttcctttatatgatacacttggtaaccaatctaaatttgattttttctctttagttttcgagttttgcaagccttgtctcttcttaatatgattcttctggttacgcaggtccagacgctgttaagtttgtggtgaatcatgctaatctgcaagctatattttgtgtaccacaaaccttgaatattgtaagtgtgttttggtttgttaaagtgctagctattatcttctgagaatcagttcaagtatagtctaaattgcaacactttcgatcatgaattgtgtttgtctttttttgttgggaactttgcagttgctaagcttcctagcggaaatcccatccattcgtctcattgtggtatgtacttcccaatatgtaatttcactgtaagctaaaatatatactcccacttataaatatgttttgcactgtgattaggtggtgggaggggctgatgagc

SEQ ID NO: 19864 - DNA, 639 bp, Arabidopsis thaliana
ctagtaacgcccgagagattagtgatgaagaatgtagtacctgagcaatagaagcagagccaagaggcttctcatcaaatgtttcaaacacttgttcgatgcttttacctaactctttctccaggacaactcgaacggcatcaaatggtgtggcaggagcttgatcacacaaagtgacgagtgttctcacccaagcagctggagccaagtcaggtttccctagaatttgtgcaatctattgaacaaaatgaaaaaaagtaaaaaaaagaaaaaaaaactcatcataagcaactgtgaacaatcaaagagtaaaatgtacaacctttattctcatcaaagaaacaaaaaaaaaactcatactttttgttacaacaagatttaagatgagtaattcataacaatcccaaacgtggaagtcccctctggtaatcacaaacctcaacaacagtctcaacacaccattaccttaaggaagaaaccaccaaggtcagagcacatagaataaactttatgagcagcaagttcatgttgtctctcccacatctcctcgtgcttattaacatccttgacgaagttcatacgaagttgaaatacctaaaagcccagaacaagacacagattgaaagaaaattgcagaaa

SEQ ID NO: 19865 - DNA, 593 bp, Arabidopsis thaliana columbia
cttgcaggtcgtcattgtactcaaaccgagagcaaatgatgaaccagctgatgatttgctttccccgttatttgttgatgatacagcgggaataaccggtgcaacttcttccggtttctgctcatagagattgtcttttggctacatttcaccaaaaacaaaatccaatcttttaatctgaacaagagaacaaaaacgtaaatgctccaaaaaaatacccctaagacttaccttagtagtaagcttccttgcaccaagaccaccagtttttcctgtccttttagcaccaataggtttcttaaacgtactaggcacaactgtattagaagctttaggcgaagaagtagcactggtagcttcatgtttcgaaagaggtaactcttccttgacagaataagaagaaaccccattagatacttccggtaactgagaagtagcaacgggagatgacagaagaccagaattagtttcttccgcaatcgctttcgcaacttctttagcaagaatctgccgatacaaatcagcagctcttgaagtatacttagcttcaattttgccacatcagtccatccatgttgcttgaagaaaacctg

SEQ ID NO: 19866 - DNA, 609 bp, Arabidopsis thaliana columbia
ctcgtccatcgcagagggaatcaaatggatgaacttatgtctgagaactccaaactcaagctgcagcagcagtccttggaaagcacgatgaatttgctcaagaaacagcttgaaggtagagagaaaatgaacaaggaatatcagaagcgttacgagagtgccattgatgatatatgtaagctttcagatcaattcaaaaaccggattaatgacctggaaagtaagtgtaaatcaattcacgatgaacactcgaaccttatggaggtgctggggtccacaagacttgaggcttctgagtggaaacgtaagtatgaggggactttggatgagaatggtgtgagcaacattcgggtaggggtagatgcgtcgatcactaggtgcagtaataagttaattgattggaaaattaagtacgagaatactgttagtgagcaaaaagctgttacagagaagatagcggcaatggaggagaagttaaagcaagcttcaaccacagaagatggcttgagagctgagttctccgtgttttggatgaaaaggttagggcttatattcgaacgcagtagcttaaccatttggctgacttcacagtaaactgatttaagttgt

SEQ ID NO: 19867 - DNA, 553 bp, Arabidopsis thaliana
taagtcacaggtacgattcatttgtcgaaggattttccaccatttaacgagtctgcagctaaaaccttattggacttttgttttgtcagaattaccaagatttcaaggcgctacagtggtgtgaaggtgactacagagaaaggagacacgtttgttgcggatgctgcagtcattgctcttcctctaggagtcttaaagtcaggaatgataacattcgaaccaaagcttccacagtggaaacaagaagctatcaacgatctcggtgttggaatcgagaacaagatcatattgaattttgacaacgtcttttggccaaacgtagagtttttaggagtcgttgcagaaacttcctacggatgcagttatttcttgaacctgcataaagccacaagccatcctgtccttgtttacatgccggctggtcagctcgctagagacatcgagaaaaagtccgatgaagcagctgcaaattttgccttttcgcaactacagaaaattcttccagatgcctcttcaccggtactgctccaaactaccttttctttcacctgag

SEQ ID NO: 19868 - DNA, 1638 bp, Arabidopsis thaliana
actctagaggatcccctaattaaaaccacatttacaattacacgaatttggaaattccatgaaatgaaagagagaacaaaaaaacagaaacatataaagaagatcacatgtaacttccacttaattcatttgtaatcatccttttaattttgatcaaagatttataacttgtggtttaatttaaaataaatgtatattaagcaaagctcctaaaggagccaaaggagccaaatgagccaagagctttaatcgcagccgctcttaaaataaactgatggtaaaacgctgctgctgctgctccgatcatcggtccaacccaaaaaatccactgtttcaattataaaaacaaaatgttataattaaacactaatcaattcatataacttttgaaaaaatatgtttatataaaggttaatgacgtacttggtcgtcccaggccttttcgttgttgtaaataacggcagctccaaagctacgagccgggttgataccggttccggtgatgggaatggtggctaaatgaaccatgaagacggcaaagccaatgggaagtggagccaaaactggcacgtgagagtcacgagcatttcgcttgggatcggttgccgagaagacggtgtatacaaggacaaaagttccaatgatctcggcaccgagtccggtacctttgttgtagccatcgctagctcgttggctccacctccatatctaaatatcattaccaatattagtaaaacagtgtaatatgatcatatatatatatctatgaaaccaaaaaaataggagttttgagacgtgatgaaacctggtgtagtaagaactttggaatgctttgacgaaaccgcaaccgcagatggcaccaaggcactgagccacaatgtataacactgtccgcaccaatgacactttacgagccaggaatagtcccaccgtcacagccggatttatatgaccaccttcataaacaaaaataaattgtaaagaagtatttaaattttgataaaacggaccaaactaattcaaactgaaccgtaaagaaactacgattagtatgggtatcagcatctcaaattagaattcgtacataatatctgtatgtatttatctgtggaaatctatgtaacgtgactcgaacgtttgtatataaacatacttaccggagataccggcggtacagtaaacgagaacaaagatcattccaccgaaagcccacgcaatacccaatattcctacgccgccacaatccactcctccggcggttgcatcggtttgagctttgtagccgattacagtcaggattgagacgtagaggaacagaagtgttgctacaaactcagctatgaccgctctataaagcggccatttcctaagctcctccatgtcgaaaaatggtgcgggaggcggatccttgtagtctctcgccgccggtggtccactctcgttcacatccaagtcttttgccatggccaaagatgatgagagagatgagttttaatgtttgttcagatttgtatatgtttggtttgtatgtgtgtgcatatatatagatagaggtttggtataagctcattataagacaatgtaatatacatggttgataactatgtggacagttaattgaatttactttttattttg

SEQ ID NO: 19869 - DNA, 831 bp, Arabidopsis thaliana
atttgaccctcctgttacaaataataatacttaataaacgcagacacgaaggttcagacttgagaccctcttattgaacgataattaatttgaccagttgagaaaaaataataatataatcatagattcaattttgacggaaacgcatacacaatattacatgaataaggtccccacaatacgagctatgaagtagagcccttccctcaagtacatcttatgcggcacatttttaagtgtaatccatagaagaattgatttgatctcatgtgcttccttcgctgcattaggcgaccacatagaaaccactatgggaatatcaggtatattccatcccctttcgcagtaccctacttctagtttgtgcatccttgattctgaatttcactgttgtttcattcacttcatagacatcaatccgaattgatatgtttcccaaaggcgagatcttgtttactattacgcgaactttagctccatggggagccttgtccaaaaagtttttctctagaaaatcttcctaaagaggcactgaattttgaatgaggtcatctgatatctccactaaagaagctccatcgaccacttcgactagaaacgtgtgacttatgtttaaaatctgttttcgactgctccagcataggatttttgttgagactgactagactgctcctgtaccggtggaggaagagacttctttttcggcgccgacttcccccgtagagtctctgccttgcgacagacaccaaaaaccataaaaaacaaaccataaaaatatttgttttgtattgggcccatatttgttgtgataatttttttagatcaagaaaa

SEQ ID NO: 19870 - DNA, 941 bp, Arabidopsis thaliana
tcacatatccttacagcagagtctaaacttttctggctgttttacattaccttgtgatgtttctttttatttttcaatagtttctaatcattatgaatgcaggttgagcttgcacatggtggtcgaggacagtcttcaagtgatcgtcgtggtggctacggtggtggtggcagcggctatggtggtggaggtggtggtggtggatcagctcggtttggcgtctcacgacactctgaattccgaggtttgtgtttcttgctagaagttggtattattaaaatttggtttcacttcacttcttctgattcttggatggctattttgcagttattgtacgtgggctcccatcatctgcttcatggcaagatttgaaggtctgatgacacttaatgttttgctgcaacattttggtttctactccctagtcttgtttttcatataaaatccatttttttcaggatcatatgcggaaagctggtgatgtgtgctttgctgaggtgactcgagacagtgatggtacgttaatttacagtttctgatgcatacttacttagcaatatatttactttttcagctttgagcagagttttgtttgggatattatacttacgtttttctcccacaacatgactatttataataatatgatcaggaacttatggtgttgtcgactacaccaattatgatgacatgaagtatgcagtaagtgaactctgtgcgtctctcttactgtattgcatgctatggtttgtataattactgatgttcaatagttgtgatttcagataaggaaacttgcatgacacagagttcagaaacccctgggctagaggttttatccgggtaccatttctctatgcagtctcttctttttccctctttgaccataattaacagatattagttatctctcaagtctctcaacattttacttcgtttga

SEQ ID NO: 19871 - DNA, 554 bp, Arabidopsis thaliana
caccatcaaaagatataaaattctactttggcaaagttatgttatgctctgttgtttcgttaatcatcccgctcaagttttaacagattacaaaatccatctcaggtgcatccgctgcggtcgtaggattaatagctgcgagcatattttggtatgtataccatcgtagaaaaacaaaaagttacagaaattcttcagcattgcttccaagaaacatctcatcagatccatctgcaaagtcttttgacatcgagaaagcagaggaattattagtcggagttcatattttctcttacgaagaacttgaagaagccactaataacttcgacccatctaaagaactcggtgatggaggctttggtactgtctattacggtaagcttaaagatggacgaagcgtacgcgttaaacggttatacgataacaacttcaaaagagcagagcaattcaggaatgaagttgagatcttaacgggtttacgcatccaaacctcgtggctctctttggatgccctcaaaacagagccgggacttactgctagtgtatgagtatgt

SEQ ID NO: 19872 - DNA, 920 bp, Arabidopsis thaliana
gatatgttcaggattgatagaggaggaaactgagaagatatgggactttactttcggaaatggaccacaaaatctcccaacaagcatcatgatgaaacctgagtatgttcgggacaagttttacaacgagagccccatggaggtgtgtcctttattaccaactctgttctcatctctgcctcaattttttttgtagagaatcatcatcattcatttattcattctgatcaggattacacactggcaaccacacttctgcgtccggcccctgtcatggcattcataggcataatggatattccgggagctccagagactgacaaaatcccaagagtgtacgtgaagacaggcaaggaccatttgttcgaaccagttcttcaagaggtaatgttggccctgtggcctcctgctcacaccttccttcttccggacagtgaccactctgcttttttctcccaacctcaagaactctatcaattcctccttcaagcagcctcatctctttctccctgatatttatgtctctctggaactcttttaaatccatcttttggatacttacttagcttgcataaaactgaatcatattcatatatattatgagatacagaaaaaggagcctacaataataattgctatgtaaatgttaccgcgcctccaactgcggtattactcaggcgagtggtgttcaaacaatcaacataaagccttataagacatacaaactcaaaaacatagataaaaagggaatgagatccaaggggtgatttaaacttggacgttggagtccttgggtttgctattgtcatctgaagatggccgagtggtctcagagtctgaaactcgtatctcttcaatcattctaacaacatcatccatggtgggtcgtactcaggcacttgagctacacatgccatagc

SEQ ID NO: 19873 - DNA, 465 bp, Arabidopsis thaliana
tctctgattccatgaaacgccattaaagctagatgatggagaagtttgaaggaggcaagtattgtgagtcactgtaggcatcaatgtttctcttcttctttcttctgactaagaacacaacggccatcaaggcgatgactgcgaaaccggctattgcaaaaccggccatagtcttcccttgatagccgccaccgctatttgcaggtggcgggacagagtttccgctgctggggactccgcgagatggcgaggtgagaggtccacctgcagcggtagacttaggtggtagtgcgtgggaactgttacgtggcggcgcgtttggaggagcaggaggagatgtggctggtgctgaaggagcaggaggagatgtggctggtcctggatggtgtttttttggttttttgggtcctccttgcggtgaagacgctggaggaggtaattgttccggaggtggaggagcaggag

SEQ ID NO: 19874 - DNA, 522 bp, Arabidopsis thaliana columbia
gtttcgaagtatattacatatgtattacatgtttttctttattctttttttctttgtaacaataatatcaaagattgcatccaaacgtagtatctgactactatttggtgcaatatccaaacgaagaagaaacaaagagcacttaaactgaattgtaacaaattgaaaccactacagcaacgtagttcttgtaatttccttcaacaatgacaatgatagaactcggtatgataagaagactctatctagccgatccacggaagttgtgaagatctcaataacctcaacaagatcccaaaaaaaaagagcttacttcgcacaaatacgatgattccgaacatcacagatgacataacaaaggggacactacaaaaaatggcattaaagctcatgtaagattcaaaagcacatatgagagaaaagtaagggcatgtcatgtccactctcttcttcacttattactgtcccatttggccaaagtatctgccggcgatggtgatgagcatatttgccatggtgata

SEQ ID NO: 19875 - DNA, 1742 bp, Arabidopsis thaliana
ttttggaatgaaaagaaataaccaaatgaactgcaaaataagaaacaacaataaaagcatcattagtaagagcctcccccagacttaaacgacattgtccccagtggcattcaggtgtgtgttgatcgacactcttctcgtcacctttaagaacaacaggagagacaagctttcgaggaactctaggcttgttatcttgtgaagtagtcttcgaataatccaaagaattaatcaaagataaaacaggagaagagagagaagagaacttatcacataggtcctcaagtggtgtgggctgaagaaaatgtgcagaatcatctgtctgtgaaacccgtgggtgtcgatcgacagaggtagtagtgtcgatcgacactgttgccctaccactctcatttgcgagttgagctgatgggagcgttgtgtgtggctctgtggtgggattctgatcagtttgaggaggtgtgcttgtgctggaagcaatgcaactgatagactttataagctctgaaccatccatgccaaactccatcttcacatcaaacctagcactagctgtagctaggaatgctcttccaaggataagaggattcttgggttccttttcatagtccaggaccacaaaatcagcagggattatggagttaccaaccttaacaggaacatcttcaaggattccttcagggattcgcttggaacgatccgcgaagagaagagtgatgcgagtaggcctgtagtgagtcatgcctagtctctcagcaacagacttaggcatgaggttgatgcttggaaccagatcacacaaagagcggctgaatctgcttgtggagatagagcaatcaaggacaaagctacctggatctggaagcttctcagtggtttgaccaggagtaatggtgcagatgtactcagttatatctactctttgtgccttctccctcttggccttaggcagcatgattgcactgatgtctctggtaagcagctttgcttcatctgagctaattccattgtcaacaagtcgcttgacatacctggtgagtgaggaagaagatgtctcagaagcatctttaggaagagtatggaggatcttttcgattatagttgtgcacttggcaacatgaaactcctgcttagaacgacgcctcctcggataggggacatgagggtgtagacagactcgggctgcataggtacttgcacctcacaaggtgcagttcggatccagtgtcgatcgacactagaggggtatcgatcgacaccgtcgtattgggtcgtctctgagaaaagcgtcccatatggtgtcgatcgacacaggaaggtgtcggtcgacaccatctctacaactgcgagctccaactcgtcttcagtgtccaattcttcccacacatcatctccttctctgatcaagatggcattacagctctttcttgggttagcatcaggattaccaggaagaaaaccctattgtctcttgatagattgtgctgtttgagcgacctgtacatctagcttcttcaagtgagagctcagattgtcaatcttcccattaagatctgtgtagagagctccacaacaagctttgtttggctctccagaatctggtcaagcattgattccattcttgtctctgctgagggtggagaaggggcttggtaggttgaattaccatagttcctctaaaagctgctttgaggaaaggtcttctggaaagcaagctttggagtgtagttggaggacccttg

SEQ ID NO: 19876 - DNA, 2201 bp, Arabidopsis thaliana
gtaactacctcccccagacttaaacgacactgtccccagtggcattcaaatccggagtaagtgaggaaaataaaaaaaaacgtaaaataaaagaaaaagaaaaagaaaaaaaacccatacaagtgggttgtctcccactaagtgcttgtttagagtcaatagcttgactttgatggagtatggggatcaggtggatcagaaggtggcatatattgtagagaaagacctctcatcgtccatgctggcgtataagcagttaacgcatgagattgatcgagcaagtgtggaacatcagcagggtaagactcaggtatgggtggtatacaccttttacctgtacaatcatcaaaagaacaaacaagcgctcgacgaaaaacttgtggcttgcttaaccgtgaaacaatctttggaaattataacatttattgaagatatctagaggtttaggaggaggagatgagtaccttaaccgtttaggaggaggatgcagtggtagaggtgcattggttggtgtgacaacaggtcctgcaataggagcagtgatctgaactttcaaagcagctttagtagacagttctggttcagcccgtttggggtgtcgattgacactggtgatggtgtcgagcgacaccatctctgcagattgattctcatcatcgaatctgaaactggcttcatgtggacgcttgctgttgctgattaccttttgtgagacaaccattatctttgtcttgtcatcttgcttctctagagcatcatctcgtagcatatcactctaaagcgggggtgacaacttctctatatcaaccagaggcaactgaagtagagtctcatccatgatacccatgcaatgcatctcaggaatctcctgcttggactgtcgaggcagaagacaaggaacttgtggtgtgaagacttgtctagtaacaggtggagatgcaaggtatattgggataatctgagtctagtgtcgatcgccactagttgagtgtcggtcgacactactgtttggcagcgatcatgctctgtcaaacgtcaacactggcctgtctgtgtggtgttggtctcgatcgacatgaggtgggtgtcgtttgacaccaccgggaataagcgcctcctcctctgtgaaattatcgattccactcgacaaaatcaaaacagagtcgtcaagaacaattggtgtcgatcgacaccctgatgtatcgatcgagactagggtttttcctgcaactggacgagatgaagtctgagctgaacgttcgcaatgaaggattgggtttagttgctttccactgggtagtgtgactgcattgacagatgctgatggaggtcagagctcggatgtatgagagcgtagattgtcaatcttgctgtagagagaatcatgtttgctttcgagctttgttaggcctgcaagaagccgcgcaagcatagattccatcctggtctatgatgagggttgacggggggggggggcgtggataggagcgaaaattgctgaaacatgagtctctttgctagcggtgactatctcagctgaaattcattggtaatgaggagtaatgcttcactagtagttcttgtcatgaatatacagtagctcgctgcatcaagttaagcctggtatggcatggctatccctctgtagaagatattgatgagttggctctgttggaaaccatgttgggtacattctctctaataggatttgaatctaatccaagctgcccagttggtgtcggtcaacactatcgtcgaaatctgccagcagtttgttgcgttccatcttttagctcccttgtcacagaaaagagaagaaagaaaacgcgtgagaaacaaaagaaagaaaaataaaagcttagtttaaattctacacctagtctaatggtgaatcaaagagaacttcgacaaaggcgccaaatttgatatatgtcaaattaatcctaagaccactctctcaaataaagaggtcaattgcagcacttagggatcgaattcacaaagttctcggatcacgcaataaactaaggttttgaattaagcgaagtaaaacagtaatgaaaataagagaaacaaaagtaagcaatagcgaattgtatggttgtgaaaatagataataaaaacgtcaggcttagggtattctcaggacatagatgatagtaaatctattaatagctaagttgttatcgaaccgttctcaa

SEQ ID NO: 19877 - DNA, 506 bp, Arabidopsis thaliana
gtaactaatcaagattttgatttcttgaaattatctctcattcaggaacatccagagatgaacaagagcgagaagaagcgtatctgcaggctaatggactgcagaaaactatcagcagaagcctgcgctcacgcggttcaaaacgagcggttaccaatgcgtgtggtagtgcaagtgctcttctttgaacaagtaagagccaacaacaacggttcatcatcaaccggaaacagcacaccagaggttatacctgcttcaagatcaacaaacactactgatcaagaagacacagagtgttgggacacagaagatatcaaagctttgagaggtgaattagcaaatgtaagactcgcaaagaatcaacaagagagccataaccaagggaaactgatgaaaggaggaggattaggagttctagagtgtctcgaagctttggtctggtaaagagagaagtggagatatgataagtagctcagggacttcaagtcctggttctgttaatgatg

SEQ ID NO: 19878 - DNA, 2045 bp, Arabidopsis thaliana
gaagccaaaaagattttatttcaatgtgtgaaatatgaggttaaattttcagatggttattcttcagaattggctagttgtgtagatctggagaatgaaaaattttcaggcatgaagagtcatgattgtcatgtttttatggagcgactacttccatttatctttgctgaactccttgaccgcaatgtccaccttgcattatcaggtacaatacttactattttatttgccaaactttttttatctaatcatttaacttgaacatatattttaggaattgaagcatttttccgggacttatgttcgagaactttaaagaaaagtcgcgttcaaattctcaaagaaaaaatagttttaatcatctgtacgttgagaaagatttttccaccatcatttttgatgttatgtaatacctacctatccagctcccatacgaagctgaaatgggtggcctgtccaatataagtggatgtcccatttgagaggtttcaaaaagttgaaaggaaaagcaaagaacaaaagatatgcgacatgatcaattgttgagtcatataccaatgacgagattgcttattttttagagcactactatagccgatcatatacaaacaaaatcaaggtaaatatatttatttatttaaccctacttcctatacttcagaattaattcaattacatggatcaggttaacaagatttgatgaagttgaagttcctatatatcatgtccctggagtacctaacatatttctccacgtcgaccgtccaagtggtgacatgtagaatgacttccagagacagattaccaaagtgcacatgcatatgttttgagaaattgtgactattttaaacaacttgagagatatttttagagtctctttaatttaaaattccactaagataactttgatttatttttcttcgtttataaatatagtatgttcgaggattttctttctgcaaaatatccatgcttgctcacagtcacccttcgtctcaaggcaacaacttccaagaggaagctcatgcaacgttgccggagctacaagaggactcggcggtggctctgaatacgatacgttcagtgcctggctgggaaatgtggacatgtgtattgtctcccattccccggtcaaaaactgaatgctatgttctcttcctctactttgttctcgtgctctgcctctgtagataaagtcgtgttctgttgtgaatcattgtctgttgtgaatcattgtctgttgtggaacatgctctattgaaaatgatgctctattgtgtaacatagttgacttgtgaatcgtgttctgttgtgaatcatgttctcttgtgaatcgtgttttgttgtatatcatgctctattgtggaacatagttgactattgtgcttagcatgttttcagaatgatcttgttcagttctatactcgtgtgtgttcttgttcagttctataatgtgtgtgctcttgttcagttctatagtttgttctgttctgaatagtaccctattgtgaatcatgctctattgtagaacatagttgactgtgtgcttagcatgttttcagaatgatcttgttcagttctatactcgtgtgtgctcttgttcagttctatacattgtgtgctcttgttcagttctatagtctgttttgttgtgaatcgtgttctattgtgaatcatgctctattgtggaacatagttgactgtgtgcttaacatgtttccggcttaagacatttaggatctgcctcagttctatactcgtgtgtgctcttgttcagttctatagtcacgttgctcttgttcagttctatattgtgtgtgctcttgttcagttctatagtctgttctcttgtgaatcttgttctgttgtgaatcatgctcgattgtggaacatagttgactgttgtgtttagataagttaactgttctcttagcagttctatactctcttatctgttgatgagttttacttttgtaacatgtttacttttttcattgttgcatgtgtttggaggtttactcgcgacagaggatctaaattggtta

SEQ ID NO: 19879 - DNA, 536 bp, Arabidopsis thaliana
tattggtcccaacattattaatttataaagtttctactctatatgttttaaataaacaaaaaaatcaaaaaatacattggatatataacatagtatctccttaattttcactttttaaggagaggggcttagagagaaacacaaacacgtgagtcatcatcaagacagtggtcgggggtcactttcgtgtaacacagacattaaatcaaataaacaaaacgagagatcctttaccttagtgtatacacacagaacacacgtacacactcatatttacatttgccacgtaagaatacgtatactcctgacgtgtcctgtatatatatacacacgcacacttcaatttttcattcactaaaccagatttaatttgagactctcaaagaaacaccatggaagaagagcaacctccggccaagaaacgaaacatggggagatctagaaaaggttgcatgaaaggtaaaggcggtccagagaacgccacgtgtactttccgtggagttaggcaacggacttggggtaaatgggtggctgag

SEQ ID NO: 19880 - DNA, 968 bp, Arabidopsis thaliana
taaatagaatgatgcaacaatgagctggtgaagccaagtcaaatcatctctcaatcaaacgtgcttcacacctagattttttccatcatttgtgtttttcttcatcttctttcttcttttccttttataaatgcttcacttcttcgattatttttgtaattagtttgttctatgaatgctttcagcaaaaaaaaagaagaagaagaagtcaatttgattaaagatctcacaaaaataagatgagatattattgttatatatgtatatagcttttgctcaattggtaaagtattttgagcttttttatatatagaaatagaatattaaacatatcaacgaatcatcatcatctcttcacatccctctgtctctttgttttctctattggcaaatttttcttcttttcttataaaccccttaccgtaagacctaagaaacactatacattatatgaaccctaaaaagaaagatggagacaataataaacaccaaattgaattacctgtaacgcaagaaacgattatttatgtacaccaattctcctaattcctattcttaatgggaaaaagtttaaaactcatcttgacgagtaaagagagaaagagagctacatggctttgaattacaaaagtagattttacacctgtttgtcctttactttggcctatcttgatctcacttccacgctcgagcttctccttgttttccgctggttcttggtagaccaaagcagtcgttgtggcgtcttcatccatacttatctcttgacagccgtgccaccgctgttaccgttctctagcttcggaatcagactttccactgctcattttcgtgtcttttggaccaaaggctctgactagctcagaggctatggatccaacctccacatcggcttcttcttcgtggcgaccaatctctgaaattgatccaaggtggtggaattttctgccaagaatagctccttggag

SEQ ID NO: 19881 - DNA, 2569 bp, Arabidopsis thaliana
  unsure (1)..(2569): unsure at all n locations
gatcattgtaggtcgagctcaaagtaaggagaagaccaaacactttatcttgttctctcctttcgattaggacctttggatctagagtgttaggtctcaacatctcaagttcagcccaaagcgacctaaactttccaaagtgttgagtgaactccatgtctccttgagaaagatcgttgatggctttctttacttcgaacactcgacttaagttggactggtttccaaacacattgaagagagtttcccatagctccttggcggtctcacaatatgagtaagcttcaagaagggaagcctcaagcgagttttggagtagagctaagactgattggtcctcttggaaccatttttcttcaccgacaggaactatctccatgccttctcttatggtcgcctcggatggtgcttcactcgttaagatgtgagcccaaagtcctcggttgcacaaggctgtcttcgtggttcttgcccacagaaggtagttcactcctttgagtgtcaccggaacaaacaaagctttagtgttctccatggtttagatctgaacggaccagaggataaagcttttaaccgaagagtaaaaggactcgttttatagaagaggaagaagaataagaatgatgtagagtagaatgagtatatggagctttattgctctaataccatgtaagaatatggagctttaggttgcaagaatgggactcttgattaagagggttgagagtgagaaatgaacataaggaagacatagtattacggaaatagaagagagattgtgagaaaagagattttctctatttcttgattaaaaacatacataagatacaagctatatatggacattaggtaagtaaagatatcctaagaatatgctaaacgcgtcgcactctatacaagtccacatcgtgtagacaagtcactatcgtactaaagaaagagacatgacctaacgtttggtttgctttaaacacatgtgatcttcttttgacttgggtgcttaagcttcaacggctacatgaggagtcttctaggtcttctagaagagctcaaggtgaagaagagtttatatgggcttctctcattgtgatgttgtatggatgggcttctcttcgtccgtacagtcatctaggttaacttgcggaaggggtttccttcattaggttcaatactccccctcaagcttaaccggagatgagtcgagattaagcttggaaccaaattcaaccacctcattaaaaaccttggtgtagaaaaacctcttgggataaaactacacacaagggaaaaagagtatgggatatttgataagaggatcatggccgggttagatcaactaggccaagtttgttgtgaatatattcacacaccttggtgctcgctcctttggtgaagacgtcggctaattgttcctcaccctcagtgtaatgtggtaggatcactccgagttgtacttgttctcgtactttgtggcaatctacttcaatgtgctttgttctctcgtgaaacaccgagttggaggcaatgtgaatcgcagcttgattgtcgcaatgcattggaatggggtttggtgtatcaatgccaaagtctttaaggagagctttcaaccacatgagttcagtagtgagctttctcatggctctatattcggcttcagcacttgagagagacactactttttgtttcttgcttctccatgttactaggtttcctccaatgaaggtgcaatagcccgttgtagaacgcctatcttgttgatctccggcataatccgcatcacaatatccaacaatctccgtgtttctattcatcccatccaaatgccttgacccggagctcctttgagatatttgagaatgtgattcaccatgttccaatgatgtattgtgggagcttgcatgtgttaacttactacattaacagcaaacaaatgtcaggtcaggttatggttaagtagataagtttaccaacaagtcttctatatctcgtagcatcttcaaatggtttgttatcatgctcccctttcgtttggccttgtaatcgtcctctagtggagtcttggccggttttaccccgagtttacctacttgggcaagaagatcaagtgtatatttcctttgggataagaagagaccttcctttgatctacaaacttctatcccaaggaaatattttaactcaccaaggtctttaatatcaaaaacacttttaaggaaagtttttgtatcttgaatacctaccttgtcattcccggagatgataatatcatctacatatacgagaatgactactatacctttttggcttggtaaagtgaagagagtgttatcggcttcagaccttttgaaccctcttcccatcaatgtggtgctgagtttgtggtaccacgctctcggagattgctttaaaccgtagttggtttcttaagcttaaagactttattgggagcattaatgtcttctagacccggtggtggcttcatgtacacttcttcttcgagttctccttgaagaaacgcatttttaacatccatttgccaaagatccactcgagattggcnccaaggaga

SEQ ID NO: 19882 - DNA, 1629 bp, Arabidopsis thaliana
ccattgtacgatggttgtcgacaaggccagtctcaattatcgttagcagctcgagtcatgcagaacaaggcggatcataatatgagtgaaagatgtgtggattcggtatgtcaaatgttgacagattttttaccagaaggaaaccaagctactgattcgcattacaagccagaaaaattgatgcgcaatttaggccttccttattatacaattgatgtttgtattaacaattgtatgattttctggaaagaagacgaaaaggaagataaatgttggttttgtagtgctcaaagatggaagcctatggatgactaccgtcgaagaaccaaagtgccatataatcgtatgtggtatctacctattggtgaccgattgaagagaatgtatcagagccacaagacggcagctgcaatgcgttggcatgcagagcaccaatcaaaagaagaagaaatgaatcatccttcagatgtggcggagtggagatattttcaagagctacatcccacgtttgccgaagaaccccgtaacgtttatctcggattatgtaccgatggattcaatccatttggcatgtcgcgaaatcattctttgtggcctgtgatcctgactccatacaatttaccaccgggtatgtgcatgaatacagagtacttgtttcttacaattttgaattctgggccaaatcacccgcgaggtagtctcgatgtcttcctccaacctcttattgaggagctaaaagagttatggtctactggaatcgatgcatatgttgtgtctttgaatcaaaattttaatctaaaagcagtgttgctgtggacgataagcgactttccggcgtacagcatgttatcaggatggacaacccacggtaaactgtcttgtccaatttgcatggaaagtactaactctttttatctacctaatggaaggaagacgtgctggtttgattgtcaccgaagatttctttctcatggtcatccattacggaagaacaaaaaagacttccgaaaaggaaaagacgcttctaccgagtatccacctgagtctttaaccggtgagcaaatttattacgagcggttgtctggtgtaaatccaccaagaaccaaggatgttggtggcaacggtcacgaaaagaagatgccaggctatgggaaggaacataattggcacaaggaaagcatattatgggagcttccatattggaaggatctgaatctccgacattgtatcgatgtgatgcatacagagaagaattttttggataacataatgaatactcttatgagcgtgaagggtaaatcaaaggacaacataatggcaagaatggatatagaacgattttgttctcggcctgacttacatattgatagtaagagaaaagctccatttccagcttatacattgacaaatgaagccaaaatgagtttattgcaatgtgttaaacatgcaatcaaattccctgatggttattcgtctgatttgagtagttgtgttgatatggagaatgagaagttatcaggtatgaagagtcacgattgccatgtttttatggagcggttatttccatttatctttgcagaactcctcgaccggaacgttcaccttgcattatcaggtaaaataagaata

SEQ ID NO: 19883 - DNA, 1724 bp, Arabidopsis thaliana
tactagaactataactggtcatagaatgtgcattgattataggaagttaaatgctgcatctaggaaagatcattttcctttaccattcattgaccatatgcttgaacgtttaactaatcatccatactattgctttcttgatggatatagtggtttctttcaaataccaattcaccctaatgatcaagaaaaaaccactttcacatgtccctacggaacttttgcttataagagaatgtcatttggtttaggcaatgctcctgcaatatttcagaggtgtatgacctctatattttcagatttaatcgaggagatggtggaggttttcatggacgatttttcggtctatggcccctctttctcctcatgtttgttgaatcttggtagggtattgaccaggtgcgaagagacgaatcttgttctcaattgggaaaagtatcatttcatggtgaaggaaggcatagtgctgggtcacaagatatcagagaagggtatagaggttgacaaaggaaaagttgaactgatgatgcagttgcagccaccaaaaatggtgaaggacatgagaagtttcctaggtcatgctgggttctacagaggattcattaaagacttctccaagatagcccggccgttaaccagactattgtgcaaggaaaccgaatttgaattcgatgaagactgcctcaaatcctttcaaaccatcaaggatgctttggtatctgctccggttgttcgagcgcctaattgggactatccatttgagatcatgtgtgatgcatcagattacgcagtagttgctgttttaggccagaaaatagacaagaagcttcatgtcatatattacgccagccgaacgttggatgacgctcagggaagatatgcaacaactgagaaggagcttctagctgttgtattcgcatttgagaagttcagaagctatttggttggatcaaaggtaactgtctatacagaccatgcagttttgaggtatctgtatgccaagaaggatactaaaccacgactgttgagatggatacttttattgcaagagtttgacatggagatagtagataagaaaggcattgaaaatggtgcaactgaccatctgtcaaggatgagaattgaagaaccccttccaatagacgattcaatgccagaagagcagctcatggttgtagagttcttcggaaggagctacagtgggaaagagttccaccaactgaatgttgttgaaggagaatctccacggtatgctgatcacgtcaattacttggcgtgcggagtagagcctcccaacctgacaagttatgaaaggaagaagtttttcagagacatacaccattactactgggatgagccttatctttacactctctgtaaagataagatctacaggagatgtgtctcagaagatgaagtggaaggtatcatgctgcattgccatggctcagcatatggtggtcacttcgcgacgttcaagacagtgtccaagattctcgaagcaggcttttggtgcccaacaatgtttaaggacgctcaggagtttgtttcaaagtgtgattcatgccagagaaaaggcaacatcagcagaagaaatgagatgcctcagaatccaatcttggaagttgagatctttcatgtatgggggattgattttatgggtccattcccatcttcacacggcaacaagtatatatttatcatactctataactcaaaataat

SEQ ID NO: 19884 - DNA, 1690 bp, Arabidopsis thaliana
gtacttggcagcgattagtcgaggtcctgacctatcccaacgcatcgtgtgggatctgattcgtctatgcagacctgtgttatcaatgattttcgaggtccgtgttgagaaggatcagaggatctgactgttttcatttccgtgagtttgtcttctatcattagtactacggggtcagcttttttgataagcttgtagctgcccatatagcattttcgggagatgcgttggctgccgtatacaactgctagccccttgtccgaggggaatttaatgcattggtggtaggttgatgggacggctttcatggcgtgtagcatggtcttctcagtattgcgttgaaaggagctttcttgtcgactacgaggaaactctggagtcgcctcactcctcgtgcgacggttgggagctggatggttcctagagaaaaggttgtatactagcgaacccggtaagaggcgtgtgcctgccttgcagctcggaatcgtggtgctccatttttttgaaggcgtcgtaaaagagtacgtcaactgagcttcccgtgtcgatcattatacgggagagttcgtagttgcctacatcgattcgaataacgcgagcgttatcgtgaggtttatcaaggtcggtggtttcgctttcccagaatgtgatctggtggtcaggtcccatcatcgggctcttgtcttttgtgtaagaatctgccttcctctgatgagttttgatcgaattgattgaatcgttgcagagctgagaccctcccatgatgaaatcgatgcgtttcggggagaggtgctcagttgcgcttctgcagaatttcgagaggcgtaatggaaacctcatgtttttcttatgcgaggcggggggaggtgtggtgactgaccttcctgtcctgccacctagatcgagttctgcaaagactaggtctatgcgttctctcctagcgggtgggggagagtcacttccctccggtgttcgttcccgtttcttttgctttggagtttgctcttcctcctgttcgtcgggaggaggggttcaactttggggtttgaccttttttagttttacccccagctgcgattaactttttaacggcgcgacactcctcggtggaatgtcctcttttcttgtggtacttgcaatattttccgaggtcaagttctcgactttcgtcctcagctgcctcttcttttgcaaagaagatatgctgcccctgcgtttggttttcctttttgaagggttttttaattgcaaggggagcgttttgcgttttagattctttgaatcgtaaggccagcacagcgagctcctcttcggctttggcgaagtggagagctttgtgaagggcatcgtctaaagagaccggttgcctgacagtgagttcctcacggaacctagaggagaaccacaaactgttacgaagggctgctatggctacctcttcgtttaggtttgcaattttttattagactgctttgaatgtttcgacgtaagatcgcagggattcgttctcaagttgagtaagacttcagaggtcggcttcagacgtcctgtgttcgataagtaccgaatactgttttaagaaagcggcggcgagctggtcgaaggtatcaataaagttcccttcgaggctagcaaaccattcgaaggcgtgacctaacgaggtttctgcgaagaaacggtaatgacctgc

SEQ ID NO: 19885 - DNA, 592 bp, Arabidopsis thaliana columbia
gcatgaccttctactttcttaatgttttcatatggcaaacaaattccatatgtaatgaaatgttgacttcttgttacagttggccgtttatgtttctagtcaagttcctgatgttgtagtcggtgatccgagtcggttccggcagatcattacaaacctggttggaaactcaatcaaagtaatttactccttacttcttacagaacaacaggcttcacgaatctctactattacagtactcatttgttatttacttaataacagttcacacaggaaaggggacacatatttatctcagtgcaccttgcagatgaggtaaaggagcctcttactattgaagacgcagtgctaaaacagcgactagctttaggatgcagcgagtccggtgagacagttagcgggtttcctgcggtaaatgcatggggaagctggaagaatttcaagacatgttacagtactgagagtcagaattctgatcaaatcaaattgctagttacagtggaggacactggagttggcatacctgtggatgcacaaggcggaatcttcaaccttttatgcaagccgcagttcacatcgcggacttatggtg

SEQ ID NO: 19886 - DNA, 961 bp, Arabidopsis thaliana
cagttgactgatactgatcagatttgccttaagtccatcaacatgatatacatcggttagatgaggcaaggcttgtccggaagtatatccctttcctttgatcaaggcatgacctccatctccaaatctgactttcctagatggcacatccttatatccagcaagattgtctagtgttccagtcatgtgtctggagcatccactatcaaagcaccacatcagatccttgagttctgcattcgctgatgtttgagtaacatgacactatagatgttctttcttgacatacacttgtctgactcgtcgtccttgagcacccacttgataattcctcctagtctgaacaacatgtttcaagtagttgtagcagtctgctttgtagtgactcagacctccacagtaccagcatcctgttctcttgcttctgaactcaggtttgaagtaagtttgtctcaagttgtaagcctgagatgctcgtttaggcttagagcgaaacagattccgaacagtggttgtgggtttgacctgagatttatcgtctgaagtggatcctttgacaaactgagtctcaccttttgtatttcctccattgtatccaagaccccacgtaacattagacgttctgcccatggttaaaagtttatccaaatccttggttccgactgctgaccagcttcttgtccttgtacgtttttcccaagacgacagtttactaggaaattgaactcagccgactgctgaattcctcaatcgactcttcattctccattgtcaagttttcaaattcagacgctaaaatatccaatctggtcctcttcacattactggttccctcaaaggttgtttctagaatgtcacatgcttcctttgctgatgtgctcccttgcacatgcgtgaattgactcattggcaatgatctgaagatgattgacaaggccgttgagttgttcttagcagctgt

SEQ ID NO: 19887 - DNA, 541 bp, Arabidopsis thaliana columbia
ctgatcatgctccttgcttgttttcagtactgaaccttcgcagagttgttaacaagcctttcaaattctattgccacattgtggatcatcctgactactcagctattgtggatcatgaatggtcggctggtacaatctctggctcttgccagtttaagcttcatcgtgctttaaagttgccgaaaccgtgcatgcgtactctgaacagaactcatttcagtgggatcaccacaagagttaaagagaaagcagaggaagttgttgctctacaaagaagaattttatgttctccatctcctactcttgctcgtgaggagaatattgcctctgaggaatggaataagctgttggtcgcagaggagaaattttttatgcaaaagtctcgtgttaattagatgcaccttggagataggaactcttcttatttccacaagatggtcatacaaaggaattcgcagaatcacattcatttctttactgatgtggatggtactaaaatcacttcccctgtggaaatccatcgccatgctgttgagtattt

SEQ ID NO: 19888 - DNA, 605 bp, Arabidopsis thaliana columbia
gttttttgtcgactgctctttgacgtgccaactctgcaatcttctgagctgtcctttcgggtctaaaccggccctcaccgagctaaccaccactcctgtgatctcttcattgtataaattatcatacactccatctgttccagcgacaatgacatctccagactgaacatcaattgtgaatacctgattcatataaccacaccagcgtgttcaattcaatccgtataacccgaaccacaactgaaaagtgtattcaaaatggtcttattaagctttgataataggaagaatacgcctttgaaactgacctgaccggagctagggacgtcggcactgttcccactctctaattgataagtgaagttgaatccatgctgctgaaccggagactgaaacaccgtggttccctctctaaccaccgtgaatccactgtctccgagattaatggcgtgtaatccttgcacaaggagaacaaacactcttcaacagacggttctaagaaatacagttgttgttcatcacaaacaaaactctgtgagctaactaaccttatcttttaaaaagatgatacaagctgtggaggagctttgcgtttggtttgagaa

SEQ ID NO: 19889 - DNA, 468 bp, Arabidopsis thaliana columbia
aaaaggtgcagactcatccatgtttggtgtcatggatgaatcctacggtggcgtcatacatgagaccaagatacaacttcatgcttactcatctgatggtttgagcacacttgttgttgggatgagagagctgaacgagtcagagtttgagcaatgggattcttcatttgaggcggcaagacctccttgattggtcgggctggattgctaagaaaagttgctggaaacattgagactaaccttaggatagtaggagcctaccgcaattgaagacaaattgcagcgtggtgtccctgaagcaatagaatctttgaggattgcagggatataagtcgtgggtcttgactggtgacaagcaagaaactgccatatccattggcttctcatcgaggcttctgacaagaaacatgaggcaaattgtaataaatagcaactcgttggattcatgtcggaggagcttagaagaag

SEQ ID NO: 19890 - DNA, 599 bp, Arabidopsis thaliana columbia
gacactgaaattgaaagacaaactcctaaaagaaaaagtcttctctttgctttgtttaagattcggacaatttgctaatcgcatcccaatcaatctccacagaaggaaacttctccagcccgaaactcccaatctcatcaaatccagaatccgaaaagtccaagaacgtagtaataccagattccggcgaagaagattccacatgagactcatctgaaaacgaattctcatcagatctcaagaacccatattcactttcttgatactctgtttttggcgggaaaagctctgtttcagaacaggggaggtcaatatcctctgtttttctcaagctctgacaaatctcttggagctttgcgtcgacagaggaatgaagaggattgaaacagctacctcctccgtagtatccatcctcgtgtctgaactgtgggaaattaagtctcgcgaactcgcctcttagcttgtaagcagctaggtcataagccatggctgcttcttcagctgtgtcgaaagttcaagccagagtcgggtccggttcttgggtaaacggatctcagctacccattttccccagtgcctttgtctaaccctctatagag

SEQ ID NO: 19891 - DNA, 332 bp, Arabidopsis thaliana columbia
gccccagcttctgttgcaagcgccttagctaggagcgtcttacccgttccaggaggaccaaaaagcaatattcctttacagggctgaaaaaggtcatgtcatcaggaatatcagccaagttgaacggaaatacctgaccaagaaaacaacgatatgtcccaaacagaaagcaatacccgcaagagatttccacgggcaaaaagctctggccttctcatgggaagaataaccagctcatttaatgcttttttcacgtcttcgagagccccaatatcttcaaatttgacgccaatttctccaggagcaaccacagccgagacaaaatttctttc

SEQ ID NO: 19892 - DNA, 1834 bp, Arabidopsis thaliana
ctcttctgcggtgaatgctccctggtcactctcgataataaccaacaacttccgcttgggatggagaacaaactttctaggcgtgtacctcagagggaccactgtttcgttgaatgtttcaccaagacgatcaatcataaaaattctcagagcatccccagcgacagagacaacaccttcagcgcactgatcagatgaaaagggggcagcaaattccagagtctcgtaagacagaggcgtcaaatggaagtgtcctcggtgaatataaccaagccaaggtcggctagacaaacacagcattgcagaccggcctctcacagaaatggagaatagcttgggaggcttcagcccaagaaccgggagcgagaatccgaaagctgaccagtcaccatgtccaccacagttctgaaaagaacaccattctgcagcccagaattgaggaagagatttgccgggtgatcagcaccatcatctccaccaatcgatgcctgaacttcgaggaatagcagagactccggagctgaagagacactttgcacgctgagaatctgcagacagtcgtcaggatccagagatagaatgcgcacagtattatcataagatcccacagcaagaaagcgagacctttttcttccttcaggaacaggggcaatgtccaggcaagccacatcaccagacatttcatgcttctccacctccatcagctggccagtcatatctgcctcaaagtatataagctctcccccgctcaatgcaatgaccacttgaagccgattatacccaactttaacaattgacctcttgccaggagttctccattcgttaatgcgtccatcttcccttatgtggcggataccattgggatggacttgcatgagagaatcatcgccgatcagagagacagccagggatggggtagtatcaagaaacccactgtcattaacttcttcaacttgttcaccaatcgaaagaacaagagtagcattggtaaaagagacaacgatgtatgcatcaaactcatcgctcacattctttttcaccgtccacacagcacttggctgacctggaagctgagagacagccatctcagtgatggccaaaccaggtctcagtatccttagagaggatcgtggaccccggccgcaaagtgaaaagatttgaggggtttcttcctcaaaaatgtttaggactttcatgtccatgagcggcatcagactctcgacttggtcaatcctaacaagattcttaagtcgtctaggctgaaaaaagacgggctgaaaaccttcttcggtttccatcagattagaggaggaagactctacatcaggttcctctcctatggcctgaaactgatacaaaccatggtttccaaattccgaagcagagaagaggaatcccagcttcaacacacatatagaggatgcgacgggaatggtgtcgaagtatttaaccttcaactcggagacatgatcgccattgtgatccaaggtgaccttaaaaacgtcgccatactcagtctggattaaaaagaagaacattgtcttctgcttgtgcacggcggcagaaacaaccaaaactccccgttcagcaggcaaatcagttcgtctaggaatcacagccctcacgtctggatgaccctgattcatgtaaataacaaaattctcggcgcaaaccaaaactccactcgggccatcagctcctccaggaacagtaacaagcatattggcaccattgtcaacagggttagaccactttctagagacatggttgagcccaaatcgagctcatagaaagtcaaatgcttctgagcctcactagcggcttggccagtagg

SEQ ID NO: 19893 - DNA, 610 bp, Arabidopsis thaliana columbia
atcctcagagacgttcccgtacatgaatccaccgcgtttgacagcgaaggcaagcgactcgttgacgaaatgctgaaacgcattggcgcaatcgcgatcgaacgagacggaatcgcagtgagccttctcctggcgaccgacgcgcatctgtcgagcgattagatcttcgacggtcatcttcctcccgaaggaaccagcaggcgttacagcaggaccaccacgaatcgtacgctcaccttcgtaagcaaggtagaccatagagccgtgagctagattgagagacgagattcggaggttaggatcggccatgtcggtgaacgctaggaaatcagaagggctcttagcgaggagaaggtttctattggtggataaggtttggttgtggatagggatctgaagctgatcttggattagggttttgagttgggagactgtgatatgaggtccatctacactcactctctccaatccatctctgcttcggactctgagcatcgtcatcctcgttcgttcaaaaacccagcatttttgaggaacaagaacaaaacagattcgaggaaatctcgaaacctgcttgaagaatttataagacaacaaagagaggatagag

SEQ ID NO: 19894 - DNA, 437 bp, Arabidopsis thaliana
tagctttatatcatagaaagttatgtcattctgctatcaagaagttagaagataatctctggtggtcgattgtcagctcctgttgtgtcgatagaagtggcagaacttgttaaatgtgaggcaaaaaccgatgctggcatccatattctatcataaggatcatatgggaacctgaaaatgtgggaatttatgttagaaattcgctataaatttatgtttaggttttattcattttatatctttccttatcatgaaatcccgggactgatgaaagaaaataaaatagttaaattgatttttatttaccaaatgctagttggttgttccttgactttggatctatgtacggttagttttccaaatatagttaactctggtttaattcttgcatgaacaacatggtataaagcaaactggtaatcgctagagtaaaatcc

SEQ ID NO: 19895 - DNA, 575 bp, Arabidopsis thaliana
ctagtccgaccccaccacagtccccagagtgtgatattccccttcctgtgtccatgtgatctcattgttcaattcccacctatgagtgagaatatgcggtgtttggttttttgttcttgcgatagtttactgagaatgatggtttccaatttcatccatgtccctacaaaggacatgaactcatcattttttatggctgcatagtattccatggtgtatatgtgccacattttcttaatccagtctatcattgttggacatttgggttggttccaagtctttgctattgtgaatagtgccgcaataaacatacgtgtgcatgtgtctttatagcagctatgaaaccactatgagatatcatctcacaccagttagaatggcaatcattaaaaagtcaggaaacaacaggtgctggagaggatgtggagaaataggaacacttttacactgttggtgggactgtaaactagttcaaccattgtggaagtcagtgtggcgattcctcagggatctagaactagaaataccatttgacccagccatcccattactgggtatataccaaaggactataa

SEQ ID NO: 19896 - DNA, 551 bp, Arabidopsis thaliana
gggtaccgagctcgcatccggtattccagtgatacaaaatatcgcaaacacaattctcaatcaatgacgttagagcgagttttttcacaaattttgctaaagcaaacttaccatgaatgagctaacaaaagcatgggaatgagtaccacggaggggtatcccaaacagttttcccgctgcaacattactgcagtaataaacaaagcaagcaaaatgagaaaatcatatcctctcttcccttttgatgtttccataacaaaacaaaaatatcactagtaaagacataccttgttgcatcaaaacctccaaggtagcaatactttgatgcgcttattgcaccatcgggtccctataacaattgcatatcagagatgcaacaaacaaaacctcaacatctaaggctaaacatagaacaggttttgagagggaaacaaacctgagctcttctagcaccaaactcaagcagaagcttagatttcctgcaacaaaccgatgtcttgctgcatttgtagcaccaaagatgcgtaattgatgagattgaggaatggagt

SEQ ID NO: 19897 - DNA, 2591 bp, Arabidopsis thaliana
tctatgaatactaaccatttgaagaggtaaaaggaagagcaatgacattagctccagccttagtggttttgttggaaactaggatatcctcaagtctgttggtttgccatctagattttccaatagttggataggctcgcaccgtagcactcattaatcaggcaataatcaagaggaaatatagatcacgattcttaactaaactaaagaaaacattttttttttagggaaagaaaatgactcaataaattcaaaaacgaaaaataataagaattaaaaataaaaacataattagtaagacactcctccagacttaaacgacattgtcccctgttgcattcaaatccagagaaaacgggaaaaataaatcaaaaataaaagaaagtaaacgaaagggaaagaaaaatcaaaccaatgggttgtctcccactaagcgcttgtttttagtcaatagcttgacttggtggagttcaggatgtaggtggagtggtggaggattgctgctgcctgctcgccttccaagacacccagtggtgtgtcgatagacactcatctattcacctgcaagaacaacaggagaaacaagctttcgaagaactctaggcttgttatctagtgaagcagacttcaaagaagctaaagaattaatcgaaggtaaagcaagagaagagatagaagagaacttttcacataggtcctcaaatggtgtgggctgaagagattgtgtagaaccctctgtctgtgaatcccgagggtgtcgattgacaggagtggtggtgtcgatcgacaccgttgctctgcaactctcattggcgagttgagctgatgggagcgtcgtgtgaggctctttcaggggatttctgagtagtcagaggaggtgtgtctatgctagaggcaatactactaatatgcttattaagctctgaaccatccatgccaaactccatctccaaatcacaaacctttagagagattctacctctctacacatcaaacctagcaccagctgtagctaggaatgctctttcaagaataagaggatccttggattccttctcatagtccaggaccacgaaatcagcagggattatggagttaccaactttaacaggaacatcttcaagaattccttcagggattcgtttggaacgatccgcgaagaggagagtgattcgagtcggcctgtagtgagtcatgcctactctctcagcaacagacttaggcatgaggttgatacttgatcccagatcactcaaagagcggctgaacctacttgtggagataaagcaatcaagaacaaagctacctggatctggaaccttctcagtggtctggtctggagagatagtgtagatgtactcaacaatgtccactggttgtgccttctctttcttgaccttaggcagcatgatggcactgatgtcccgtgtcagcagcttagtgtcatcggaggtaataccattgtcaacaagtcgcttgacatacctattgagtggagtagaagatgtctcagaaacatccttagggagagaagtgaggatcttttccaagatggttatgcacttagcagcgtgaatctcctacttagaacgacacttcctcagataagggcaggaggagtgtaagcagactcggcctgcattgggacttgcacctcatatggtgcagtccggacctagtggcgatcaacacaagaggtgagtcaatcgacaccatcgtgtggaatcttctcagagaagattttttcatagggtgtcgatagacacatctctttgtcgttcgacaccatctctacaactacgagctccaactcgtcttcagtgtccaattcttcccacacatcatctccttctctgatcaagatggcattacagctcttccttgggttagcatcacggattaccaagaagaatgccctcttgtctcttaatggattatgtagtttgagcaacctatacatctagcttcttcaagtgagagctcaaattgtcgatcttcccattaagatctgtgtagacagcatcaaacttgccattaaactctacaacaagctttgttttgctctccagaatctgctcaagcatcgattccattcttgtctcttctaagggtggacggggggcttggtaagttgaattaccataattcctctgaaagttgctttgaggaaaggtcttctggaaagcaggctttgaagtgtagttggaggaaccctggttccctgtaaacatgttgccactgaagttgccttgtggctgcccaaactttctgtatccctgaccatctatgtagaagactccttcttctgactcaggctcaggctcaataatctcttcctcagctgcaaagtggacatgcttcttccctgtgagcaagttatgaactgaatctatcttagcgttcacctctgccatctgatttcctgaaatagctccggcaatcttcttcctctcaaaatcagcattcttggtactttgctgcaagcgaggttctctatcagggctgtagcatcagctgggtaacgtgtgttgaaattaccatttctcgctgcatctagagccatctggtatctccaatcaactcctctaaag

SEQ ID NO: 19898 - DNA, 415 bp, Arabidopsis thaliana
gttgacgatgacaactctgtcctatactttcgtcaatctctaatattagatcaaaacaactagaacagacaacatttagaagtaaaataaatgaattaaataaaattaccgaaatggcttatgtgttcaaatctgttacaacaaattcccaaaaattactcaaatcaattaacaaacaagagatctacagatcatcatcaaccagaaaaaaagatcatctagcggcggcttttatgtcgcacggagtaataactcaaataccatctgacaaacttcttcaaaccggtttgcaaatccgtagtcggtttataaccaagctcacgttgagctaaactaatattagcgatgagtacacggaacgtcaccgttacgtggcatcttaatcaaattcttcttcgccatcactttcaattgt

SEQ ID NO: 19899 - DNA, 1929 bp, Arabidopsis thaliana
ttcttttttcactacttctttcaagttgggatttaacctcctctgtggttcaatgctaaaataggattcgttttcaaggtggatcctatggttgcataaactaggtgaaattcccttaatgttagataatgaatagccaattgttctcctatactttttaagttcagataatagcaggttcacttcatcatcatttaactcagcattaatgatcacaaggtaagtagagtttggaccaaggaatgcgtaccttagacctttaggaagtggtttgagatcaaccttcggtgccttgagttcagaccagtcatcttaagttggaatgatcagctctccagagtcgctgacagtcgaggtcgagtcattggtcgagtatgttctcgagtgtgcaggttgaactcgtgttgacccttcttcgctcattaccattacctatgttggtggtccattcaattcctcagaaggttgtaattcttccattgctttatgggagtacagcttctggtatcccaaagtttccaaatgcagaaactcatcttcaccacttttggttaaagcactgttaaggtgatcttcttctgcaagctcttccagtaactcatcagctaactgatccatttcttcgatccaaaagagttgcccttccatagtaggcttcttcatcgcgtctttgacgtcaaaggtcatcttaaagtctttgccaaggtttagatcaatcttccctttcttgacatcaatcatagcttctgcagttgctaagaaaggcctccccagaatcaaagggtccttgggctcttcatccatcttcaagactacaaagtcagttggtatctctatggctctaatcctgattggtaggtttccgagtaaaccatgagggatccttactgacctgtctgctaggataagggatatattgcaggatatgtattgagtgaacctaatcttttggcaacagagagcggcatgagactgactaatgctcctaaatcacatagacatctgttgaaagccaatggacctaaaaagcatggtagactgaatgaaccaggatcactaagcttcttaggaatgatcttcttctgtatgatagcactgcatttatgactcaataccaccatcccttgcacttcttgaattctctccacgatcaagtctttcagaaacctgtgagagtctggtattagcgctggagcgtcaacaagaggtatctgcaactcaacttccttgatgttcttggcgaacatagctctatacttatctgctaatgctttcttgtgatggccaggaaatggaagttgtggtttgtattgaggaggaacaaagaccttttctttgttcttgacaacaactggttttggagcggatggtgatgctgctgggaagataggtcgtgaagcaaagtcgagtggttgctcgagaggttgctcgagtgtctggtcgagtggctgcccgagtagtttttcagctcgatctttaccgacactgaaatcctccccatcttgaccttcactgtcctcagtgactgtttttggttcctctcttgttggaagttcttttccactacgcaaagtgatagcatgagcatattcttttggattctaaattgctttgcctggaagttggcttatatattttggagcagatgaagatacagaatgtccttctaattatctgactttggtattcagtgtttccaccttgacattcagatcattgtagctacagtccagcttgttatgtaacttagatatcttctttgccatctccatggaccaaaggcttgcccgtgaagcagctattgtagcgtttgtttcatgtcaacatcaggagcaacaggacattggttttgaggaggtagaaatccaggtggtggttgctgctggtagttcccctgaaattgctgtttgagaacaaaaacttgattgt

SEQ ID NO: 19900 - DNA, 1260 bp, Arabidopsis thaliana
gaaaccagaaatctcatttctgagtcttgcagttctggcattggagaagaactttgatagaaaagccttcttgcaatcatctcaggtggtgattgagtcatggggcagattcttctcccagatgtgtgctttgtcgcccaaggagaatggaaacaaacggagcttgaatccgtcttcactgacaccattgatctttgttaggttgcagagcctatcgaattcatcaaggtggtcgagtggatcctccattggcaaaccatggaatttgttcccctgaatcatcgagatgagaccactcttaatctcgaagttgttgttctggatagcagcaggtgcaattcccttcctctaacggtgatcacgtggtgcatctccagcaccaatgttggaagggccgttttgttgattctgttcttcagccatatcgagtggttgctgaggtacagggttgactgtggttctcctttttctaagtttgcgggctgtgcggttgatgttgtcattgaaaaggaggttctggttgcctgttgatcgagttcgcatacagcagaggtgtacctggatcaagaagacaacaagaaaaacacacagttagcaatcgatttgaaaattgaaaaagaatttgatctaagcaagtctgaaatctcaaatgtaacaaacaaacacccaattggcaacgacaccaaattgataataggtttttaagatcaattaatcctaaagcactatcatgtcgttgtaatactgaaggttgtcaatccaaatgggtgtgatgctaacaatcaagatgtgatcagaagtcactaagtcaagccaagcattaacaggttttggtgtgttctagtagtactaagtgaacatgcagaaaacagaaaatcaaaaagaaacagtaaaacactcgaccaacacagctcattgcagagcgctgggtgaggtcgagtaacagacagtgaattaaacaaagatactcgactgcatagtctgttgcgagacaactgggtgattgagtatcaggtcgagtaacaagaaagaattgtagaaactaagcaacagatgacaagatgcggtaaacaaaagtaaagtaaacaataaattcaatcagataaagaattcccgaggatggggtaatttattagtttcgttttcctcagtttacgggtgattgacatgctcaataaattatccatagacaacaaattcattaaccaaatataagtgccacacaatagagccctcaagttaactagtccgggtacgagc

SEQ ID NO: 19901 - DNA, 2321 bp, Arabidopsis thaliana
tgccatcggataatatatcggctgagagttattatgaaatacagaagttggtttcgagtcttggattaccatcagaaatgattgatgtatgcattgattattgcatgattttctggggagatgatgtaaatctgcaggaatgtcggttttgcgggaagccgagatatcagactactggcggaaggacgggagtgccatataaacggatgtggtacttgccaataagtgatagattgaaacgcttatatcaatcagaaaaaactgcgacgaaaatgagatggcatgctcaacatacaactgcagaaggagaaataacgcacccatcagatgcaaaggcgtggaaacactttcaaacggtatatccttactttgctaacgagtgtaggaatgtgtatcttggcttatgtacagatggatttagtccattcgatttgtctgggcggcgacaatattctctttggcctgttatcttgaccccatacaatcttcctccagatatgtgtatgcaaagcgaatttctgttcttaactattttagtgcctgggccaaagcatccgaaacgagcgcttgatgtcttcttgcaaccgctgattcatgaactcaagaagttgtggtatgaaggtgttcatacgtttgattactcgagcaaacaaaatttcaatatgcgggtagtgctaatgtggacgattagtgacttcccggcatatggaatgttatcggggtggacaacgcatggaagattatcttgtccttactgtatgggtcgtacagatgcgtttcagctaaagagaggcagaaaaccatgttggtttgattgtcatcgtcggtttctttccctgcatcatccgtatcggaggaacaaaaaactttttaggaagaataaagtagttcgtcttcctccgccatcttatatttctggaactgatttgtttgaacagattgattattatggtgctcagaaaacctgcaaacgtgggggtaattggcacaccacggcgaatatgcctgatgaatatggaagttctcacaattggcacaaacaaagtatcttttggcaactcccatattggaaggatctcctcttgcgccataaccttgacgtgatgcacatctagaaaaacttttttgataatttcatgaatacgcttttgaatgtgcagggcaaaacaaaagatagtttgaaatcaagattggacttggcggaaatatgcagcagacctgagttgcatgttacacgagatggaaaattaccggtttcgaaatttcgcttgtctcctaatgaaaagaaggtgttgtccgagtgggttgttgctgaagtgaagttcccagatggatatatgtcaaaattttcaagatgcgtagagtaagcccaaaagttttctggtatgaagagtcatgattgtcatgtattcatgcaacgattactgccatttgtgttactagagttgctaccggcaaatattcatgaagcaattgcaggtaataaataaatatatatatacatattgtatgttttgttttactcaactataacttggtcattattaacttacattaattaaatacatgataggcatcagagtatttttcaaggacctatgtacaagaacactgacaacagataccatagaacaattagacaagaatatcccagtgttgctctgtaacttagagaaaatatttccccctgccttttttggtgtgatggaacatttgccaattcatctgccacatgaagctgctcttggtgggccagtacaattcagatggatgtatcattttgagcgattcatgaaatctcttaaaggaaaggcaaaaaatctggctagagttgagaggttgatagtcgcaggaagtttaaccgaggaaacgtctcacttcacatcgtattactttagtccaaacgttagaaccaaaaagactcatcctcgacgatatgacgatggaggtgttgcacctacatataacgttcctgatgttccagatagctttgcccaaataggtagacttgcagagaagtcgaaagaagtttggtgggatgaccatgcgatttctagagcagctcacaattacatactccgaaatgttgattacattaaaaaatttgagaggtacaaagccagacaaattttattcataattttttatatttaataattagtgtgatactaattaaggactaattaaagaagctaagcatctacattttaatttgtaggttgtttgattcacaaatccgtgaagcatatcctggattagaagataaagaatatgaaatttacaaagatcatgattttgccagatggttaaaattctatgta

SEQ ID NO: 19902 - DNA, 1511 bp, Arabidopsis thaliana
gactctacccgatccctcaggaacgaatggtataacttcctcataatgggaacgccgaacttcgactccgcactgctcggccaagcgaatcaatccaacagcataacgaattgccgcgacggtcagctgagaaagtgccatctttctcctggcgacgaatccaagcaagaatatcgggatgggaaacgacaagccgcactcagtgagaaacttctcgtagacgcacatataaccctccggagtcgtccaaggacgctcgtgcgtttccgggacccgagccactaaaccacgcggtgcgttacaaaagcgacgcttggtactcatggaagaagccgacgtcttggttggtcccagatagtcagccgagccgggcttagggccggatacaccaggaaatacaccaatctcatcagaaactgtcatctccttaacatcgtccccaaaacctcccccaaccgcagatcgaggttcgaagatcgcgatctcctcagaagctatggcttccttgaaatcctcatcaccaatttcctcatctgtaagccggggtttgaaagtggtggtcgccgcagcacctgtttcagcccggtcaactagaggagaagaaatgcggcgccgtagctcggccacaacagaagttcgcgaagacgacccagaggaagaatatcccgcctcgacaagatcgtcatcaagagattcggctcgaaaacggtcggctccagaacgctctgaagaaccgtccggggtgcgagatcgacgatggtcggagagagaactgatggaaatatctgacgacggcattacaaattacgagctcaaaatagagaaggggaagaagaaagtacctttggctgcgaagaatcctgagaaaactaagcgtgtttctcgcatttatagaggcgagaaaatgacctaggaaatcattgtgccgccgagtaggcgcaatgattacctacgcaccgcttcagcttccgaatccgcaagaaaccaagtgcacgaatcagaaggcacgttggatccacgcgctgcatcgaaaaggacgaagccacaggcgcgtcagtttcgctgatctgttaaatccgacgtccgcaaccgaacatcggattgggggacaactgttgatacatcaattgggcctcagtgatcaaccggcccatttcaaggaataacgacccagcccgaccatcactttagaactcgagccggcccagcaggccgaagcccagcctggtcaggatgtgagttcagctgcgtagaaaaggggggcactctcgggaattcaccttgcgtaccctactatacggacgggtataaataaggaatagaaagtctcgggagaagggacgtttttcgggacctggagaaaggatagcacaagtcagctcgcccggaagagccagctcatcgatacaagtcagctcgtcgagagaagtctgctcgtcgaagatcagccagctcgcccagaagagccagctcactagaaccaccagctcgaaacggcatcgcctcgtagc

SEQ ID NO: 19903 - DNA, 2545 bp, Arabidopsis thaliana
ataattggtcacacatcataaccagacgcatactaggatcaaaatagactcacactacttacacaactaagtttacacctaacattacacaatacactcgaactcttgttactaagcaaacacatcacaatatacttacactcttatcacttacacaactaaagcacacacttaacattacacattacacaatacactaacacacttacacaactaaaccagacacttagacaactaaaccagatacttacacaatatacttacactcttatcacttacacaataaacttacactcttatcacttagtaaaatgttgaaaccctagattcactagaggacaagagacttgaggcgatttgggcgaatgctcaaacttgaggatcgagtaatgagggtgctgcaaagtctaagcctttgtgtctatgctccgagtgatcaattggactccaaaccctttactagactaacaatttttgaatcccccttaagaactctaaactcttactctcttttttttttttttttttcttttcattctcattctcattcgcattcaatccatacacaatcctaatcccaaatacaagtctccacctagtcgtagctaacccaaaacgcgtgggctaggtctacatgaaagactgctcttgtcggctcatacctaacacgttataccaagctcaatcgaaaaagacctcacaatcacacacaaatgatctttggcttgaaataaggctaggctaagggtatgggaaactgatctaaaaatgagagtcagctacttagattaacagatggtggtgaagtgaataagataatccaagtatgtatatacggtagccatgagttcacaaaaaatgcaaagacatgataattgcatattcagttcaggttctaataaataggggatggcatcagataagcgagttttgaatcaaagcagtatagtcaagttgtaaatcaaagcagggtgcaatcttacttcagagatacaatcggttatgcaacagagaactaacaacctcggtattgaacttacttcattgaatcaaaacatgcttaacggtttgaaatcatcattatcccctatgcaaatgagcaatcctaaatgcaagcactctatatacaatcctaaaatgatatgcaatctacatgacactctgtttttgtgaaattattttctgaaattttttcaattttttaatgattttttctatgccttagatgatgcaaaaattgaaataagaaaagagaacacaatgttaaacatgtcttgaaccctcccccaaacttaaattacacagtcccttgtgtaataaaaatctgaaagagaattcaagaccaaaacacaatacacacaaaagaaaataaaaagatgctatggtatatacaatggttgaggtggtgttacctcagttgtcaggtgaagtagggggagacgaaatcatccatactctcctttgtgtaactccaaggaacgggttgtgctgaacttggattagctggatgttcaaccctttgctcgggttattgatcgagtggctcctcaagtggtgcagtagagtggcttgctctagcatctgatttccttgttcttctttgcgttttcaagttgctcctcttttccttttctctaggttcgaggatgattgccttggtggtgaaggtgcagcatggtgttccctcggctcatatgaagactatcttggtggtgaaggcggaccgaaatgcataggttcgtgacgagtggatccgcttctcccaaaaggcatgttctgtggcattgccgtagttgatgaagagcagatgatcttgagttggagattattaaacttcttgttgagtgccgcgagagccttgtcgtggaacttacaccagctttggaggaaaccaaggcgcttagtaatttcctttgagtatttactttgcctcggtgcggagtactcctcaaagtaaaactattgtgttgcgtaagacacgtccataggttctgcctcattatctgaatgatgaattggggtctcatcatcattcactccttccatcgctacatcttcatcacctgaagtatagaggttctccactggtgggcaaaactcaatgttgccaccatctctgatcgaagtggaagcgggatttgggaggagaaaaatagattgtcctgctatggggtgatcgaacctatacttatataggccattcttctgctgcgaccaaaaactcttggaattgataaggtgttgcatatcaatccatctcggaggaatcggctttgaatgtagaggtacattgcatgctctcaaaattggggtcacaactcctcccacaaccattcctctctcttgcaaatagtgcactggctaaagacctatgaaagtatctaaccaccagactccttatctcgttgctcttggtcctagaggatgaaaccccatgtttagacccaagcgtggccaataatgactaaagctctttcttgtcaaaacgatgactcgtgtcttttctgcttggaaatccatacatcagctcgagatgctcgattgg

SEQ ID NO: 19904 - DNA, 2669 bp, Arabidopsis thaliana
tcgagagtgaagaagttccaaagggtttctccctcgatgacaatcttaaagaattcgccaaattcagcagtaggaagggtaggtgcgatgaaagctgcgaagtggaaaatagaagatggtcagataaggcaagaaataaaatgaagttcatatgcatgacctaataactaccgggcttagtgttccacttcgaggggagcaagtctaggaggtttccgatcgaggcagggctctttttaactaagaaccacgggtgatgccaattctcatctttgttcggaaggtgcgagatgagatttctattggcgttcggataagccgagaagtatccgactttcttcgaagaactcctcacactgagaagttcgttcagtttgggaaccccgatggcgtatccgcttcagccgcaatagtaataattcccagaatagtccggaggaggttggaagttagctggggtaaggcgatttcaagggccaacaagtaacgaacgagggcttcggggagaggaaaagtcaagccacaccctttgaagtaaatctcgtacacgcagaagaacccgggacggtgttcatccggtgattcggtaggctccggcatctgaaaatccttcattacttcgaccagaatctgacagagctctcccaatcgattaagagattagaaggtgcatgtggattgatagtggggaccggcgatgtcatttggccgggtgcagaggtcgttactagagccggcgttgtcaaaagagggggattcaggtctttcaatttcggaattcatcgtgtagagaataagaagattgaaggtttgtagagagagaagaactttgctttcagagagaagcgtaaaaaataaaatgacaaggaaagagtaaagtgaatttacctatacgcgaaccagtgatgatgacggaaccgccttgggagtcgtggaggaagtggaagagtttctccgctttaatagtaaataaacaatatacggtcataattgcgacaagtctcacatgagtaattataggaaattctgagattaactcaattgcgcaacttaggcgggaaatcagaagaatcatttggcgcaatctttgcccttatagcattaaagccttccaaactggagtaatacttcgaaagacttggggggctaattgttggtgtcggatcccgcaccatgggctcggatccggcaaaacattgctacgtgggtaaaggaagcccataagagagaaggcccacaagcgtcttcgaggtgagagtagggatgaggtgctgacctgcgaagtgagtgtagcatcaaagtcaagactacccgaattgaggaggccgaatgggccgaaagtgaagtcaagaaggtccggagtggattcaaattcaaaggttcaaataatttattcgaagactagaaacgtatgcatttaagatagaatgattgtgattaaataagaattaaatgtattctttgggtatatattgtgagtcaaagaccatgtaaagatacacgcattttcttggtgcaaattagctatacacattcttttacaatactcatagttttctctataatcatctatctattttctattatatttgtcctcaagaataatcctacccactaaataaataaatacttgagtgtgtgaatccgacatccacagtgatcacgtggtgcatctccagcaccaatgttggaagggccattttgttgattctgttcgtcagccatttcgagtggttgttggggaacaaggttgactgtgtttctcctttctctgagtttgccagctatgcggtcgatgttgtcgttgaaaaggaggttctgattacctgttgatcgagtttgcatacaacagaggtgtacctggatcaagaagacaacaagaaaaacacacagttagcaaccgaattgaaaattgagaaagaacttgatataagcaagtctgaaatctcaaatgtaacaaacaaacactcaattggcaacggcaccaaattgataataggtttttaagatcaattcatcctaaagaactatcatatcgttcaatccaaataggtgtgatgctaacaatcaagatgtgatcagaagtcactaagtcaagccaaacaataacaggttttggtgtgttctagcagttcgaagagaacatgcagaaaacagaaattcaagcagaaacaataaaacactcgaccaacacagctcgttgcagagcactgggtgtggtcgagtgacaggtcgagtaacagacagaaaatgaaacagggatactcgactgcaaagtctgttgccagacaactgggtggtcgagtattaggtcgagtaacagtaaagaattgcagaaactaaacaacaggtaacaagatgcagtaaacaacagtagagtaaacaaagaaatcaattagataaagaattcccgaggatggggtaattgagtacttttatttcctcagtttataggtgattgacatgctcaataaattatccctatacaacaagttcggtaaccaaatataagtgccaccgcaacagagaccctcaagttaaactagtcccagactcaatcaccattgacgagagtttacctaacaggcattacgaatcaacaagttaaagccaaaacgctctctgcaaccaataccttggtacaaagccacaaatctctggaattagtg

SEQ ID NO: 19905 - DNA, 1710 bp, Arabidopsis thaliana
tcgccgaattcgtcttcttgtttttcttcttcggaaccgtatgtgattatgtcttctaactctctattttgtaggtcaatgtggataacatcttctgttgttatgtctggaatggaaacttctctaatgctttcttgttgcatcacaacatcatcaactaaaccgactatacggcccctgggattcactttaataaggataaccacacttcacgctgtgaccttacacgcgggtaagatagaaagcttacttgtcttgcttgtgatgctaggataaatggttcgaacttggaataagtcttgtttgcattgacatcgaccacgcctaagttatttttccgtaccccacgatcgatcaccggatcaaaccaatcacacttgaaaatgacgcatttcaaattcaaaagtcctggatattcgacttctagaatttgctgtataatcccataaaactcagtttcaccttcgacatggattccataatttgcagttgcccttcgacttccatatggatatgtatggaaagtatagccgcgagtgaagtacatcgaagctgttgtgatcttagatcttggttcttgaacgagctcatgcaaccaaagttgtaatggttcgtttccacatccgttcgtaacctacacatagaaaatattaagtttatcatttttttaaagtaaataagtaatcgaatattcgaaatattattatacttacatagtattttaaccatccagcaaaatcacgatctttgtaagtttcatactctttttcttctaattcaggacatgcttcacggatttgtgaatcaaataacctacaaattacaacgtagctgcttaattagcttccttaattaatttcacactaattattaactataaaaattatgaataaaactaggttgctttatacctttcaaatttttgaatgtaatcaacatttcagagtatgtaattgtgagctgctcgagaaagcgcatggtcgtcccaccaaacttctttcaacttccctgcgagtctacctatttgggcaaaggtatctgtaacatcgggaacgttatatgtaggtgcaacacctccatcatcatagcgtcgaggacgagtctttttggttctaacgcttggactaaagtaatacgacgtgaagtgagacgtttcctcggttaaacttcctgcgactatcgacccctcaactctagcaagattttttgcctttcctttaagagatttcatgaattgctcaaaaagatacatccatctgaattgtactggcccaccaagagcaacttcatgtagaagatgaattggcaaatgttccatcacgtcaaaaaagacagggagaaataatttctccaagttacagagcaacactgggatattcttgtctaattgttctatggtatatgttgtcagtgttcttgtacataggtccttgaaaaatactccgatgcctattatgtatttaattaatgtaagttaataatgaccaagtaataattgagtaaaaaaacatatagtatatatatatatatatatgtggtaaatatatatatatatatattacctgcaattgcctcatgaatatttgtcggtagcaactctactaatacaaatggcaataatcgttgcatgaatacgtggcaatcatgacttttcataccagaaaacttttggccttgctctacgcatcttgaaaattttgacacatatcg

SEQ ID NO: 19906 - DNA, 1878 bp, Arabidopsis thaliana
tgttgaccgagttcgcatacagtagagtgtgtacctaaatcaagaagacaacaagaaaaacacaataagtaactgaaaagaaaattgaaaaagaacttgatctaagcaagtctgaaatcttaaatgtaacaaacaaacacccaattggcaacggcgccaaattgataataggtttttagtcaattatcctaaaacaccaatcatgtcattgtagtattttaggttgtcaatccaaatgggtgtgatgcttacaatcaagatgtgatcagaagtcactaagtcaagccaagcataacaggttttggtgtgttccagcagtcctaagtgaacatgcagaaaacagaaaatcaaacagaaacagtaaaacactcgaccaacacagctctttgcagagttctgggggaggtcgagtgacaggtcgagtaacagacaggaaatgaaacagggatactcgactgcacagtctgttgccagacaactgggtggtcgagtatcagatcgagtaacagtaaagaattgcagaaactaagcaacagatgacaatatgcagtaaacagtagtagagtaaacaataaaatcaatcagataaagaattcctaaggatgggataattgagtagtttcgtttcctcagtttacaggtgattgacatgctcaataaattaaccctagacaacaagttcattaaccaaatctaagtgccaccgcaacagagactctcaagttaacctagtcacagactcaatcaccattgacgagagctaacctaacatgcattatgaatcaaaaagttaaagccaaaacgctccctgcaaccaataccttggtacagggtcacgaatctctggaattagtggttcagacatttcatcgaacaccttttgggcgcggaaatgtctgggctcaaatttcagttgatcacaaagcaataggcattaagaacaactaatccagaagggatctatcaaccaatactcaatcacctagcatactgagaattctacactactctaactcatcctcagaaacctattcactactcagacatcataacagtaagcataaacgttgaacaagttgaaaacatggtaacaacagtgtaacagcaggatgataacagaatgaacaatagtaaacgaaattaagaacaaaagctgaatactgaatactgaatagataaagagaaatccggattacaaaaggtatagaacacaaggtctgctgaataaaactagataaaaacttgtctgcgaaaatgtgaagtacatgctacttatagccaaatattccgaaaccctaatacttaaaacgacgaagtactaggacggagtaagaactgtactcgacccatgtggtcgagtgggaggtcgagtgaatagctggagtcttcttttcttccttgtgctcgagtgtctgggtgagtgcggaatgaagaaggctctgaagcttgtcatcgagtatgcaatcgagtggtggtgatggtgatactcgacttccaggtggagtgatgaggtcgagtagtggtctggcaatgaaggtgaagacactcggcctcggggtcgagtgatgtgatcgagtgatggttaggtgatgggatgaagacacatgagctcgaggtcaagtgatgtggtcaagtagtgatgtcctctactcgaccagggggtcgagtgatctgttgagatcttgaagctcctactcgacctcggggtcgagtggtttgacatgatcaggtctgcttcttcgaggtagctcgtcaacagctccaaatcacctgaaatcaacgcaaatatgcaacatgcatgcaaatctatcctaaacatgtaaagtgatgacaaatgatgagaaatggtataaaatagtgatgacaaatggatgctca

SEQ ID NO: 19907 - DNA, 610 bp, Arabidopsis thaliana columbia
taactaaaccaatccaaatagaaacaaacattagagaaatgattaaaaaaaggtcataaataacacatatgagttggattattaatgttaattgattgatttaatctggaaacctactgtcttgcttcgcgtgaacactacgcgcctcccaaaaacaaagatgccaaaacaagaaacaacctgcggacctcaaatctcataacccacgcgccgatatcacgcgccgaaccagcgcactgtagtgtgaaatatccacagttttaaatttcgtcttctctctctctcaaactatttctctcaccttcctccgacgatttctcctttgacagttcagtcttatctctcgcaaggatcggagatatagagagatacatagaaccgtctcgtagctctcttccgccgtcaatttgaggtttccggggagagaattgtagaaatgaaggaataattggagaagattattatcacctcgctggagattctattttgttgaagtgtgattgattattaggggttttggttgtgaagagaaaatgccaggtcatagatccaagtcggagaagaaggatgctgataagcactccgtcgggatcgttatgaggttttagga

SEQ ID NO: 19908 - DNA, 590 bp, Arabidopsis thaliana columbia
  unsure (1)..(590): unsure at all n locations
ctcgcaaatggactgtttgcagcgagtaatatcattttctttcgtaaacatttaaccgaaattgcctatttgggtctagttactaaatttgtttcgttttattgtgatgacagtgtgctggattacgaagtacttgatgtggaagtaccaacgataaatatcgtaggaagtcttgttaaagctggtgttccagtttttgtgtacaggtaaagcaatgttcataacagagttgtgaacttctgttaaactaggcttgacgtgtctgtttaaaacataacagtggagatcaagactctgtgattccgttaaccggaagtagaacattagtgaagcgactggctgaagagttgggactaagaacaaccgtgccttatcgagtttggttcgcaggacaacaggtgagcatcatgactctaaaatttaagggtgctcaattcttggtgattgatgtttttcgaatctactgttgatatgtttcggttcggatacagatttttgaatatttaagagacgtggtaataaaggtttggtgttacaggttggtgggtggctcaagtttatgggacacattggcgtntgcactgtgagag

SEQ ID NO: 19909 - DNA, 1533 bp, Arabidopsis thaliana
ccttctgactcatcacacagtccactgtgtggataaacttggaagagagtacccaggacaaatccattcacagaaacaaaataaagaacaaatcacaagagatgatataatacaatggtgaagtgaggcgcttacctcagtcgaagaatgaacgaagtcggtcgtcaatggctgcttgtgattgctccctggccatagacgaaccgccctgttccgtatcagctccagtaggtgggtactcgacctcctcagctctgtggcggccatcaccgctctgaggatactcgacctctcttcttcatgtaaactacgagaatgcagaagtcgtctacccttgttgttagattgagtgagtgtggtcctcctcttcctcccagattcatgaggctcgaatgatgaatgcctcgcagggacatgcagaatctcctgctctctaggctcaggtttgcgccgaattggctcgggcgcgtcatatctcctcgaaggcatgtcctgagggagctgtccctgtggaatagctgtagtggaagtggagcagctgatcttatccttcagaaacttgatagccctgaggcacttggcgagaaacttatcctgtttcttgcaccacttctgcagcttgatgttattcctgtgagcttcgctcaaactcttgctttccctcgctggaagtatatgctcactgaaatgatacatgctcgtgtcaaactccgcctaatctatgtcatctgtctcatcaacatcttctgttatagctcttcggtgtgactaatctcctcagttggcagactgccctcgaaataaagatcttcaagcgcaggcttgaagtcaatgttcctgccctcaagaatcctagtagcatcaatgtaggggagaagaatgttggcgattctaatcgatgaatgctcgaacctgtagcggtgaaagtcgctagccatgtcaaactccaagaactcacatcggcgcaagtgatccaagtccatcattctcggtgctaaccctggttccttaagcggtactccacaagcttccagaattggcgtcacaacgccatccatgcatagtgctcctgtcaccttattcttgtcgttcgtcaacgcccacttcctatatccacacaggtggatcaacagaggcatgactagtggtgcgttgttgagatcgcctctcaagacattctttccctttgtacagcagagaatccctgtaagcgcggaatctatcatctccatgtccgtgttagacacggtgcatgtagactccctagagtaaaaaacgttggcaaccgagcggtgaaagtagcggatcacaggactccggatttggttgcttttggaccgcgccaagtttagcggtaaattattcccaatagtagcccacaaatccttaagctcttccctgtcaaacctggttttggttccctttccactagggaaacaaaacagttcttccaacttcttgatcgaaagctgataccactgttcatccattgagaacgtcaagaacctatacctaaacctaaacctaaaccta

SEQ ID NO: 19910 - DNA, 568 bp, Arabidopsis thaliana columbia
catcaaaccataattaaatctagatgtaggaatcaaccatcaccttttgcggacgagttgtataatggaccaggaagcccgtttatcgtgtaagcatcagagacattgggaccacctcctgtttgggttgcttggcggatgattgcctcagtgtctgcgttgaaccactcccctgaaatttaaccataaaaatcagtaattatgtttctaaactctcatcagattctctgtctgtttctgttcctcatcatccttaccaaagatcatgggaacttctttgtgaggtttagcaaacgggtaaggaactccgcgtttgggaaggatgataagtggaccatagactgttgatcttagccatgaaatgtgagcatggtaccacagagtgcctcgttgaccaacaatggtatagttgtaaacatagctttgtcctgtctgaataggacattgggttatataggctggaccatcagcccaaccacttcgtaattgccggatccatgcctgagatttcacggattaaaccagctgtcagtcacaaacattgctcttaatgtatagtgcaagtggt

SEQ ID NO: 19911 - DNA, 497 bp, Arabidopsis thaliana columbia
cagtgtgctctaaagctcaacaatcatcgcttcactggctcccttttgtgggccaaagatgcgcgatgcgcgattatcgcccaccagcggattggtgacatcacaagcgacgcgaatgacgcaatcttttaagcgcggatcgaggccggaaatatcaatatcattcagagtattaagactaccgccgccaaaaccagtttcattgccgttggcgtcgcataatttcgcccccagcgcctgtaccatgcctgcgccgccatcatttgtagcgctgccgccaatgccgataataatgtttgtcgcaccgctctccagcgcctgcaggattaactcgcctgtgccgcgtgaagtggtcacgagtggatcgcgtttttccgcaggtaccagctccagcccactggccgccgccatttctgtaaacgcggttttgccatcgccggagatccccaactggcattcactttctcgcacagcgggcctgtaacccaggcgtgacg

SEQ ID NO: 19912 - DNA, 582 bp, Arabidopsis thaliana columbia
atcgtaggcagataacaacatgggaagcggtgggaacgaacaaagaatcaccgaaaaatatcaaggcaaagagtttcaaatttcgtgaattagcaaccgctacaaatagtttcaggcaagagttcttgatcggagaaggagggtttgggagggtttacaaaggaaagatggagaagacaggacaggtaaaaataaagtaagaaaacgagagagagtttctctattaatcaatggctttggtcttatttgtttgttgaaattatgactttaggtggtagctgtgaagcaacttgaccgtaatggattacaagggaatagagagtttctggtagagatcttcaggttaagtcttcttcatcatcccaaccttgccaatctcattggatattgccttgatggagaccagagacttcttgttcacgagttcatgcctcttggttcccttgaagatcatctcctaggtatattcctaaaattaacactttcttttgtccgcttttatttttaggtcaaaattgttggattgagccggatagttttattttactcaaaacttaaaactattaactgtttttggtttta

SEQ ID NO: 19913 - DNA, 578 bp, Arabidopsis thaliana columbia
taaaaagtttcttgcatattgctcatgctagacttgtgtaattaggaatacaagtaaatgtgatacctcagcgtaataactgaatgccagctttgaaatcagcagaacgatccaaaacattgtgtacctagaagtcattttgtgcatcatcgttaagcagtgctgaaaaaaacaacctacattcgaacctataagttttagggtccttacttgaaaagtgacaaagcgctctcatgcataccccttcctatatacagacgaggctgtatcacaaagaaccatgataagaccatcttttcactttaacattcatggactagcatttttcaagatataagcacatgaataaactacctgagaccaccacatcatcagcatcattatcttatagtcagacctttcaagatagcgccgaatgaatggaaacaaaaacagcaacgcagaaagcatgttcggggataagtagataagaattgccactatgaaaagagaaggtgaattatggctgtgtccccaaaccaattctttatggtctgagaaaaccggagcgtttttcagctgtcgcataagtactgcat

SEQ ID NO: 19914 - DNA, 447 bp, Arabidopsis thaliana columbia
tcggagctcttataaaggtactttaactagcttcaacattttcgactgtgattaagtgagcttcaattaacttaacaattttttcgagttatgctcttgtagcttacttttccatataactgggactggaaaacatcattgttgcttggaggacttttaggagctaccgaccccgtggctgttgttgctttgctaaaggagcttggtgctagtaagaagatgaccacgttaattgatggggaatctctcatgaacgatgggtaaccatgtcaaactcttatgtttagcatcaaggtgatgttatgtcatatatgatcaagcttagttgtttggattattcagggtatcggttgtggctctcaattattcttcaagatggtgatggggcataactctgattggggttcataatcagattcattgtccaaaactcattcggagcgtatg

SEQ ID NO: 19915 - DNA, 560 bp, Arabidopsis thaliana columbia
ctgctcagcattgctacaagagagtacaaattaggaaatactgttcaatagcaaacgctgtatgagaaaagaataagagaataagacctcaagccaatcttctgcagcttcctcctgtccatcttttgtaattctctgtttgaacaagccatacttgtatctaagtccataaccccaagccggataattcaaagttgccatggaatccaaaaaacacgaggcaagtctcccgagtccaccattcccaagtgcaggatctggctcctacaaaatggaagtgaagtatctagcatctcagtacatataaagaagataacagctctgtaaaaccaaacaatagactcgcaaagacgatcatctctaagacgtctgttagtaataaacatcggttaatgcataataatcaacatggttaacaactcacctgactagccacgctttccaaatcaaaaccaagcctcttcaaagcatcaccataagcgctattaagcccaaggttaccacggcattcgataaggctctacctacaatgtaaaatagttagatacaaccaagacaaa

SEQ ID NO: 19916 - DNA, 920 bp, Arabidopsis thaliana
gaaacctttgacaagatcgggtctgtggaactatgagagcaagtggcggtggtggtagctcttcaagggacgatgaccacggcggttctggtcgaaccaagatcaatttcgaacgcagtgatccggcgttaaaagtctggacagtgagtgagctcagtaactgatctttgatgtcaatatataacttgttattctggatctgttaaaacagtttgctttggattatcagtatttatgttgttgtgagtctcttaaactactcgaatacaatctttcagcttcataatatcagatcttttgagcttattttagtttctttttcactgttacaactttgtgtacttaagaatcttagttttgaatcaggacaacaacaaaaaagacacatgttcttctctggtcttatctccaagcttcatgttcatggtactaagagaacaaatcacttcacgatctttcaccgtttgaatcatttcgtcactacatcatcttcctcggttacgcctctttcgcctcaagatcgaaacaaactcttagctactctgttatcaaactgcactagcctagctcgtgttcgtcggatccatggtgacatcttccgttcacgaatcctcgatcaatatccgatcgctttcttatggaacaacatcatgcgatcttacattcgccatgagtctcctctcgatgcaattcaagtatatctcggtatggtgagatcgactgttttacccgatcgatattctcttccgattgtaatcaaagcagccgttcaaattcatgattttacgttgggaaaggagcttcattccgtcgccgttaggttagggttcgtcggagatgagttctgcgagagtgggtcattacattgtattgtaaacaggggaatttagaacgccgtaagtgtcgatgaaatctgagag

SEQ ID NO: 19917 - DNA, 1741 bp, Arabidopsis thaliana
tacttataattgtcgtatcaaaataaatttattacgagacaacttataagcagaaaacgattaatttgaacaaattgcatgcatattcgtaaatgaggatctaattaattgaagtaattttgataattttttgctttgactcaaagtaattataatattcatagaacgtaccagtagtcgtatgatcatgttgcttcatgagaactccattgacggccaagcagtttccaatcaaatccgacaagttcttgttggatatcaccggcatgacgaaatccgagacgttaagatcctcggatccggaacggcacgtctcgatgttggtctgagccgtgctgagccacgtttgtgcgtcgaagtccgtacatttgacatcactcgaagccgccgggttaagtcccttgagcgttcggttcagctgagccacattgttttggaagagatttacgcagtctgaccaagcggctttcctttggttgttggtgcagctcggtccaaacttaacggtttgactgtgtgtgatcacggcttggtcaagtgctaccttgaccagcatccgtaagaactcggaccggaaccttggtggtcgtaggttaatgttgttttgtgagctcttccggaagtagtaattgcatgtctcagcgtgtggagtcttgttgcaccaccatgtcatgtccccggagacagagccgttgttgatcggagatggcgcacactcggtccaggagatggcggtgaggttgtagagggactcgaggtgggggttggggatggtgccgtttctggtggtggggaaacattatggtcccacggaggaggagcatcggtaccaccggtgaagccactatcatgtacggcggaggagaacggtagaagaagaaatgaggccaagaggcaaatgtgaaagatgcctctaagcatttttttgaagttcttgggtatgagtttgtatggggaattgagaagtttcttggtgtgatgtcttaactaattaccagggaatttagttttgtatattaaattagttaataattgttttctagaattattattttgagtttgtgtgtatgtactttgcaagtgattgttattgaggggagaacatgatgatgtgtgttgtctttgcttgggattgtattcatatgatatcatgacttacattcttatttagcaacctatgattataaaatcatataatatcaaacacctatataaaggtctataattgattccattacatatttaaaaagtattaagaaagaaatgtcaaaatgaaagaaaagaagaggaaaagtgacttgaaaggaagaagaagaaagatgtgtttttccaatgttaaagtaaccttccatgtgcttttagctcagtttctactcttgtagtttcaagcatacgcaaactcttacaacaatccttgtttatgttactatgatgattatatgatacatattttaatatttgtgttatgtaactcttttaagagttttacttttatgttgagtattttctgacgttgtcaccagctagtgtcttcgtgaccacctagtgtctgttcttctcgaaaagttgcgaccacctagtgtcttctttacgaaaggtgttcctataagccttggaattttcactgatccggaccaaatcgaattggattcttgaatatgttggattggtttaaaaccgaacaaagcaaataaaaactctaccggttaccatttaaaatactcagtatgagttaatgtga

SEQ ID NO: 19918 - DNA, 564 bp, Arabidopsis thaliana columbia
tgacgttctaagcaagatccgtttgtaaatccgagttctcctagagatcttgtgttctcgtccgatatttagcttccgctctctatcaacaaccgtaagagaaaaaaagtgatcaacaaccatggaatatggagaagaaccctcgattaaaagatttctaatgcttcctgatgatttggtatttaactgcttagctcgcgtctcaagattacattatccaactctctcattagtctccaaaaaatttcgctttcttcttgcttcaaaggagctttaccaaacccgaatcctcttaggcggaacggagagttgtctttacgtgtgcgtacgactccataccgattctgaacaactacattggttcattatctaccagggaccaaatagctccaaaaaagttttggtcccgatttcatctcccaattttacttccgcagccctgccgggttttgtagtggtcggtcatgagatatatgccattggcggtggatcagagaataaaaacgcttcgataaatgcaactggatcaaagcattataacgctttgtctagcgttatggttat

SEQ ID NO: 19919 - DNA, 582 bp, Arabidopsis thaliana columbia
  unsure (1)..(582): unsure at all n locations
nnnnnnnnnnnnnnnnnnnnnnctaaaggcctgccttgctcatcgttcgcttcctcatattcttcctgtgccagtcctaaagatagtccagccaggcggaaaatgaggcagcttatagcgccagaaccgccgtattcagcgtttctatcggtgccgggcgtgaaagaaaccagccttgtgcggcgaatgcgggcgagttctgaacatcacgccactcttccggcgtttctacgctctcgacaatcaccccgcgacaatagcgattcattagatgtaaaagctgagaaaagagtgtgcgtccttccggcgactgacgcagcatcacaaacagttctcgcgcgattttgatgtagtcataacgcacttcacttagcgcagagaaatttgccatcccggtaccaaaatcatccagccacagcgggccaaattcacacatcgaggcaaaggttgaatctttcggcagacggatatgctccaccagttcgaaacgcagccagggaagacgctcaatctggcgcaggatttttggttgctgacgcagggcgatgagcgtagggccatcaatattgaccgatgccagca

SEQ ID NO: 19920 - DNA, 609 bp, Arabidopsis thaliana columbia
ttttgtttttctgtgtgtatagtgattgcgggaatggagagatatgcattcaaaggagttgcatcaaacttagtgacatatctaacagatgtagtgaagatgagtaattcaagagcagccaaaactgttaacacttgggctggtttcacttctatgttgcctctcttctctgctcctttggctgatacttattgggacagattcttcaccatccttgcttcttcttccgtctactttgtggtaagtagaatcaagtgttaactaagtgctgaaactctcctccaccgtcagacaataacggtcaggcggtgagggaatgttgcttttatttatcttattttataatcgcgttgttaatagaattggttatattttgataatgttttggccttctattagatgtctatgtatatgcttgattaagcagtcattaagtgataaactgataatgggtattaacttgtgcaagaaaaactggtttagacgatatatctaaggaagttataagttaggtgttgggtcattttccgagttaaggaatagatcaagtagaccatcttaaagagtctttaagaaattagatacttggtcaccgtccgattagaaatt

SEQ ID NO: 19921 - DNA, 401 bp, Arabidopsis thaliana columbia
tgatggtctaggtgctgtcttctaccagtatccatttaatgtcccgccctactatgctttgattttgaggtcgcttactgtgcttgaaggtttggcactctacgcagatcctaatttcaaagtactagctgcttcatacccatattttgccaaaaggcttctcactgatccaaacccgtatctaagagatgcccttatcgagctactattcaaagacggaaaatttaggtggaatagactcgagaaccttctacaacagggaagttaagatagagacttctcagcaaaggatgctctacaaccagtcttgaagcttttgctggatccaaatggcgaagaacttcgattgtgagtaattagtgaagctgtacgagtcagtggagcaattgcgctgggcactg

SEQ ID NO: 19922 - DNA, 848 bp, Arabidopsis thaliana
taaaccaagtacacaaggattttatcatgggattatcgtgtttgaagactaaaaagagcacaccatcacccccattagtgcaggtagagtaagacagtaacttttgggttcatattaccgagcaagaaccgttatttgtgattagacatgttataaaccactgctttagtgactatttaaaacaatatattacatgtcgtaatcatgcaacctaactatgttttcattaatcaaatacaaagaataaagagaaaagtgcgtagattcaattatttggcatagactcagaagagtgtatatatatctgacttttattaaattattaaacacaaatacatattttcataagcaaaactataaaagccctaaacatataacgattacctcaaaggaaaaagtcgttttctcctaattaaaagataggttacttcctaattaatatataatttatgtgaacttcacaatatacagttcaataaaatttggtaatttgaccgatttaaggagagtggaaattagggcttctgcaatcttttttcttcgccgcaatctcatgtccaattatccaccgacggtggcggcgcaacccacaacgacggcgaatccactgctgcagcgacatcaatctgaacagcgacgaagagaattaccgaagattgtcgaaacagagtctacaagtatggacattacgatcggtcaatctaagcagcctcaatttttgaaatccatagacgaattagctgcgttttcagttgcagtggaaacattcaaacgccaattcgatgatcttcagaagcacatcgagtcaatcgaaaacgcaattgatccagactcgagagtacggcgtt

SEQ ID NO: 19923 - DNA, 473 bp, Arabidopsis thaliana
tagatatttgccttgtcctccttctttaaaaatattaagctctctctgaactcttagtctagtatcagaatcagttttggaagaaaaggtaatagaggacttctctttgtttatttgctgaccagatgcaagctcatattgatgcaggatctgcttcagtttaggacagcttttgggatcagagcggcagaaaaacatggtgtcatcagcaaataaaagatggttaactcggggactttgtttggatactcgtaatccaaccaaacttccatgagagagagccacattgcataacccggagagaacctcactgcagatgataaagagatagggtgagagagggtctccctgcctaatgcctctttcaggtaaaactaaccccttagcttgaccattaaagagaaaggaataggataccgtgcaaacacattgcatgatccaagatatccattgagtatgaaacccattctaga

SEQ ID NO: 19924 - DNA, 584 bp, Arabidopsis thaliana columbia
cgccttgagcaatagcttctccggtccattaccgatccatctctctcagttagagaatctcaaggtactgaatctcgctgggagttacttcactggctcgattccgagtcagtacggatctttcaagaatcttgagtttcttcatcttggtgggaatttactaagtggtcacatacctcaagagcttgggaatctcacaactttgactcacatggagattggatataactcatatgaaggagtaatcccttgggaaataggttacatgagtgagctcaagtacctcgacattgctggagctaatctctctggcttcttaccaaagcatttcagcaatctcacaaagcttgaatctttgtttctctttaggaaccatctttctagagaaatcccatgggagcttggagaaattacttctcttgttaacttagacctctcagacaaccatatctctggaaccataccagagagtttttcaggtttgaagaatctcaggcttttgaatcttatgttcaatgaaatgagtgggactcccctgaagtaattgctcagctacttctttggatatctcttcatatggacaa

SEQ ID NO: 19925 - DNA, 540 bp, Arabidopsis thaliana
ggaccagctagtaaaaagaaggaaacatgaaatctcatatgttaaggatgattgaacaaatgacttgtgctgttttcgcagaatcagatgctttgctgcttgtactcataaatcttgtttgattttgaaaactgatccgtgggcagtttacttctcccaatgtaggttttggcagatagtgtcaggttaccttgtaggttggtaaaaggtagccactacacaggcaatgaggatgatgctgtgaacacgataagactggaagatgaaaggtgtttttgtttatctttttcactatgattccattattttcttttttctttttacgaaaatgtaacatatctccccttctttcagagagtacttggttgatcttatgacagatcctgggacgcttatacccgctgattttgcaagtgctagtaataacaccgttgagccatgtaactcaaatggaaacaaatttcctacagctcagttttcaaatgacgtgccaaagctctcagaaggtgaaggaagtagtcacagttctatggccaacta

SEQ ID NO: 19926 - DNA, 901 bp, Arabidopsis thaliana
tgaaaatcgtatgggtgacacatcattacacaaaaaatgacatgtgtcatttaatattgattgaattaaaaatcagcaatcattaacacatgcatgaatctcctgctagcccatatcaaaagatttcaaaaactttttcacctcatacagtgatgagtgtagcacattatcctctaatagcatctccggcaatgtctctagaagatcgttgtgactcttgtcagaccagccatttttggtcttcagtgtaaacagagacataatcgcggacagcttgctatggttaaaacagcttggatatagaggtgtctcagcatctgcaagctttgcaaggaactcgtcttctttcttgtcgtcacgctctacaatctcgcccaagtgaaccataccagcaaactcttcgtccaaatactctgcagcctgatacaactcaactacttcatcattcaactgactgaatttgctttcactttcaccaccagacaccaattctccatgatgataccaatcacaacgcatcttataagcctcatccattcctcttctcacaagatgatcaacaactacacaacctaagtgacgatctatgttacgacaatcaatgcaaagatatacaatcatatccgcatctcccaaaaccgcagccacatcccgtacaaacttgatagcccgtctctcataagcatgatcatctctttgttgcagaagtagaaggaaaaaaaaaaaaaaactctccaaaacccttactaaaaactaaggaatataattataattatattccttacctgccaagatgcacccaatccttagccactattctatgtgctaaccgtaatataaacctttagtaacctaagcaccataccatatggtgtaaagaaaagaatcttctaaataaaca

SEQ ID NO: 19927 - DNA, 623 bp, Arabidopsis thaliana
taaactcttagagcaaaacccacaaatgcacagcctttgaagttcagcatttctagcattaagaagatcattgactctgctttcgatagtctcaactctattaagccataccttgatttcgccaagcgtttgtagacctctatcctcctctcttttgagctttcttaataaatcatcccgcttggccttgagctcttccatggttgtctcgagagccacaagattcttctcgaggttgtgagtataacttactttcatgtctagccattgagagactttatttacacacggatcaaagggtatcgagaaagagatacccattctacagtaattgagagatctgaaatttgaaatttactaatttgagcaaacgtactagagacgatgcaaagaataattgaagctaagacttacgttttggtccactcgaaataagatcaagatctcgttcgagtgagtccgaaatctcgttttggtccactgacgaccttctcagaaactttgatcgtttgatatatcaataataataatttcttctttaataaatctcacattcacacccgatttggtgaagcatggcggctgttgacctttgctaggccacactatttacaaaggggatc

SEQ ID NO: 19928 - DNA, 1059 bp, Arabidopsis thaliana columbia
gtcatgatctagggtttataatagtcaagatctagggtttattttagtcaagatctagggtttagtcaagtattagatagttttatattttgtatttgacagacatgcctatctcttttaacggaagctccgactcctctcctagtgagaaatctgacggtttcgactactaccatgcaatacgggacaggaattggggcattctgactaagtgctactgtggaaaagacgttgaaaagggtaatgtggttggtggcaatctccacgggaaaacaagattccgaagtccactaaatctgaccgaggtggatggagaacacttgcataagtggtgggaggaagccattgaagaggagttttcgaagtactgtagccggaaggacaagcgagaagaaggacctcctgcttggcaagttccgatgttcgagcccatccacgagaagatacgcattatgaatgaccggatcactgaccttgagacccaattattcaaggaactacgatcaatgaggagtgctattagtatcctccgagctagaggagggcgtggttctcgttgaaccatgtatgaaccatgtgaaccacattcttttcattatgcaagtatttacttttgaaccatgtgaaccactttgttttaattatgcaagtatttatgtatgaaccttgtgaaccactttgttttaaatatgcaagtatttatgtatgaaccttgtgaaccactttgttttaaatatgcaagtatttatgatttattacgatgtgcaaccaaaatatacagttgaacagtgtaaagtgatgaaagatgcatttgaactaaactgtttcgaaccagatgaactatctctagttcagtcgaaccaatgaaataacattacaaagtcataaatcaaaagtattataaaatcagggaataataaggtcataaatccgacattccaaagtcattacaagatattaaagatctaatacaacattacaaattcgtgtttctttttattccgaacattacgtaaacaatggcaatggtgatcaagcaaagcacacaaaacacattgt

SEQ ID NO: 19929 - DNA, 551 bp, Arabidopsis thaliana
acaagaagtcccttcgtcaccattctacttaccctgcaaccaaaataatcatcggtttctcataagattaaatttgcgttttttctaaacgccaatatctgcatttgcaagaagtaaggcgagagattttgcaaagagaaaggtgagaagcttatactaacccgttctcatccatgacaagaaccttaagtccagtgaaatttgaatgtcggggaatggctggaactttcggtatgcccgactgtttagattcgtttgaacgttctgagatcccaagtttaacatcaaagatagccgtgcatccttttccaagaccatcgctctcaatccaaatgttaccctccatcagattcacaaagcttgtcatattaaacgcttatgagtaaacttttaacaacacgagaagacaagaaaaagttggaaaaaaacgtcttttaataaggctcaaacctcttggagatggcgaggcaagcccactacctaccgagcttctcgtcgctaaagattgtgtttgagcaaatttagtgaaaatctttggaatgtcttgagga

SEQ ID NO: 19930 - DNA, 575 bp, Arabidopsis thaliana
tgaaattggtccattagaatcttgtactccttcgtaccacctaaagttgaacaagtaaaatttgtcagttagacagtcaaagattaatggaatgtgaaagatgaagatgttaagagactcttcagacttgcatgaataatgccaatcagtatcgtatatgtgccggtgaaaagctatcaggatgggaaccttttcatcagttggtatgctagtatcatcctctgtcgtacaaaaaataatattagcagcagaagcacgaagaagaaagatggctctaacataaaagcatttcaaaacagaaatatagcagattttggagaagcctcatcgtatcaaggtaatcttgaaagcaaagttaagagacactaaccaacagtatcaagagctcggagaaccaagtagaacacacacacctacaaaatgaaaaacaaaaaaaaattgaataagaaaatgctgcaagactgaacacagctacactgatagcatgtgatcgaacacacacaccattttatatgtggaacatatcgaatcatagttcactaaaatacaatctgcatttactgcagctcagaaga

SEQ ID NO: 19931 - DNA, 1720 bp, Arabidopsis thaliana
  unsure (1)..(1720): unsure at all n locations
gctgtgttggtcgagtgttttaactgtttctacttgaatttctgtttcctgcatgttcatttaggactgctagaaactccaaacctgttattgcttgccttgactatgtgaactctgattgcatcttgattactagcatcacacccatttggattgacaacctaaaatactaggacgacaggatagtgttttaggattaattgactaaaaacctattattagtggttaaaatgaataagaaaatccatgtattttagggtatccatgagttgaaatttgatacagacatgataattaaaaaatcagattcaggttcaaattgatagggaatggtatcaaatcatgacagtgtgatcgagtatagtaatctagcttaaatcaaacaatcctttgtgttactaaacttggaagagagtactcaggacaaaacacatcacaaaaacaaaataaaaacacgagatggtatagtacaatggtgaagtcaggtgcttacctctgtcgaagtatgaacagagttggtcatcaatggctgcctgtgattgctcccaagcaatgaaagtgtcgccctgttctgtctcagccccaactccctgaggatacttgacctcatcgcctcttctgcggccagcaccgccacaaggatactcgacctctcttcttcttttgcggccagcatggcggtcgagtgatctcctcgagttgataaggcatgatctgctgctagagcgaacgagcatagccttcttcttcttcatgtgctcccgagactcgaatgatgaatgtgtagctgggaaatgtgagaccctctgctcactaggctcaggcctgtgttgactcggctcaagctcgtcaaatctcctcaatggcatgtcctgaggaggctgtccctgcagaatagttgtagtggaagtggagcagcttagcatggccttcaaagacttgatagtctttaggcatttgataatgaacttgtcttgcttcttgcaccacttctgcaacttgctattgtttctgtgagcttcactcaagctcttactctccctcgctagagctacgtgctcactgaaatgatacatgcttgaatcatacttctcctcatccgtctcaccgatctcatcctcagtaccgtcttgcatcctcatctatcagctaagcgttcttgtaatagaggttctcaagcgcaggtgtgaaataaatgttatctccctctattatgcgtctaagcttaggactggggggaaggatgttggctttcttgtttgtaaagtgctcaaacttgaaacgatgcctgtcgtcgaccatttccaactcgaggatttcgtagtgtcgtagatgctcgagatccattgctcgtggctcaagtccatcagatgtgattgggactccacaagcgataagaattggtgtcagaacccctcatctgcaaagagcgcctcgtgctctcttgtggttattgctggtagcccagctcttatatccacacatgtggatcagaagaagtatagagagaggagtgtcattgatttcaccttggagagaaataccgttcttggtntggcgggagagtacttctgagagccatagtgatcatctccatatcaaagttggtgacagtccctgttatctctctagagtagaggacattggccacagaacgctggaagtacctgatgaaaggattgcatatctggttgctcttggatctagaagaatttagtgg

SEQ ID NO: 19932 - DNA, 600 bp, Arabidopsis thaliana
tatgtagctatagactagaaagattgtataactaaggtcataaatgctcgaaatatctttttttctaatgctcgaaatatctttagtgaacagagaaaaacacagatgatctattctgatatgagaagagaagtctccaaactctactaagtaccaaaatcaaaacttgtactgacagacagacacagaaacagaaacacagtcatggaatcctctactggaaacttgttattaccagtgacctcttccttgtcctcttcctcgaccacctccacgtcttccccaacctcggtttccgcctctaccagctccataggatgatatccctcaaaggccttgttcacaagctggttttgcatagtacccgacccacgtcccttctttgctgcaacattgttaccacttccattgttgctattagcaggccgctttcctctgtatattattgcaaaggtacaacaaattacaaatagatataagacaacagaaagattgtggattgagtaaactttgcacaaacccaattgttgttgttgttgaggctaacggctttgtggcttctttccaagacaggttgagattagtgctcagataaaaggt

SEQ ID NO: 19933 - DNA, 1208 bp, Arabidopsis thaliana
gcctcctcgagcaaatctgtcttcactgtgcgccgataagcacccacatgccttgcgtctactggttacgctcctgacgcatgtggaatatatgcttgaactgatcgtgtcttttgaaccatacaacttcttctttaaacttcctctctatcaattcaactgtctgcgtgacgtggcacctactgcttatcttgcacactttgccgtattctgaaaaaagaaaatgcatggtctgtggcggcagtggctgagaatctaaatcatcatcctccaaaccatcattgctagcctcatcttcctctgtctctttaacagaaacctcatcatcctcggcctcacaagtatcctgcaaattcaataaacattaaccaattgaagaattcatatgtaccaaactaataattcatatgtaccaattgaactagttccatcaaattacttaaatcaaacatgtgtcatagatgaactagttgaacatttctaactaatacgagaactaatactcaaacaaaacaaatgtgtgtcatagagattcaattgtatatacctgacgattaacattctctaccccttcttttgaaattgtattcccatttcctcctcctccaactcctccccattcccgtctttcgcttcttcgaattgttgaatgacagcgtcaattagaggtttcaaagttgtccctgtctgatcctcttcaatttcggcggttcctttaggagaagcctcatcaccaacacgcggttcctccatagccttttcaatttcagcggtttctttgtagtatcattcgccgcaacatctcgtgctgctggttctgtcggacctgctggttcggtcggaactaagtcggcggcatctccctcgttctcaatttctgaagtaactggttctgatgtcgaaacttcaccggacgacgacttctccgtcgaatcatatacagggccagcaataccgtctctaacacgagccatcaaactattacactaatcaagaattcgtcggaaaatcgtgaaaggcgagaaaattttgaatttgattttggaaaatttgaattgaatgagagcagaaacggtttgattttaaaaattagggttcgacaaaaaatgggaattagaagagtagcattcctggttactttttcgcagatagtggcattcctgccatttattcaatttattgcacgggtttggtccggttttaataga

SEQ ID NO: 19934 - DNA, 2131 bp, Arabidopsis thaliana
atcatggagacaattcaagaggttcagaaaacaatagttctgagccatgagtgcagtgccatcatacaggagaacgatgtctcagaaaagctaggagaccctggttcattcactctaccatgctccataggttcattgactttcaataaatgcctttgtgacctaggagcatcagtaagtctaatgccactctcagtagctaagaggttaggtttcaacaaatataaatattgcaatatctccttgatcttggctgatgggtctgttagacaacctcatgggttattagaagatttccctatcaagattggaaatgtggaggtgcctatagacttcatagtgttgaacatggatgaagaacgaaaagatcccttgatcttaggaaggccctttttggctacagctggagcaatcatagatgttaagcaaggaaagattgatcttaatatggggaaggaatttaaaatgaagtttgacatcaatgatgctatgaagaagctgacaatagaaggacagaccttcttagttgaggaaatggatcggctagttgattaactgctcgtggaacttgaagaagcaaataactcaaaaactattttgaccaagagtggtaaagctgggtatctccctagtgaaactttgagttctgagaagtcattagactcacacaaggcagcagttggctcagagatttacaagggcttgatggggtctgacacaaaggttatgaaagctaatgaagtaagttcaacacatgctcgaccaactaattccaccaacaactcgaataagcctccaacttgtccggaaaactcatgctcgaccaaacaactcaaggcaagcactcagatgtcagatgattggttagaactcaaggagagatctaaatggcaagacaaagacaaacaagagctaacacatattgtgaaagagctaaaggatcaaatcaaggagctcaatggaaaagccaaccaagtaccactcaacatcaaggacgcccctgacgatggagccactatacttgtcaacaaagaaagatgtgaattcacgttggaatgctctagaggagaagactatcttgataaaaaaaagaagcttactgtgaggacatggccactgagtacccaattgcagacctgtcaagaaaccctaatgagtatgatcactctactaaagaaggagaggagacctcatttcctctttacaacccaccctaagcctaatgagtatgagaagtcaagcttagagacttaaaacaagctcacttgggagcaaatcccatgtctatctttgtacatatctttatttttccttgttgtttttgatgcagttggttagtgttttcaggagataagtataaagagctgactaaagtggattctggctttgagagtacaacactatactcgaccacagagcaatgaaggatactcgaccatgttttagtttatccacgccaggagatcactcgactgcggtgctggccgcagtagaagaatggaggtcctgttaactcatggcggtgctggccgccatagaggcactaaggtcgagaaccacatgttggagctgaaacagaacagggtggctcgtctatggcctgggagcaatcacaggcagccattgacgaccaacttcgttcattcttcgactgaggtaagcgcctcacttcaccattgtattatatcatctcttgtgatttgttcttcattttgtttctgtgattggatttgtcctgagtactctcttccatgtttattcacacagtggactgtgtgatttaagtttgggggtgggctcaggaagtgtgtgttgcattgtgtatatttttgagtctgcattcatctaaggcatagaaaaaccaaaaaaatttgaaaaatttcagaaaatgatttcttaaaaaaagagtgttcttgtagttgcattacatttaggatcgagtcttgagtgtttcatttaggattgttgcatatgcataggggatgatgatgagatagccttgtaagcattttggttcaccggataaactcagtgccctcgttgctagttgtctgttgcatagtcaatgaatttgaaataaaactgaaccatgcctagattgctctaccgaccacactctcatgatctgata

SEQ ID NO: 19935 - DNA, 2018 bp, Arabidopsis thaliana
cttaacctgatttggacattgtcgatgatggtaaaggtatataccacggaaaagtgtatcgcgagcaaagaagattgccaaatacgattcgctatatttgcgataaagaatcagtttcatttcaagcaaaccagaacaaaatggaattgctcagatgagaaatgtgattggagaatattggcaactgtaatgaatggcacaagttactatgaaattaagaaagcgcagcttcaacacacatgttcagttgagactagaaggcagtacatgaagagagcaacgtcaaaggtgattgcatctgtatttaaggcaaaatacagtgaagcttctgctggtcctgttccgatggatcttcagcaacttgtactagaagatttgagggtttctgcgtcatacaaaaagtgttggagagctagggaatcagctttaatagatgttggcgggagtgatgaagagtcttatagcaatttggctgaatatttgcatcttctgaagttaacaaatccagggacgataacacatatagaaaccgaacctgatattgaagatgaaaggaaagagaggtttttatatatgtttttagcttttggggcttcaatacaagtttttaagcatctgagaagggttttggttgtggatggaacacatttgaaaggaaaatacaagggggttttactcacagcaagtggtcaagatgcaaacttccaagtgtatccactcgcatttgctgtggtggatagcgagaacgatgatgaatggacttggttctttacaaagttggagaggataatagctgacatcaacacactcactatattatcagataggcacgaatcgataaaggtaggggtgaagaaggtatttccgcaagcacatcatggtgcatgtattattcacctatgtaggaatatacaagcaaggttcaagaacagaggattgacgcagttagtgaaaaacgctggatatgagtttacgagtggaaagtttaaaacgctttataatcagattaatgccattaaccccctttgcataaagtatctacacgacgtagggatggctcattggacaaggctatatttccctggccagcgtttcaatctgatgactagcaatattgctgaaacgttaaacaaggcgttgttcaaggggagatcgtcacatattgtggaattgctaagatttattaggtctatgatgacatgttggttcaacgcgcgtcggaagaagtcacaagcacattcaggtccagtacctccggaggttgacaagcaaatttcaaataacttgacaacatcaagtggaagcaaggttgggagggtaaccagctggagctacgaggtagttgggaagctaggtggtagcaattttgttgatctagaaaagaagcagtgcacctgcaagagatatgataaactgaagataccatgtggtcatgctttggtggctgccaatagcattaacctctcgtacaaggctttagttgatgattatttcaaaccacactcatgggttgcgagttacaaaggagcagtattccctgaagcaaatggcaaagaagaagacatacccgaagagctcccacaccgttccatgcttccaccatatactcggagaccatcagggaggcctaaggtagcaagcataccatcaacaggggaatataaggttagataaatattttgtaaatcttgtacattgtctaagcttttgaaaaactaaccaaactaatgcaacatgttggttaacatggtaaacgtagaaacctaagacaggaaggacgcagcagaacaggtctcacgctgcaaaggattgggtcataacaggacaagttgttctaatccaatttgagaaattgtgttttcgaattttagttgttattatatgtgtgatctttaactagttgctatgtttttgtaaaatatttcagttctttttgtaaaactagttgctatgttttttgtaaaatatttcagttcttataattagttattgctgaaacatatcctgatggtatcgca

SEQ ID NO: 19936 - DNA, 1010 bp, Arabidopsis thaliana
tcagacatcattgcaaaaaacataaacgttgaatggaatgagaacatgataacaacagagtaatagcaagatgataacaggatgaacaacagtaaacgaaatcaagaacaaatactgaatactgaatagataaagagaaatctggattacaaaaggttaagaacacagtgtctgcagaataaaactagataaaaaacttgttctcgaaaatgtaaagcacatgctacttatagcaaaataatctgaaaccctaatactcaaaacgacgcagtattgggacggattaagaactgtactcgacccatgtggtcgagtgagaggtcgagtgatatgctggagtcttcttttcttccttatgctcgactgtctggttgagtgcggaatgaagaagactctcaagctcgccatcgagtatgtagtcgagtggtggtggtgaagacactcgaccagggggtcgagtgaagtgatcgagtgactggtcaggtggtggaggtgaatacactcaaccaaggggtcgagtgaagtgatcgagtgactggtcaggtggtagagttgaatacactcgaccaaggggtcgagtgaagtgatcgagtatctctcgtggtggtactcggccagggggttgagtgatgagatgaaatggtgaagtcccctactcgaccagggggtcgagtggtctgttgaggtcttgaagcttctactcgacctcggggtcgagtggtttgacatgatcaggtccgcttcttccagttagctcgtcaacagcttcaaatcacctgaaatcaacacatatatgcaacatgcatgcaaacctatactaaacatgcaaagtgatgacaaatgatgagaaatggtataaaacggtgatgatatggtgctaaaatgatgacaaatggatgctcaaaacatgcaaaatacacacttatcaactcccccaaaatttgtctttgcttgccctcaagcaaacaattaagaacaagctggaggtgaggtttgaaagctgggactca

SEQ ID NO: 19937 - DNA, 1745 bp, Arabidopsis thaliana
ttatatccccacccatctaaaccaaaaatttacttaaccggttaaaaaggttttgttttgatttgttcccttctaataaatcgccagttgtatttacagatgagaaaaggaagttaccttcgccgactgaaattatctcacaatatcaatgtcgatggttgttaattcttccgaccaagcaattactatggaaagtctcggaatctccaggtcactgtttcttgaattggttaatattactgtgcaacgatctctctcccttcaaacaaaacctctggaacaatttaaattgagttcgtccggcttaaccaaggcattgtgacgatgttttttgcagcgaattaaccgccactgtgattggagagatgacgtagaagtcgattaggaatctccccctgattcgggttatcgtttggatctgactctgtttctgcatcgtctcctccggaagaagttttaaaaaggaaacgacctacaaggcatgatataccgattggtgttgatggatttgtaactccgattttttcatcggctgatgtaactgtgacgtcgagggaggaatgtagagaggttgaaagagaagtgatgattattctgtttattgtaagagaggaagacgagaagctagagaggttgtatcaagttgggctccaatgataatgttagatgagcaaacaaaaaagtgctaattttatcgatctataaacacattcgcagcaaatcaaagacatacttgtccattaatgattgtccaagcagtccagtccatatggtcatcaaatgactcacatggtagtttcatactaatacataagtttatacataaacaataaacgccaatccaaagtacattatccatgtctatttgaccatttatccacatgtgtatagacatgttgagacaattttatcgagttataaacacattcacagcaaatcaaagacagacttgtccattaatgattgtccaagcagtccagtacatatggtcatctaataagtcatatgatagtttcatactaatacataagtttatacatgaacaataaacatcaatccaaagtacattatccatgtttctttgaccatttatcaacatgtatatagacatgttgatacaattttatcgagctataaacacattcgcagcaaatcaaagacatacttgtccattaatgattgtccaagcagtccagtccatgatcatctaaagactcacatgatagtttcatactaatacataagtttatacatgaacaataaacgccaatccaaagtatattatccatgtttctttgaccatttatccacatgtgtatagacagtcagttacgtagacctcagtcagttaaggaacttctccaaatctgccaacatctctacatattttaatgtagacgtaataggttggtttgaggatacgaggacaccgtcaacaatgaggagataagcaagccgaagtctgtggtaagaagataaggtcttgtgattaacatttttgaaatatcacctaacgtagcattcatgtcttcacctattagctcttcacaatgttggatattataaataaaattagcacacggttgaataattagagcaaataaaatgattggagaagattaataccttgcatttgaggaccgagtagaagttactagcacacgccggagacgacgaatcgattgagagacaagaaaatgaagaccatgacgggagaacaagtgttgacgacgacgacgggagag

SEQ ID NO: 19938 - DNA, 1234 bp, Arabidopsis thaliana
cttgattgtctcctccttatacgcagcgtaaggataagccatgagtgtctccaaatgacacttctcgaacagatgctgcacatcctccagtaaccccagctgggctaaagtctcatagcagggatacctcgttccccagaagtcgttcatctaaaaaaatctgatatactcctccgctgtaacctcgtcgggtttgttctgcagcttcgtctccttacaccatgactctggctcatactcagtttcgatgtcctcatcaatcagctcatatctactcgacatcgccctctttcctctggcgatttcagctcttctctgattacgtcgagcagcagagcgttcaaattcatccatgaagctctcgtaaacatgttgctctctctccggtctagtgtaccaagactcagcttcgtctacattataatcaggatcaattgaggattctccactgtagttactcataatgaaacctgaaaacaaatgaaactcaaagataaacgttaatacgttagcccaacaaaaccaaaaacacaaaccaacagagtaaaccgatcgagtatatcttaaccggttctgaatttttttttttcggtttgtggattgttggtcgagtgatattggaaggtcgagtgaagtgacggagcttgagcggtgaaaacgatgagtttatgtaggagttgcggtcgagtatagtgagagatgagttgcagtgatggtcgactgtggcgaatcgagtgattggtgaacgagaaccggctcagagatggtgaagagaacgagtcgagtgatgagaaagatgacgaaggcgttgcggtcgagtatcctacatggagctgcgtgaacggtggtggaggagaggaggaggtgctcttgccgtgaagtcgagtgatgaggtgaaacgtaatcagtggtcgagtgttgaaggaggtcttgaataggcgaggtgatgagttcaaagctagactcggtttagaagttgagtcttgttctccttcttctttgtttgcgattgagtgtctatggtgaagagagaaactcacggcggtcgagtgaatggagcaaagcggtgaagatgatgatgatttgaaaacgagtacttggtgagaatgagagtgagcgttgaggaatcaagtgcgtgaggaagagagatggtgaggtcgagtggttgagagaaaagagatgagagtttggttgagtttggatgagaaatggaggtcgagtttaatgggactgg

SEQ ID NO: 19939 - DNA, 1971 bp, Arabidopsis thaliana
caggtcttatcggcgagaatgtccccaacatggcttcgaagagagccaactcatcaatctattctaaaaaggaatagccaagccataccggagtcaactcaatgcagcaagctactgtcacttcatgacaagaaccactagtgaagcattactcctcatcaccaatgctttaactagtctttcgacacaggaagttgacaccgaacgaagactttcagctgagattgccaccgcaagcaaagaggaccatgtttcagcaatctttgctcctacccaagcccccactccaccctccttagacaaccgactcgactccatgcatgcgcagattcttgcaagccaaacaaagctcgtggatgagtttaatagcaagtacacagatcttaatgggaaaatcaacaatccgcaatctcgtatccttgagccttctcctacatcagcatctatcaatgcagtcacacgacgtagcggaaagcagctcaatccaatacttcagagcgaacgttcagcttaaccttcatcttttccaattgaagaaaaagagtcagtgtcgatcgatacatcaaggtgtcgatcgataccaattactcttgacgtctctgttttgcctttgtcgagtagaatcgataatttcacggaggaggaggaaattattcccgatggtgtcgatcgacacccagctcgttcagacaatgtgcaaattccagctgaaaccaagtcagcaaatcgacgaatttctttcccgaagagtcctaaaaagtcaagataagccttagatgatgtcagatgcaaggctatgattgataagctgattgttgagatgcctctagttgaagctattcatctctctcccacaataagaaggtatgtcaagataatggtcactaagaatttgacgaaaaaatgcagtgttatgatgattttagaacagggcagcgatatcattcaggaacgatttccaagaaagctacatgatctttgtactaagtgtcaccattaaccataattccttcccaagagccttatgtgatctcggttctagtgtgaatctgatgcctcattcagttgctatgcgtcttaagtactccaatcttgagcctacctttatcacccttgtgttggcagatcgttctacctgaattccagatggaattcttatcgatgttcccgtgatgattggaaagagcatgattcctacagactttgtagtcttgccttataagaaggaacctaaggatccattaatccttgggcgatccttcttgcacacagctggaggaattatagatgttcgacaacgaaggatagggctgaatattggcgatcttactatgcaattcgatatgaacactttggtcaagaaaccgatcatagaagggaaaactttcttgatagattctttcacttcatcagcttcagataatattttggagatggaattagaagacccactagagcgaggtttggtctcttccatagaagatagtgcagatttggacagttaaacttctacatttactaagatgctagatgacaccgaacatgtgatgcaacttacagttgaagaagctcttccatctttgactccaacgccgacttctaagccagattgggatccagcaaaggctccaaaaatcgatttgaaaccacttcgagcagggctaaggtacggttttcttggtgaaaattccacttatcctgttatagtgaatgcttcccttaatcccgcagagctcaccttattgctaagcaagctgcgcaatcatcgcaaagctcttggctattcgcttgatgacattacaggtatatctctggatgtatgcatgcataggatccaccttgaggatgagtctaagtcttcagttgaacatcagagaagactgaatccgaatcttaaagaagtggttaagaaagagattatgaagctgttggaagcaggaattacgtatccgattcagatagtagttgggt

SEQ ID NO: 19940 - DNA, 1080 bp, Arabidopsis thaliana
tggaccgtcacaccaatgggctgacggacctatcctccaaagacatgggccacggttatggagtccatccaacaagtggtttacaacactcccccttggatgacataaccgtgtagatgccaacgggatctcagtaatacgctaggggaatgctgcctcattaaaaccttactaggaaaacccttttcgggacaaaaccatagtgaggaaaaagagtacagcacgcattactccccctgaattggtcatctctataagtccttaagcctccgcatcccaacctgatgcgcgacttcctcaatgtcgttgctggtaatgccttggtgaatagatcggctgaattgtcgcttgaacgtacttgcaccaccttaacttcaccatccttctgtaagtcatgcgtgaagaagaacttgggcagaatgtgcttcgtccgatctcccttgatgtatccttccttgagctgagcaatgcatgccgcgttgtcctcgtatatgatggtcggctccttgtcttcgaccattccacaatcggctcgtatgtgttgagtcattgacctcaaccacacacactcgcggctggcctcgtgcattgccaatatctccgcgtggttagaggaagtggccgtgatggtctgcttcattgatctccaggatatcgcggttccaccatgagtaaacacataacccgtttgtgactttccattgtgcggatctgaaagatatcctgcatcagcaaaaccaactaaaccttctttgttatggttagtataatataaaccaaaatcaattgtcccttgtaggtatcgaagcaaatgcttgattccttcccagtgcctcttggtcggacaagaactgaatctagagaggaggttcacggcaaaacatatgtccggtctagtgtggctagacaggtacatcaacgctcctatggcactgagatatggcatttcaggaccgagaatttcttcatcgtccttctttggaccgaatggatcactatccaatcctaggctcctcacctgcattgggctggtcaatgggtgagccttgtccatattaaatctcttgagtattgtctctg

SEQ ID NO: 19941 - DNA, 1161 bp, Arabidopsis thaliana
gttagaagaagttaggtacataaacaatcaaggtggctacaaagggtacagtaacttcaagactaacaaccccaacctctcttaccgcaacaccaaagttgcaaatcctcaggatcaagtgtatcctccacagcaacaacaaggtcagaacaaactttttggtccctacaatcaaggttttgttccaaaacagcaatttcaagagaactaccagaagcaaccaccacctgggtttgcacctcggcaacaccacggtcctgcttctccaaacgctgatatgaaacaaatgctacaacagctgctccaaggacaagcatatggctccatggagattgctaagaagatatctcagttacacaataagctggattgtagctacaatgatctaaatgtcaaggtggagacactgaattctaaagtcatatacttggagggaaattctgcatctacttccgctcagaaatagacaagccaactttcaggaaaagcaattcagaatccaaaagaatatgctcatgctatcaccctgtgcagtggaaaagcacttccaacctgagaggaacctatgacagtcactgaggacagtgtagatcaagatggggaggatttcagtctttataaagatcaacctgacaaacaactcgagcagtcactcgaccgaccactcgagcagccactagcccatgttactcgaccaccattcccagtaacatcaccaactgctctgaaaccagttgctgtcagaaacaaagaaaaggtgttcctcctccttacaaaccctaacttccatttcctggctgtcacaagaaagcattggcagataaaaatagagctatgtttgccaagaacatcaagaaagttgagttgcggatacctctcgttgacgctctagcactaatcccggattcccacaagtttctgaaagactttatcgtagagagaattcaagacgtgcaaggggtggtagtattgagtcacgaatgcagtgctattatacagaagaagatcattcccaagaagcttagtgatcctggctcattcactctaccatactctttaggtcaattggctttcaacagatgtctatgtgatttaggagcatcagtcagcctcatgccactatctgttgccaagatattggagttcactcaatacaaatcc

SEQ ID NO: 19942 - DNA, 1539 bp, Arabidopsis thaliana
acgtttttggtggctgcaactacatcatcacttcaatctttcccttgtcaacctctatacccttctctaatatcttgtgacccaacattatgccttccttcaccatgaaatgacacttttcccaattgagaacaagattgatctcttcgcacctggtcagtactctgccaagattcaacaaacatgaggagaaagaggggccatagaccgaaaaattgtccatgaagaccttcaccatctcctcgattaaatccaaaaaatagaggtcatacacctctgaaatgttgcaggagcattgcataaaccaaatggcattctcttatacgcaaaagttccataaggacatgtgaaagtggttttctcttgatcattacggtgaactggtagttgaaagaaaccactatatccatcaagaaagcaatagtatgggtgattagctaagcgttcaagcatttgatcaatgaatggtaaaggaaaatgatctttcctagatgcagcatttagctttctataatcaatacacattctatgaccagttatagttctagtagggatcaattcatccttttcatttttaacaacagtcattccaccctttttagggacgcaatgctctggagaaacccaagtactatcagagatagggtagatgacaccagcatcaagcagtttcaaaatgtccttttcactacttctttcaagtttggatttaacctcctctgtggttcaatgctagagtaggattcgttttcaaggtggatcctatggttgcataaactaggtgaaattcccttaatgtcagataatgaataaccaatcgctctcctatactttctaagttcagctaatagcacgttcacttcatcatcatttaactcagcattaatgatcacaaggtaagtagagtttggaccaaggaatgcgtaccttagacctttaggaagtggtttgagatcaacctttggtgccttgagttcaaacaagtcatctaaagttggaatgatcagctctccagagtcgttggcagtcgaggtcgagtcattggtcgagtatgctctcgagtgtgcaggttgaactcgtgttgacccttcttcgctcattaccattacctctgttgctggtccattcaattcctcaaaaggttctgattcttccatcgctttatgggagtctaacagcttctggtatcccaatgtttccaaatgtagaaacccatcttcaccactttttgttaaagcactgttgagattgatagtaggatttttctcaattaatcctaaaacactatcctgtcgttgtagtattttaggatgtcaatccaatccggtgtgatgcaaacagatgagatatgatcagaaagctttaagtcaagccaagcagagagttggttggttctaacagtcctagtatgcaataacagaaatgaaatgaaactaagactagaaatggcaatagcaggcaggtgaataacaaagcagaaatgataactggcaatcaaatggataaacgattcgtaaggatggggtaatcgaatagtgt

SEQ ID NO: 19943 - DNA, 1522 bp, Arabidopsis thaliana columbia
tctcatctacccaatgatatatagtatgatagctcagaagatgatcccagtcccatggatgtcctaactctaccctttttctcattctttctctctttttggttcaagttctaaggggttattctttaaaacgatacaagagtctagcgggtttggttttatactttgacaaacttaaggcttttcttctaatcttagcacataaggcgttttacccttttctttgaatcacaatgcctaacttctttgaattccaaaccctttactagactaacactttttgtatccccctttagaactctaaactcttactcttttttttttcttttcttatcattctcattctcattctcattcaatccatacacaatcccaatcccaaatacaagtctccacctagtcctagccaacccaaaaagcgtgggctaggtctacatgaaagactgcttttgtcggctcatacctaacaagttataccaagctcaatcaaaaaagacctcacaatcacacacatatgatttttggcttgaaataaggctaggctaagggtatgggaaactcctctaaaaatgatagtcagctacttggattaagagagggtggtgaagtgaataagataatccaagtatgtatatggtagccaagagttcacaaacaatgtatagacatgataattccaaattcagttcaggttctaatagatagggaatggcatcagctaagcaagttttgaatcaaagcagtatagtcaagttgtaaattcaaagcagggtgcggtcttacgttagagatacaatcggttatgcaacaaagaactaacaacctgggcattgaacttacttcattgaatcaaaacatgtttaacggtttgaaatcattattatcccctatgcaaatgagcaatcctaaatgcaaccacactagatacaatcctaaaatgagatgcaatctacatgacactctgtttttgtgaaatcattttctgaaaattttcaaatttttatggttttttctatgccttaaatgatgcaaaatttgaaataagaaaagagaacacaatgtcaaacatgtcttgaaccctcctccaaacttaaattacacagtctcttgtgtaataaaaatctgaaagagaattcaagaccaaaacacataacaaacaaagagaataaaaagctatggtatagacaatggtggtggtggtgttacctcagtaattaggtgaagtagacggagacgaaatcgtccatactctcttgagtataagcaaggactgatggtgaggcgggagggttttgcttgtcctgtccgatcgagtagttggtcgagcgtgtggatgctcttctctccctactccttggctctctcaactcggagatacttcccgaggctcaaataatgaagctcgaggttgattgatcatttcggccctccttgcagccgagctcgtggaaccgcttcttcttacttcgggagtgggagacgggggccttggcttgttcaggaagtcttttattttagcagc

SEQ ID NO: 19944 - DNA, 1843 bp, Arabidopsis thaliana
tctatccaatttcagatagcagttgggttagtcaagttcatgtagttcctaagaaaagaggagttacagtagtcaagaacgagaaagatgagttgattcctactcggacaatcacaggccatcggttgtgcatcgattacagaaagctgaatgttgctaccaggaaagaccatttccccttaccatttatcgatcagattttggaaaagttagcaaatcataagtactattgctttcttgatggatactcaggattcttttagatcccgattcatccagacgaccaggagaaaacaactttcacctacccctatggtacatttgcttatctgagaatgcccttctgtcttctatcttcacagacatgattgaggatatcatggaggtcttcatggatgatttttcagtttatggatcataatttgaggattgcttagagaacctctacaaagtgttagcaagatgtgaggagaaacatctggttttgaattgggagaaatgtcactttatggtgcaggatgggatagttctcggatacaggatttctgagcatggtagagatgttgatagagctaagatcgaagttatgacaagtcttcaagcacttgataatgttaaaggagtgaggagtttccttggacatgctggtttctataggagattcattaaagacttcaacaaaatagcaagaccactctctgctctactctgtaaagaagtcaaatttgagtttacacaagagtgtcatgatgccttttagcagataatacaatccttgatcagcgcaccaattgttcaaccaccagattgggatctaccttttgaggtaatgtgtgatgcgagtgattttgttgttggagctgttctaggactgaggaaggataagaaacttaatgccatctactatgcaagtaggacacttgatgatgctcaaaggaattatgcaactacagaaaaggagttgttagttgtggtgtttgctttctagaaattgagatcttatcttgttggatccaaggtttcacagatcatgctgccttgaagtatttgatgcaaaagaaggatgctaagccaagacatttgagatggattttgcatcttcaggaatttgacatcgaggtaagagataagaaaggggttgagaatggtgtagcagatcatttgtcacgcattaggatcgatgatgatgtccctattaacgatttcttgcctgaggagaacatatacatgattgatacagctggagaagatgactgcaaatgtgataagttgcagaatcgaactttagtgtcgatcgacactccttctatgtcgatcaacactcacaattcagaggaagttaatattcgtagttgcgcaatggtgtcgatcgacaccactgaaaatgtcgatcgacaccctcctgaatcgacaagaaattggtcaccaactgagaattgcgccaccacaggggtcgagaaggactacccatggtatgctgacattgttaattacctagctgcaaatgtggaaccggataatttcacagattacaacaagaagagattcctaagagagattaggcgatattattgggatgaaccttatctctataagcattgttctgatggagtttataggagatgcgttactgcaacagaggttcctgatatactatcgcattgtcacagctctagctatggtggtcattttgcaaccttcaagatagtatccaaagttcttcaagcaggcttttgatggcctacaatgtttcgggatgctcagaagttcatatctcaatgtgatccttgtcaaagaaggggaaagattagcaagcgtaatgagatgcttcagaaatttatcc

SEQ ID NO: 19945 - DNA, 510 bp, Arabidopsis thaliana columbia
ctgacaataacctccaaataagttttaaacagctaaccttgtttacttcttttagagaacgaagacccaaacctccttcttcttttggtatgcagacctcactccacgagatcttagctttttttgaacttaactctggtcctgaccagagaaaagcagagcatagactgtctatttctttagtacacgcacttggtaatctaaatgcggacatccaaaaatttgtgagactatgaattactgagcttataagttgtaatctccccgcaaacgagagatgcttcgctgtccaactcccaatcctttcccgaatccgctctataagaggagaatagtcacttgtcgtcattcttttagtcagtaaaggcaagccaagatatcgaactggtaaggtgcctgattcaaacggaaaagagcttaggatctgttctctttcactgtctctgactcctgccatgtacaaagtcgatttctcaagactgatctttaatcccgagaaagctgcaaatg

SEQ ID NO: 19946 - DNA, 530 bp, Arabidopsis thaliana columbia
aaacgtgttcttgtttctcaaagcaaaagagcgagaaagaaagtgaacagagatacaagagagtgagagaatgatggaagaggtcagaattacaacagtaaaacatcgtcctgttgagtaatagtaagccttaaatgccattatgaataattaaacgttaattattcatcacaaaacgacgtcgtgttgagtgtaggtgacgaaacagttgttttcttctcccttccattgttggtctttgaagagaagcagaaagttttgagaagaaaagatggaggaggaatcgcgagatatactgatgacgacgttgattgaatctggggtttcgattcccggagatttcacttccgttagcgaatttactccggacgggttagtatcgatttgtgctcagctgctcaatctcattgacccatcggcgtcgttttccgatgtagctcctgattctctcccgaaaggtttaggatctgcaccgatatcgctcattctgtgaagaatctaggctacatcaacgatatgagttattataa

SEQ ID NO: 19947 - DNA, 569 bp, Arabidopsis thaliana columbia
cttgcaaggcataacaagaaatgaaatattttttaattattataaaggatgaacacaaaacttccatccaatctagatcaaaattattacaaaacctgagtatccacacccgagaaaccatccaaagatgatttcccagacgcaagtatccccaaagcgagtctgacagatttcagcataggcaaagcagaaccctccccagcattttcaaggctgccaaatcgtaaagggaaagttagaggtcattcaagaaatgtaagcatgattgcatcctaagactacttgaatcaaatttatcacacatcccacctctctacaatatcttgaaaaatgcttttaactgtatcatctgaaaagaacgactttctatcctctggaatacgtctggcatcaagaatatgcatgactgataacagagactccacacaaagccactgaataaaatacaaaaaggtcagagactcagaattttcctttggcaatccaaaagcaaaaggccactgataagatcttgtaatatatatgattccactggtaaacagctatagctctgtcaaaacaaattgtgc

SEQ ID NO: 19948 - DNA, 599 bp, Arabidopsis thaliana columbia
caactattccccaccaacaatccactttaaccccatcaacatggattgatttcaatattcgtaagtgctttagcagtccatctcgatcagccaattcacacttcatattgataaccccaagctgttgacagaacaggatatgtagttagtaaggatgaatttcaggatattattggtaaatgctaagattaaagtggcttactggtaacatcacataaaccggaacataaggagtgccagagaaatcttgctccgtcagatttggaggaatctcgagaatctaccaaataccaaaagtggaagagagtcatcacaattgaacccagatatgtgtatgcacgtaaatcaaccatgcagtgaaaatctgacaggttcttatgagattttcagattttgaaaatgtttttctcaagttgaggaaactatcaaattcattaatttcaaataagctatgtaaatgcaaaggactgaactgttacaagatttattttctatgtactagtaaagtgtcgttacttgtttagagttgatacatcgactgaaaaccaacaagccctcagccttatttaactgccaacagttctggagattggattggg

SEQ ID NO: 19949 - DNA, 557 bp, Arabidopsis thaliana columbia
cacttgtttacttaaccagttaatgaagttctttcttagtcagattcaagaagcttttaaatttaaagtacactttttgcattctatctaagttccctcagctttagcatgtatataagatggtgttattaagagcactcaagattttgaagatcactgacaagttattcaaaatgatttcaaatatgatatctagtgaacacattattctctggttcaaaaatcactacacttgcacagaaaatttgtttgcaagctaaaggaatccgtatcccagtgagctactctcgcttcggaattttgcctatctctcagctttacgagcaaacctggtcggtctatcttagtatccataacctgaaacaagacaatcgagaaagattcagtgatgaagaaacatgagttttgttttgatgtcactgtccagtttttatgaatcagaaggtctggactaacctgagttgtccattgggttccagcaggaactggctctggctctgggatctcaacaacacacagtcagacatcaagaacgtctttgcaactgaggcggcatg

SEQ ID NO: 19950 - DNA, 553 bp, Arabidopsis thaliana columbia
  unsure (1)..(553): unsure at all n locations
tgtgtactcccttctcagaatctgcagggtcagatatcaaagaatccactgtgccagccactccactgttgatagacttcacattctcttcttcagtggataaagatttactgatatcattttcagaattaactacttcttttctcgcttcagatccatcattagaagtggtgtgtcctggctgaagcgcatcaggctctgatgaggaaccatggactgaaacatattcgtgagcttttgtatctgaagaagtttgtggagaatcgacaacctcctcagcaacattcacatgagatgtagctcctcctacagtcacaggggatggagcttgtgcctcgtcactgacagcactagtgtcaggtttacgctcatgcttctcagatttattagattttttggaggatttgccttggcttgtactgcctttggagtcctttttctgatcagtgcctttgtcagccttcttttgacgaaattgttgaagctgaaatgaggatacgaaactaagcgattanaacattttcatccaatgtgtctctatctatatatatat

SEQ ID NO: 19951 - DNA, 1392 bp, Arabidopsis thaliana
atttataataataatttatattttaatacatatttataacagcaataacacgagatttaagactatttattaaaaaatatataattgaataacagaaatttaattattttaacataagctgggatggtcgattaatcaaaccacaggagaaaaccgaatctactacatttgaaatcatattttttgggttcacgttttaaagtttcacatcattttatttgacttttagttatttagccgtggaagagcctgaatcgggcttggtagagaaacccaacatactttgatgaaagattagtagttaaccctttacttattaggcccaacaaaggcccataaagaagcctctataagggtttgtctacagtcgttacaagcccctgcgtcttatacacgcatccccgcctagacgactcacaattttacaatccatctcgttttcagttctctaggttttcctgaatatattactcggaatactgtcttcatcctccagatctctgaatctattggcttaagtgttttgactagtaacaataatttcgcattcctaactctctctaaacttctcctctctgtaaaactccactcattaacatcaatgctcccgtgtgctttctcgttctagaattgcagtgactcaagcaagttgtcatcattctctttcttttcaaaaaagaaagaaagcattaagtgctttgtcattgtcgtaaaatagaaatcaaagttcattataatccaatagggatatatataggatcaaagttacttaagttattttactctgatatttattaaagcacgatgagtgatgaacctgaaaatgagtagacaatttttataagaaccaataatatacacaacttggggttcacataacactgtttagaacatataggctaaattcatcataaaagtatagaaacccccagagacaaactgtgtgttacttaattaatttactctttagtcattagttaaatagctaacaacaagctaggcaacgaaccacgagccaggtcccttggtacgctctcccaaaccgtacaacgccccatgtcccatcctactgctccaagactgtagtctgtaacagtgagccatgtgttgaaatactctcttagctcagtgaccactccgtctttcaatttccacacgtgaacccagtacacgcgtgaaccctcccacccttctgcaatcacgcagtcatgaccaggcaccactacttgtacactgcttggctcaaacctgaacgaaacctgcctcggaggttcccctgttagcagcctcatcatgtgttgacaatcgtgcggtccatggaaccaccattccacgtcactggccaccactttggtcacagtagaagtgtcgcttgctgaacgctttgtagag

SEQ ID NO: 19952 - DNA, 603 bp, Arabidopsis thaliana columbia
gcccttcttggagatgttgtctcccactttgaagagcttgaagctcgagaatattccaagtttggtggagcttccttcctcatttcagaatctcaatcaactgaaggagttgagcatcacatactgcagaaatctggagactcttcccacaggaatcaacctcaaatctctcaattacctttgtttcaaaggatgctcacagttgaggagctttcctgaaatctcaactaacatctcagttctcaatctagaagaaacagggattgaagaggttccttggcagatcgagaacttctttaacctcactaagctaactatgaggagttgcagcaagctaaaatgtttatccctaaacattcctaaaatgaaaactctgtgggacgttgacttttcagattgtgcggcgttgactgtagttaacttaagtggctatccaagtgacacactttccgaggaggaggatgatagtttggacccctttctcgatttcaggggctgcttcagcttggatccagaaactgtccttcaccaagagtcagttattttcactccatggcattccaggtgacaagtgccacatattcacgtaccgactactggact

SEQ ID NO: 19953 - DNA, 891 bp, Arabidopsis thaliana columbia
cttgattcatttttgttttcggtagcgagaaaatatctgaatcggaaaaaacatatgaatctgagttttgttctttggtttgaaagttcttcaaatataatttagctgacaaactatagatgaggatgaaaaaatccttcctttttgaattttaaatcattttgctgatcaattgttccgacctgtgttcttcaaaaaaaacagagattcggaaccaatgatgatgcgtgctgttataaggagagctgccagtaatggctcttctccttcggttagtgctcgattttatctcatttggtacaacttgatcggctctatcgaaatgtgacaactttatctctatatatttttatcagttattcgcaaaatcactgcagtcttctcgtgttgctgcatcttcccctagcttgctatcaggttcagaaacaggggtacgttttgtttttgttcccaatcgagttggtagtatatggttatgtatcttatcatcagatttctatgtatctgcttattttcgatgaacaatctaataaagttttatttgagaatctgaacaggcatatctgcatcgtggaaatcatgctcatagctttcataaccttgctttgccaggtacttcttacaacttatttatatgtgacttttgggttagttttagtttcttaagatttttgtgctcttattttgtttgtacccactagcagggaactcgggcatctcgaggtcggcgagtttagtttcttcaaccctgcaaagatgggtcaggcctttttcagctgaaactggtatgtatgtcaacctgagctctttctcctttttgttgtggtattaggtttccatatctgggaacatatgattgcttagaagaaatccaggagctcatagttttga

SEQ ID NO: 19954 - DNA, 634 bp, Arabidopsis thaliana columbia
  unsure (1)..(634): unsure at all n locations
cataattaccttttataacgttaatagaagatgacccgctaaaccctgacgcggtttgcggccgcttaaaaagcgggggagacggcaataatggtgaaaaaagtggtgaagaaggtggtggaggtgatggatatggtggaggcggtgaagacaaagcggtacttncgtacctcaagaggcatttaggagtaaagatctgagcccaacgagactggttgcaacattccaacatttcttggaccgcaagtttcaaacacgttgtgcagtttcttggatcaagatcaggactacactgagccattgaatctatatcaaacgaaccctcgaactgtttcacacgttcttgatcctccacgaaatacggtgttgatgatagcgatggggaagaagtcgcattgatgataagctcatccattttatcggacagtgtttgtgggaagcgatccaagttaggagcataactcaaagagtatctaatgatgtaaggtctttcgtctacgagggagaaaaaggatgaatccgagtaacgtaccatacactcttcatagaatatgaaagcttctttttggtaagtgcagtttcttgagattcttagggttgcggtttgacacagtctgacaagatgttctgagat

SEQ ID NO: 19955 - DNA, 443 bp, Arabidopsis thaliana
tattactattactaaaacatataataaaagtgtcagtgtcaaatgtcaatgtaatttaatttaggggaaaatgaaatggccaacataatctaacacaaaatcaatgaaaatggagagagcatctcactcaccttataataacctttatattttccacgtatgtgggccccctcacataaacctctctttcctttataaattctccactcttcacactctcacttttgttcatgtaccaaagaagtccccaacaaacacaaaataatcaacagagagagtcagagagataatgggtaataactatcggtttaagctatcggagttaatccctaacgcttggttttacaaacttagagacatgtccaaatccaagaagaagaatcttcagagccaaccaaatagcaccacctccaagaagaacaccacgcagtccctactcctac

SEQ ID NO: 19956 - DNA, 565 bp, Arabidopsis thaliana
gttatgtagtgtctcaattctcttgattagttcttgttgtcctaaacatttcgataactttcctcttttgattttgattaggtggaatgaaggtgaaagctgatagagatgagtcctcaccttacgcagctatgcttgcagcacaggatgttgctcagcgatgcaaggtacttactacatatatgacctgagacattcattacaaaactaaattcctcatcctttttaatgaatgtaaactactattctaaacacaggaacttggtatcactgccatgcatgtgaagctccgtgccacaggtggaaacaagaccaagacacctggtcctggagcacagtctgcccttagagcccttgctcgttccggcatgaaaataggccgtattggtaagcttcataacccatagtcttatctcagctattttcccttttgtattgtttcctcatcatttctaacaccgtacttgttgttgcagaggatgttaccccatcccaacagacagtaccgcagaaagggtggtagaagaggaagaaggctctgagtttttctcgcattgtgggatgt

SEQ ID NO: 19957 - DNA, 550 bp, Arabidopsis thaliana
tatgtacatttctgaacttcttatatctgcaattgcagcacgtgactgatttgtctggacgggaaacacttgttcgcatcactggtaatcatctctttcaactctcactctctaatcctttggtgatgatccctttgttaacttgtatgcggtagtctctgttgagtgtgaaatgaagttcttgactgcctaaaggttctgcttagtatctgctcttttaagttttttcgaggaatccgttgatatctttatagaaattgctttgttcttgacggcatcaatgttcctgcttatagaactaagttagttaccattgttattagtattatggtcttctctatagggtgtgagctgaagtgtctttagtctttgttcgtttaacttttgaggaattccttttgtttatctgtttggaaattgcattgttcttaaataacaatgggttgctaaaattgctgtttcgatttcctacttctgtaggtggaatgaaggtgaaagccgacagagatgagtcctcaccttatgctgctatgcttgcggcacaagatgt

SEQ ID NO: 19958 - DNA, 542 bp, Arabidopsis thaliana
ggtaatattcatgaactacaactagattcttaagtattcatattagtgcgaagttatagttttaccctttgatcgcagctccgaactactccttcatgcgggaccggacaggaagtcctacaacgtcgtactacgactatatcatcatcggtggtgggactgccgggtgccctctagccgcaacgctgtctcaaaacgccagcgttttgctgctcgaacgcggtgactcaccgtacaataaccccaacatcacgaggctctcggctttcggagccgctctctctgacctgtctgagtcctcaccatctcagcgttttgtatcagaagatggtgtcattaatgcacgtgctcgggttctcggtggcggaacgctctcaacgccggcttctatacacgtgcgggcactaaatacgttaggttagtgcatatgtatacagtaacactaatacgcatgcatacaatttacatggaaattaatatattatcgagtctcattcttactatggttggtgagacagtaataattgtagacattattatat

SEQ ID NO: 19959 - DNA, 457 bp, Arabidopsis thaliana
aggattcagttttgatgccatttcctgagaagacacagccaaaaacaatgaacaacagaggaaaatagattgcttcctcttagcatgtaacaaaggtagtcaaactcacatgcaatttcccacggaaggattcaggagaaagtcgagagtctttcacctcttgctcgagcatgattagttcatgggaaggaaatatggaatcatttggaatagcataaacacacctctggatattcttaactaccacacagcaactcttgtaagtatctcccattttaacctgaattgttaaaaaaagagagaccgaattcattctctagattaaggccaaaagaacaactttaaaaatgaatgaaaaatctagagattcactttcccaaacagatatattgtgcccatgctcgcaccaaaagcctcctcataagcgtcaagaatgaagaaacgaggtgatccgtca

SEQ ID NO: 19960 - DNA, 2188 bp, Arabidopsis thaliana
cgcaagcatggagtcgagtcggctgtctatggagggtggagggggggggggcttggatagaagaagtgataggtggagaagcaatgcgtgtagatccttgttcctctctaggaatgtcggaagccttagccaattttcttcgatgactatttatatcttgtgtggagagacttgtgacagcgttgttgataagaactagtgcttcgcttggagtgtttgtcatgaattcctagtactcgcaccatcagaacaatacgtatactgcctatcgattccgcggaagaatattttgacgagatggctttcctggaaaccatgttgtgggtaatcctctcgtaggatttgaatctgatccaagctgccttcaaaccttctattggagcttgagaaaacaaagagatcttctcccttagtaattctttcactgaatcatcaagaaagtggatcatgaatgcgttcttcgtgtcagtctaattggttagtgaacctggttctagttgtcgcagccatgatgttcctctgcctgcaagagagtgtgggaagagtttgcaaagaagataatcagctggtacaccatctgctttgattgaggacactaagtcttagaagacctctagatgatctaggggtgattcatcagaatgaccgcgaaactttcctcgtgaacaagattatagtaggctgggtgaatagcaaagtcttctcttgcaaaaggagctagctggattgctgatcgattggagtagaaaagatcagcgatgttgaagtcgcctatggtagctggtttgttctgcagatattgtcgctcgacactgtcgttgaaatctgccagcagtttgttgggttccatattatagttcctctgtcacaggaaaaagaagaaagaaaacgcgtgagaaacaaaattaagagaaataaaaacttagactaaattttacacctagtctaatggtgaatcacagagaacttcgacaacggtgccaaatttgatataggtcaaattaatcgtaagaccactctctcaaataaagaggtcagttgcaacacttaggaatcgaattcacaaagttctcggatcacgcaatagacgaatggcaaatcgaattatgctaagtaaaatagtaaataaaataaagagaaacaaaagtaaccaatagaaaattgtgagttgtggaaacaagataatgaaagcgtcaggtttagggtattcccaggagatagatgatagtagatctaataatagctaagttgttatcgaaccgttctcgaacttaaactatgattttagagtaaccggtggtgttccgcgaaactctctatgcctatagctaagaataaccggagaagtcgagagatctttaacttaaacatgcattattatcaagtttgattagttcacctagtatctaaaccagagtcgttgtatgagcctacatgttctttcttaaatgcctaggctcatctatgatagatcaaatagcaagtacctatggtgggcatacctatcatctaatatcaagttctagttaactactctaaaactagcattaagattaatcaagatgaagaatcctacagataacctagcaagggggcaatctactaaatcatctaaatccctaatgataaaccctaaacctaacaagtggattactcaaacatgatcaaagaaacacaaatcatattccgaataagaaattaatgatgaaaataacaagagaagagagtaagaaagatccaaaagggatttttcacagggttttgctctccaaagtacaaaagagatccagggaatagcctcccaaagcttacgggtctaaaacaatgacctaaaaactatatatatgtcttaaaaacatgatgggccttaattaaacataggagaaagttctgggccgaatttggaaatcttcaaaacatcaataagttgcgtctcgaaattgcagtcaggtattagtgttgctcgacactaggggtggtgtcgttcgacacccacgtgcattttcgtctccagattgcttctgcagcttaagttgtctattgatctccagaatactccataatctccaaatgcatcctaaacatataaagacctaaaaagaactagaaaagactctagaaataacaattagactctaaaacctatacctaaatcgtagctaaaatcggtaaaaatagggttatatca

SEQ ID NO: 19961 - DNA, 558 bp, Arabidopsis thaliana
tgttacaaaatacttattaaagaggtatgtcgtatttttatctagttcttcgttgttaaaggctaattctttcttatgtgatggtaaatttaagtgtaacatcttactccatgcagtggattgcaagaatatctgaatgaacagggtttcaatattgtcggctacgggtgcactacatgcatcgggaattctggggaaattaatgaatcagtgggagctgctattaccgaaaatggtattattgagattcccaactaaacttactttggactttccatcctttatattactattatatataagtaagtagctgatttgttttcaatatttgtgttgcttggttttagacattgtggcggctgctgtgctatccggtaacaggaactttgaggggcgtgttcaccactaacaagagccaattaccttgcatctcctccgttggtggttgcctatgctcttgctggcacggtaataaatcttgagaacttgtcaaagttcaacttacattttgtatgagataatgacacatgactgattacacattggtaattttggcgt

SEQ ID NO: 19962 - DNA, 537 bp, Arabidopsis thaliana
atactcttattgggaggaagagaagccaaataagttttcatctccgtcaagacggtacaccaattactcgaaccatggtgagactcttaatcatgctgagtcaaaccacttgatcttgtcgagaattggtgacctgttctcacttcatttaatacttaaaggtctctgacctagggaatgtcccggtttattccggttttcttaataattcccagaaccaggaataaggtacggttatgaactcaaaccatttattttcatgcataatagtataaacttatccattaaagttttatgtttaactctagtcggcctttgcggctgaagcgcaacatcttgacctttgagacgaccagtactcctagcagcaataagacctaccttctgtctaggagttgcatcggcctaaccgtactaaagtgaccaatgtgttgatggttatctcttccacgacgatgctccactgcgttatagcacactacgaacgttaggccatgagttttctcttcactcataaacccttgaacaatagattgt

SEQ ID NO: 19963 - DNA, 680 bp, Arabidopsis thaliana
ggaatctccagaatactgacttgcgacttgttgagaatgagtgagcctgaggtcgtctaagcaactccaatagagaggcgaagtccagctaacaaagactcatactcggcgtagctgttggaggcgttataagcgagccggaaagattggttgagaatttcgcctgaaggagatttgaggcaaactccggctccggaaccgtgttttgaagaggcaccatccacatgaaaaatccagggttgacttgggacatcggatgcaggactagccaatgggagctcaatcaggaaatccgcgagaacttgagacttcaagcttgttcgtgcacgaaaatcgagatcaaactcactcaactcgattgcccacttcgccagatgtcctgacttggttggactatgaaggatggtccgaagtggcagcgatgttaaaagcacaatcggataagattggaagtatggtcttagcttcctagctgcggttacgacagctaaggccaatttctccatcattggatatcttgtttctgcatcggagaaagacttactaacataagagataggtcgttcatcactccgctctacgcgtaccaagacaccacttattacattctctgagacagaaatataaaggaatagtcgttatccgaactcaggctttcaagaaccgggggctcggatata

SEQ ID NO: 19964 - DNA, 458 bp, Arabidopsis thaliana
tatgtggaaaaagatgtaatgtgactatccttcactagacatgagccggagatccggtttccggcgttggaatatcagccaacatcgccttgcggcctctctctgaccggctgttttcagcaaatttaatgcttccttcgtgtagtcctaagctcttctcttcctctgtccattccgctccatagtaatgctcttcctttgatttctctccatcttgtgatggcctcaagaacatgcttccccactgcggaaaatgtataaacgcaaccggaagagagcacacaacagccataacgcccatcaacgatagtccttccgccgtactaaacctcgaggaagagaagaaaagaagttgagtaactccgacccaaaatttccaccagcaccagttaatcctgagataagtccaagagaacggcgggaaacaaaaggagccacaccaaagagagctccacaag

SEQ ID NO: 19965 - DNA, 582 bp, Arabidopsis thaliana
cgttatgcgagcataacagcaaggtgcaggaagcgttttacataatacagagcttaagcaacaagcagaaatgctgcacgcatgatttctacaaaagcgtaatcacgagtctctgcaggaaaggtaacacctttgcagcgttccagctcttgtacgagatgactaggtgcgggtttgatcccgatgcgcacacctactcggctttgatcagagggctgtgtctggaagggatgtttacaggagccatggaggttttgtcgataatggaagagagtgagaattgtaaacctacagtggataactttaacgccatgatcctagggttgtgcaagataaggaggacagatttggcaatggaggtgtttgagatgatggttgagaagaagagaatgccgaatgagacaacatatgcgatactcgttgaagggatagctcatgaggatgaattggagctggctaaagaagttcttgatgagctacgattgcgtaaggttataggacagaacgcagtagataggattgtaatgcagttcaatttagattgatgggtaggaggcgaagataacgaacaccatgaggctt

SEQ ID NO: 19966 - DNA, 1129 bp, Arabidopsis thaliana
ttcacctcacagttcactcgaccactcctttatttccacggtcaaaccgcacaggtgctctcctcttcttcaacctcaccactcgaccaccgcctcactctaaccacgaaactagtttcgctcgaccggtacactggttagattgtgtttttggttttgctgttactaacgtattaacgtttatctttgagtttcatctgtctccaggtttcatcatgagtaactacagtggagaatcccctatggatcctgattataatgtggatgaagctgagtcttggtccactagaccggagagagaggaacatgtttacgagagcttcagggatgaatttgaacgctccgcagctcgacgtgatcagagaagagctaaaattgctagaggaaagagagcgatgtcgagtagatatgagctgattgataaggacatcgaaactgagtatgagccagagtcatggcgcaaggagacgaagctactgaataaacccgacgaggttacaatggaggagtatatcagattctttgagatgaacgacttctggggaacgaggtatccctgctatgagactttcgtctagctggggttactggaggacgtgcagcatctgttcgagaagtgtcatctgaagacactcatgtcttacccttacgctgcctataaggaggagacgatcgagtttctttccacactgcaagtagaaatgtatcagggtctcacggactttgagctggataccatgggattagggttcttgacgttctcagtggatgaacagcggtatcagctttcgatcaagaagttggaagaactgtttggtttccctagtggaaagggaaccaaacctaggtttgacagggaagagcttaaggatttgtgggttactattgggaacaatgtaccgctaaactctacgcagtccaagagcaaccaaatccagagtcctgtgattcgctactttcagcgctcggttgccaatgttttttactccagggagtctacaggcaccgtgtctaacacggacatggagatgatagattccatagacatggagatgatagattcctcgcttacaaagattcttcgccgtacaaagggaaagaatgtcttgagaggcgatctcaacaacgc

SEQ ID NO: 19967 - DNA, 1383 bp, Arabidopsis thaliana
tcctactaatcacctagcaaagggcaatctactaaatcatatgaattcctagtgacaagcagtctactcagacatgaagattggacaaacaacatgattgagtgagaaagcataaacaaatcaatagagaaaagagttagaaaagatctcttcaatgttattgaaaatctctgaatgaatctctgaatacaggggatgaataacttaatatctcaaaaagaacttgatagaaaactccttcttgtctaacaatgaactttaaaactatatatatgacctaaaaagacgtgcaggaacaattaatgaaaatagggaaatcttctgggcaattttctaattcttcaaacttaaaagcgtgatggacttctctgggccgcaacttggtgtcgatcgactggatctaaaaagtgaattcgtcctttagcttgttttcttcagcttttgctccaaaatgtctcctcatcttcattgttgtccctctccatagaacacctgaaaagactatagaaataacaaaaagactcaaaaaactatatctaaaacatagttaaaaactgtaaaaatagggttatatcataaagctagattggttgccaaggggttcacacaaaaagaaggtgttgattatactgaaatattctcacctgttgtgaaacatgtttctatcacgtacattctgtcaatggtagcacatttcagtatggaattgcagcagatggatgtgaacactgcttttttacacgggattcctagatgaacactctctgtatggtcttaagcagtcacctaggcagtggaacctcagatttgatgaattcatgaaaggaataggttttgtcaggagtgcttttgacagttgtgtttactataagaagctaggcaagacatacacctacttactcttgtatgtagatgacatgttaattgcttcagtagacaagtctattgttcaggaattgaagctactactgagtaaataatttgaaatgaaagacttgggagatgctaagaagattctaggtatggaaataactagagatcgagaagctggaattttgtctttgtcacaggaagcttatgtgaagaaggtcctgcgttcaacacacatggatcaatctaagcctgtgtcaactccaattggagttcattttaagctgagagcagcaacagaagaagagtacaagaaccaatttgaaagaatgaggtttgtccatatgctacacagttggaagcataatgtattctatgataggcactcgaccggatcttgcttaccattagatgtgacagtaggtcatgagtaacactgaaagacactggcaacggcaagtgggtcttagatcatgaagggtcagaaccaagaattgtctcatgaacagatga

SEQ ID NO: 19968 - DNA, 1559 bp, Arabidopsis thaliana
catgggcttacaggacagccttcaagacccccattggtacaactcctttcaatcttctctatggaaatcatgtcatctacctgttgagctcgagtacaaagcaatatgggcggtaaaacttctgacctttgacataaaaactgccgagagaagcgattgatccaactcagtgacctcgatgagatccgtctagaagcttatgagagttcttaaatctacaaggagagaaccaagcttttccatgacaagaagatcatcactaaggatttccaggttggtgatcaggtgctgctattcaactctcgcttgaaactctttccaggaaaatttaaatccagatggtctggccccttctgtatcactgaggtccgtcctaatggagcagtcactctagctggtaagagtcgagattttacagtaaatggtcaaaggctcaagaaatacttagcagaccaaatccttcgagaggtgacatcggttcatctccaagaacttcttgatgattaaaggagtaaaggagtcaagctaacgactttaaacaagctcacttgggagaaagtcccatgactatttctgtaaataaatttttcttttcttgttatttttgatttgtcttagttgtgtttgtggttttcaggaacaaaggaacaacgtggagatagagtaaaaattcaaaacttttactttacagaagacttggagatcgagtgtatagcccgttggagtacaaaattttgaaattcttctgttgaacctggacattggtcgagtacattggtcgagtatgtgtgatgtttaaaacccaaacaaaatttgaatcaatattttactcgaccaacagaagctacagagtcttacagggagtttatcaagtttacagtagatttcatgcagttttcccagtcaactgagtgtggaccacgcgctgaggataagatggagagagaatctcaaactcaatctccaccactccttttaaaatttcactcgaccatactatcttctattttccaccactcgatatcaagaaacaactcgacctcataaacccttgccgcactcgacctccgcgtgacagaactactccgccgcctcagctgagttccacgactcattcgaccacgtatcgctatctctcaccaagatttactcgacccttctgtttaatcgacctccaaaaagaactcgacctccgcgccgccgtcaccgagttcatttcctctgtcactcgaccttttcaccttgccgttcgccatcactttgttctcgcaacactcgaccatctttgcgccgccgcaatcgagtactccgcttcgttcaccgtcgaaggctcagagactactcgatctcaagtatccactcgacctcttgttcttgcaatcaacagagccattcaacttcagagagtttactcgaccaacggtttctactctaatcgatccaattcgagttagtgtaactcgagaacagcttaggttacccttatgtagcatatgaagaagagacaattcaattcctctctgataacactgtattttactcattttaggtgtatgttt

SEQ ID NO: 19969 - DNA, 1060 bp, Arabidopsis thaliana
attcaaaccctcgaggacatgttgagggcatgcgtcttggattaggggaggaaactgggagaaatatctaaggttagtagagtttgcatacaataatagttttcaagctagtattggtatgtctccctatgaggcgttgtatggacgagcttgtagaacaccgttgtgttggacgcccgtgggtgaacgtcggttgtttggacctacgatcgtggatgaaaccacagagagaatgaagttcttaaaaatcaagttgaaggaagcccaagatcgacagaaaagctacgccaacaaacgtcgaaaggaattggaattccaagtaggagatttggtgtacttaaaggcgatgacctacaaaggggcagggcgattcacctcaaggaaaaagttaagcccaaggtatgttggcccgtacaaggtgatcaaacgagtaggggcggtggcatacaaacttgaccttcctccaaaattaaatgcgtttcacaacgtcttccatgtgtcacaattacggaagtgtttaagtgatcaagaagaaagcgtggaagatataccccccgggttaaaggaaaatatgacggtggaagcatggccggtacggatcatggaccgaatgacgaaagggactcgggaaaaatcaagggatttgttaaaagtcttgtggaattgtggaggccgtgaggaatacacttgggaaaccgagaataagatgaaggccaattttccggagtggttcaaggagatgggtaaagatcaacttgatgcggattcgaggacgaatccaattcaagggggggagacttgtaacgcccgcgatcctcaataggatcgttggctaggacttggtccgggagaagaaggtggagtctcggacaagtgagaaagagctggctataagctcggacaaaggggaaatcatgcgggctaagctaggatcgtaaagaaatcacttgggtcagctcgcccaaagctcaagctcagctggaaggagtgacagttactcaggtcgagtgacagtccagctcgggcagctggacgagtgacggatgagctcgaggtagct

SEQ ID NO: 19970 - DNA, 1976 bp, Arabidopsis thaliana
taatcgatgaaaagcttggtgctctaaacttacatcaaatcaacccggacgcaaatccacgtctaagacaagaagaaccaagggaagatgaagaggcaagaaattactatagtcacacgtcctctcacagtagccaacgtaggcatcgacgagagagaccaccacttagagatcccttgggaggcctaaaactcaaaattcccgcattccatggaaccaacaatccaaatacttacttggaataggagcagaaaattgagttagtctttctttgtcaagaatgtcttgagtccaacaaggttaaaattgcggctactgagttctacgactatgccttaagttggtgggatcaacttgttactagccgaagacgtacccgaaactatccgatcgaaacatggaaccagctgaaaaccgtcatgcaaaagagatttgtgtcgagttactatcatcatgaactacatcagcggttgagaaatttggttcaaggaagcaaaaccgttgaagaatactttaaggaaatggaaacccttatgttaagagctgatcttcaagaagatggagaagcggtcatgtcccgattcatgggaggtcttaaccgagaaatccaagaccatctagaaactcaacactatgtggagcttgaggagatgcttcacacagcggtcatgttcgaacagcaaatcaagagaaagaacgcccgatcaagtcacaccaagaccaactacagcccgggaaagccaagttatcaaaaggaagagaagtttggttatcaaaaggattacaagccgttcgtcaagccaaaaccggtcgatctagatccaaaaggaaagggtaaggaagtaatcacgagggctagagatatccgatgctttaagtgtcaaggacttgggcattatgcgagcgagtgttccaacaaaaggatcatggtccttagagaccatggcgaagtagaatccgaagatgagcgtgcggaagaagacttaatggaagaagatgtggaatcccctgctagaggagagttacttgtttcgagaagatcgttgagtgttctaactaatatgttgcgtttttggtgtcttaggtcctttagttttgaatcgtttgtcgtgtcatagtccgttttttgtgtcttttcggttgtgtcttgagtcatttgcaggttttaggtgtttaagcgggataagatgcttacgggacttattgggctcatttggaccagaaacgatggcaagaatcgacaaatcgagggtccgcaactccggatcgatcgatccgaggaggggatcgatcgatccaccacttattgtcgaagaaaatcatccgcgagcgagtcatctaacgaagaaactcacctgccagctcgggatcgatcgattattaaacacgtaacatttgatatagattagggatttttgaatgtttagtttgtaaacattggaattgaagagattgattatattcttataactaatatcgatcaaatcaaactattaacgtataagaaaacttgcaaacacacctcacaatacaaattttgaaatgtaagactcgagcgtccgtaatacgtagcttaactgtagcaaaagtgcaatgtttttgcgactatgtttttttctcgctaagtcgttggcaaaaagtcgctgatttgagattgttttgcgaccagtttattgtttcgttaataagcgacggctttgcattcattttaactgcagtcgttagtcagtcgcaaaggggtcacaaaaacgtcggtttagtttgcgaccgaaaataatgtcacaacaaagagtcccaaaaggcaggttttcttgtaccgcactatctcagggcaatcaccgagtgattccaacaccaatttctcgttcgaaagcgaagcggtgccgtatgaatcggtcaacttcatggacataagagttgggaagttgctggagaatctagtatttgttgctatactgacagttgagaaagttctg

SEQ ID NO: 19971 - DNA, 725 bp, Arabidopsis thaliana
gtcaaagttttctataatgacttgtttgtgtttcagaactgtttagcgtgatgaggtgacatgagagctcccagatatggttacttttgaaatgtctacaatttgcatgatttcagtgttcattcatcatcgatttgagtttagtttcatatcattcatcactgttttatatcattcctcaacattcttgcatactttgcatgattaggataggtttgcatacatattgcatttctgagatgttttaggtgatttggagctgttggcaagcaaattggatgaagcaagccggaaccagaagagttactcgaccacctggttgagtaactccagcagcacactcgaccccctggtcgagtaacattggagccattcttaccaatcattcgaccccctggtcgagtaaccacactccaggccacttgatgacaccactcgaccatttggtcgagtaacacttcgtcataccaactgaccaccacttggccgttcactcggccaccgtactcaaccccctggttgagtaaagctgtcaccacccaacaccatcactcgaccaagcactcgaccacatcttcagagtttactcgaatctgcactcaaccagacaagctgaacacaaggaagagaagaggagtagaagaagtgtttggaagcggtccagagcttcatctaatcgcgacgccatctcggcccattatcagtctataggccggtcgattggg

SEQ ID NO: 19972 - DNA, 1077 bp, Arabidopsis thaliana
gttatggctgagttgttttcatattatacggctgagttataaatttagttagttatggctgagttatatgaatactatacggctgagttttaaatttaattagttatggctgagttatatgaatatgatacggctgagtttagttagttatggctgagttatatgaatatgatacggctgagtttagttagttatagctgagttatcttcatattatacgactgagttatatttatacataggtatgagttttcgttatttaacgcctgagttttcgttacgtttatgcagtcgaaacaagctgatgttggggtaagtaggaatcttgaatgagaatttgctaaggtatccattgtgtctgattttgatttcgttgagactgtttctcctctcaaccgccgtttacgctctaggaagccacaatccccaaatgtgccaaagcaaaaaaaggagaaaacattaaatgagctaatccagaaaccgccagggagaagaggaagaaagccttcgcagcagcctaaaaaggtgcctcctactgtgccaaagattacaataaagaaaccaaaaccatctattgaagctaaggaaaaagctgaggaagattcggatgtcacggataaggttgtatccgagtataatgaaatgcttcttgaatctgatgaagatgaggaggaaaccgagaggctaaagagtttaaaagaaattcggctcaaaactgttaagctggtcccggatgggagctcattgattaaccccgaagctatgcccactcacacttttccagttattggagacaacaggctgagctgaatgagaaagggttgtctgccttcacgagcaatctatgatcctcttgcaccgttaatccggccaaactgtagaagcttaaggcttatttgacaagtcccgaatggtatggccttttatacattactaagttgataaatacgacatgcttacactatttgtttatattaactttctttactatttgttagcaaacaacctttggaatatgggatggacaaggtgctgttctactctgttatcatggacaaagtatgtaggtagagtcga

SEQ ID NO: 19973 - DNA, 1714 bp, Arabidopsis thaliana columbia
ggaccacactaacggtgactatatcaatcgccctttttctccagattgggatgattatgatactctgttctataatgcctgaatgagtgtagaaattttgcttactcgggttgcagatttcggtttgatgcaacatttgcagatagagaaatcggttttaggactgctagatgacataggtttgggaaccatctgttgtaggcagtacgatttgtatccggaactagttagacaattcatggcttctgttagggtctactatgtgaatgacaggaaacgcaatgctcaggaaggagctctgatcttcttccctcgcaatgtcagatacagtctaccactcaaagcattatgcgacatttatggctttgacaatgatctcactggagtttcactgcctagacagttttaggatgcttaggttttctggagcagggttggtaatggaatttatgattccaaggacgcagtacactcagagattcgtcaccctgttctgcgatatttggttaggctaatcaacagcacactcttgtgcaagatggagcatggcaagatgagactttctgagttgttattactttatcatgctgttcatgatttcttttcagatagcttgggatttgaggaggttgaccgcgatgtcaactttagcgctgtctttgctcatcacttggtttctctcaagaccaagccctttacaggtaaagggaagaaatctgagagagttggcagtcttctcactcctatatttcagcattttcgcatcagctttgagggagaggaggtcaacaccacgagattcactatggatgagacttatctgaagaactctcactggcttaaaggcaacttactatggtgcgtcagagatgatacatggcaacatatgattcagttaccttgccctgcgcttacagagattacaagagagcatgaggttggttttcataccgatccttaccttctgcattccgctccaggacgcagagaggttcaagttcaggatccgcacctactcagactgaggatgagttcatcgaccctgctgggggtcctcgagttggctcttcctcttcagctctcccatatgagctgtcttctcctcctcctatcctgatggagccacaggtctttcagcagtacgtcgtcgacagcttcaagagcgccaggaacgccatagctacactctgtcgcttcggttgtgttgctcccactcgtcgtcgtcatcgctctcccgcacccacatccggcttggagcatgaggattagctgtcctccctatcttgctttgttttctaacttggtttttgctttatttcagactatttgttatttattttggaacttgttgcacctattttcttatgctttgttggaactattgaagtgttttttagtgatataacagtctaactggaggatccatgtgaaaacactaacctaagctctacaacattgagctgaattcgcaaagctctgcaaacgaccagagtgtcgatcgacaccacccaagtatctatcgacaccactctcaggtggcaactcacgtttctctaacttttgacttttgactatttttctttcgattcctctagcttaataactctggggacagtgttatttaagtctgggggagtcagttactaacttcatcttttcttttcttatgagtcagttgtgtcattctaacttagatagttgttttattgagtca

SEQ ID NO: 19974 - DNA, 2078 bp, Arabidopsis thaliana
gggctcggatgtgccctgccagttcgaagtccctgcttcagcaactaccggagctcgggtccttcagagaagagacggctcggggtcctcaggcaaatctaactcccgagcgatatcggcagtagcatcttcccgagccgtgaagggaatagcctgctcggaagcatttgaagacgacaccgcgtcgccctccgacgatgtccaaaccatctttcgcttgtagataggaggaagatcgtctcggtgatttgaatcgcttgagtcaacgaggtaatcgctgggggccaaaggataggggttagagtacgaagaactcattctcggctcggaattgtctaacgcaatgaggatcggagaatagaaattttctaataggcaaaaccaaaactaactcagaagcggcggagttcaccggaaaaagagagaattataaggaaatcaagatcagagagaagagagcaaaccttgaaatttttcttcggaaattttcaaatgagaatttctcaaggaggtggctcgatatatatagaacttttaagggcccgtcgggtccacaacaattggtgaaacgcgttaaaagcgcgtgggctcggtagagaaagatacgtctgcgtgatcctcgggaataagcaagaaacgtttccacttctcaagaaatagtcggctacacgcaacagaagtttgaccgtccaggaagatgaagcgccagagttatgatgcgggaagaggtacagtcggctcgatcacccactcatgaagctcatcacctcttcctctaaagtcaatgagctggagggcatactgttggagtcggatttcacccaggtaaccgagccgatcagacagatgccacaagtgccgctagagctaaatttgccgtctccccgaggcgggaacgttatcctttatggctcgggcgtcactccagaaatatacccgagccggtcctcgaaacacctcgggcaaacatcacccgactcggtggttatcccagaagatgcttgagctgagtttgacaacgatccgaggactggtttgacctggctcggatgaactcttggcccgagccaaagacacacgtacgtccgaggagaagacttgtgaactttgaaggggccaaaatatcatttccggaaaacctggaaatgatattggagaatcttcgaggatattatcaaatctggaaatcttcctgatgttcccgaagaataaggaaaatctccatttatgaaagatcttccatcgccgactccgagataaatgaaaatcttccgagaatatcgcgagaggtggtttatcaaagacctatataaagcgcctcatagaataaagaaaaggggtagagaaaaaaggctctccacttcaggctatcaaaacgctctgactttgaaggctaaaacacttatctttacctttctaaacacttgtacgatcgaatcatcatcttttcaataataatatcaagaacattgtccgcggtaatcgaataattctgttgttctttgagagtctcgcaaagatctgttctttgaagaaaccctaactacaatttcggttgtgtgagtttcgactctcacaatttggcgctagaaggagggggagagatttctcttactccaagaacacagaaccgacaaatcaagtaacgatgaccaacaaccagatcccccttaccaccgttgacgtggagggaaaccctgttcctccaatccaggtaaacgctcctaaagtcaacgctcccgcagtcctagcaaagctgaggagcatgatggcacaactccagaagaaggtgaacgatcaggagcaagcaaattgatccttgtcccaacagctcgaagtggctacttctcaagggcaggtcaggaccacccgctttggcgcacaacactttcctgatcggtgagcagcggtagatctcaatccaacgagactcgtgttcaacacacaccggtaacacgacgaggccattttggcggactgcgcagacgtcggcggaacccgagcagaacatgacgaaccgagtagaggaagccacccgcagtcccgattcccgagctgaatctgacgaggctgacgag

SEQ ID NO: 19975 - DNA, 942 bp, Arabidopsis thaliana
ctaaagcacggatactacggcccgcgataaagacgtgaatcggaatacccttgaacagcggcagatcttccagcgccaggcctccggtgacggtgactttgaagcccatatcggaaagacgtttgatcgcggtgatgtccgcttcgccccacgccacgcctgcggcctgcgcgtcacggctgcggtgataaaccacctgcccaatgcctgcatcgcgccactgttgcgcctgttcccaggtccagtaaccggtcagttcgatctgcacgtcgccgttaaactcttttgccacgtccagcgcgcctttggcggtgttgatatccgcacagcaaattaccgtcacccagtcagcgttggcttcgaagcacatacgcgaaaggattttgcctgcatcggcaattttggcgtctgccagtacgattttgtgcgggtagagcgctttcaggtcacgaaccgcacgcacgccttcgcccacgcacagaatggtgcccacttcgataatgtcgacttcttcggcaatcaggcgagtggtttcgtaggcgctatccatagtctggttgtccagcgcgacttgcaacatcggtaatgacatgttcaattccttcttaagctgccgcgttggtgcggtcaatgagatccagtacttcctgctcggtacggcaggcgcgtaaacggtcaaaattctcttcatcttcaaacaggttgacgatctgcatgatgcccacttcctggtgagtattggcatcgaccgccgccatggtgatgaggatatccaccggatcgttgtcatcgtggttgaatccagcggctttttcagcgttaccagagagaaacaggttttcttaacgccctcttccggacgcccgtgcggcattgccaggcccggagcgataacgaaataaggaccgaactgttcaacgccatccagaatcgcctggtagt

SEQ ID NO: 19976 - DNA, 1071 bp, Arabidopsis thaliana columbia
agagagaacaaaatatttggtaagatttgtttcgtggtctttgtatacagtagttacaaaaaggagagggacaaaacgctgcgtttccaaagactagatttcttgggacgtggtggtctgaaagcatagttgacgccaaacatctctgtggaagtcaacttcatgtccacgaacccattgagcttaccaacgagggaggcgctctctcggacatgacccatgtctttgtaatccgaccagagacgacgcgccactggacccgtctgtgattcgtgttgagcccaatgccccatctcaagaacaagttctctctctcttctttcgacagtttcctctgcatcagcttgctcagcttatacctctccctcgtcaatgccctcgtgctgcttgtttttatatatattacattactttagtgtcttactaaaccaaaaattaacgaggtacaaaaaaagatacaatgtgactttaccaggagattagggtcatattgttgccatcgttgctattttgggcgaaagattctctgatgtacttaagtctacggagctctacctccaagtacaagcaatctttctgatctcctctgaacagaaggaagaagtagcttctgtgtgccattgagactttacacacgtgccatagctctattatctccctctgtagcctcttgaactccactggccaattcaaggccgtgtctaagtagtcttgtattgggtccattgctgcgtccttgaaactcttcgttgaattcgaggccaagaacttctgttccctttcctccatctgcccacacatgtcagatcaatcacacatactaattaggtgatttatcgaaagcaagtaaagcaaaactaaccgatcgatgaatgatttgcttgtctttttgagcagcagtctcctctgttctgtcctggcttattgaagctctaccacttgtctggagctcaaacacagaagcatcagatggccgaaatggtgattcatttggcgacatttcgttgctgacaccatgtgaagcagcatcaccgtttgagtgtactcaagcttctctcgaaccaagttgtt

SEQ ID NO: 19977 - DNA, 1575 bp, Arabidopsis thaliana
gatttaaaactcattcgtaatctttcgatacctaaagcccaacacccgaacgttggcagatccattttgtgatctcgcttccaaaaagtcaacagtgaactaaaacttataagaacacatcattgcggcttcatcggagctcacctactacaaccaaatctaactctttcgctatcaatgcataacatagtaaacaaagaagaaacgaaggtttcattcgcgacctggcgataccacaagcccagctcccaaaatctggcaggtcccttgtgtgaccgcacttcaacaggttcccaagacaaaacaactcaaactcattcaaagttttaaccttcgaggaacataccatatcacgtccaaaatgatttggacgcgaaacaagtccaatcattatccagaacatggacaaagcgaggtggtctcgcgccaaaatcaacgaagtgtcaacactcgaacgtaagacaaaaaatacttgttaaaaaggataaaagccttcccagtcattcgagtacttaaacgaagaaaggataaaagctttccctggcaccaagttcaaaaggcaataaacgaaaggataaaagccttcccaagcattaagtctgaaacaaaacatgaaatcctaaaacaaacaaggagcgaaagtgatcactccctcgattcttcagctggcgtacgaagacagtaccagaaccctccgcgagacctcccggaaacgcatctttgttgctcccaaactcatccaagccaattggcgtcccttgctcgtcgacgtccatcggacgtaccaccgaaatctctgaaacctgcgggagatccaacttgcttagagtaaagtttgatacctccttcgacttgcaccgcgcctctaggtcatccagctctgcttgaagccgaggtctctccacagtcagatcaatagcagccttagtgatctggtcgatcaaagccaggttcgattccacctcagccgtttgcccctccaataccgtgtattcctttttggcgacccacttctccttgatcccagccagcagtttcgaatacgcagcagccagctcaatcttacatcgtgaaccgccttctttgccccttgtgcaaccaaagtcaggtccaccacctttttggagagctcttccctcttctgctccaagcgatggatctggctcctcactgtctacttgtcagcttgcaaccccccgatctccatctccatgaacccgatcttctcagcaaaacctttctcgaggtcttttgaagtggacaactccattttcagcctctcgaactccgccttaaattacaatcaggtcagaatcatcaaatcatcgacgaattatttataagcaagtcaaaaccgaggtgtacctggaacgagacttcgcgatcctgaccagccttcacacttgacgtcagctcccagatgagggcctttccttcttcaagctcattcgccgaggggaccttgctcatagagagcaaccagcttgtttgtggcacgtatcgcctaccaaaagcaaaactgaaagtcataactagcgaaaagatataaattagaaggagacagttagcgataat

SEQ ID NO: 19978 - DNA, 570 bp, Arabidopsis thaliana columbia
cacatggataaaatcaccaggaacaagatctgcataatgtcaacaaactatcagacgatgactgatatttgaaatcacaaatttgctccttttatagtgggaattagaactttaccgcagacgtgagcaagaatgcatgtaagaagggagtatgaggcaatgttaaacggtacgccgagacccatatcggctgaacgctgatacatttgacatgaaagttctccatttgcaacataaaactgtgcaaacatgtggcatggaggaagtgccatcagcttaagatcagaaggattccaagctgacattataatccgtcgatcatcaggattgttcttgatcttgttaattacatctaagagctgatcaaatccttggccagtataatcagcatgcatatctgtgtacctgtagagagagatgaacaaaatgtctcgacacagaaatctgttttgccaaaactcagaaagtgtcaagagataagagagaagctactgacttagcaccaaagtgtctccactgaaatccataaacggggtccaaggtcaccttcctctctctcagtcagtccaa

SEQ ID NO: 19979 - DNA, 606 bp, Arabidopsis thaliana columbia
tagaggatcccctgtctttaaaatctcttaatttcaactggatataaaattgaatatttttgtcttccaaatattttttaaacttaaattactgtatttagcaaacgtttttttttggttaaattaggcactttccattaaattcccaaacctaaaatctcaagttaatagctctcacgtatttatgctcgcatgtatagaaattacttgcttcgaaattaacaaatattacaatttgaaattatcctaagattcaattatcagtgacagtgacatataaaaatttatatatatgtcatttgaatccattcatatttttttataacaaaagtaaaccgaaaaccgaaaacaaaacccaacttagtttcaaacttcaagcacgacgatgtaagttctcatcgtcgtcgtcagcagcatcggtggctccagcagcgagatcaagaagctgctccatctgcagtgtcatctccataagcgtcttggaagcagtgtcagtgtttttctcgaccaaacccttcacacgccttgtatcatcgccagaaaccatgacgtcgtagttggcagtgtctggtgagtcttgagttcagtagagcgtctttagagacg

SEQ ID NO: 19980 - DNA, 553 bp, Arabidopsis thaliana columbia
gggcagctcaattctcgtgagttatttacgtacagacgagacctaccttagctaggaaaaaataaaatagcaactttaataccataaaccgaaatagagatacaaaaccgtataaccatatataattcttgcgttggaaacttggaaacgaggaattacaaattgaccaacggtttcagaattgtgccaaaatggcataatatggatttggcccccatttttattaatgtacaattttgtgttgaattcgaagaaacctgatgtagagcatatcattacatttttcatataaatttattgatttacatagagacaaacattatagtcattttggtatagattttatacaaactaaaaaacgaagaaaagtatatcaaactttatatacacatacgaaaactaaatctagaaacgacgacaaagacaaccgtaacaattaggaacaaatctcctaattcacccttgtgctaattagaactttcgtacgggtctactcgcatcttggcaccatatcttgaagcattttgagcagagtcgtggtggtcttgatggt

SEQ ID NO: 19981 - DNA, 589 bp, Arabidopsis thaliana columbia
gaaccagaagagagattccaaggagttgcagaaccagatggagaaactaaatgatgtttttagaagactttgttgggagaagattgctgaaagttacccggttgtcatctggagaaagccttctaatcatttgcagtgtaggaaaagactaaaagctcttaagtttcctggattatgctcttctagtgaccctgacgctgcgtggtgacttcactttcccaaaatctaatttgctctgcatcttcaaaagcttaagcttgattcggttggatctttttattaataggtataaagagatggagccgtgcatcactcctcttccagatgttaacgacacaaacaagaccgttctcaaaaactggcctgagagactaaaccatgtgcctcgaatgaaaaccgggtcgatacagggaacaactattgccggcttcaaagctgacacgaacctgtggcaaagaagagttttgtactatgacaccaagtttaagtttctcagcaatggaaaatacagaaacgtcattgatatgaacgcaggattaggtggttttctgcagctttgatcaaatatcaatgtgggttatgaatgtgg

SEQ ID NO: 19982 - DNA, 572 bp, Arabidopsis thaliana columbia
aaccaacgtccgaagaagcaagaaacctggcgtggatgaggactatgtcgaagagagcaagaaaagaagaggagaagtactacgtctcgacagaactaactctcctcaccgtcgctgacccatggattttgtagatggcaatgaccaaaagcagtattggcaacctataccgtcttgttctaaaggcgagctttgtagacatccacattctgagatatctccctttggatgatcaaatgatggtcaaagaagactctggattagcagtcgaggtgtatgatcacgacactgactctgtgcacaatctggctcttaagaaatgggccaaatcttcaagctttgttctcgtcagcggatggcgtaagtgctttgtcgacagaagaggtttgcaggttggcgatgtgattggaatgtattgggatcgttctgaatctaagcttcatttttgtgtgctttctcgttccgaaacaatggattcagctcctcttcctccaagtccataggacctcactagctatggaggctctcagagagatcttattgctttatgtaacgtcaacaagtgattgggg

SEQ ID NO: 19983 - DNA, 629 bp, Arabidopsis thaliana columbia
acatttttttggtaaatttaataatgtttgaaaacacttaattatcaataacattggttatagacaacacaattatttaactatattttaattttgtgttgtaaatatatgaagaaaaaattgttcgagccataaggtggaactgcgtgtggaaggcctttgggacttagcttcgagaagaaatcgggagatttgtatttttgcgacggttacttaggggtaatgaaggttgggcctaaaggaggattggctgagaaagtcgtggacgaggtcgaaggtcagaaagttatgtttgcaaaccaaatggatatagatgaagaagaggatgctatctacttcaacgatagcagcgatacgtaccacttcgggtattataacatcacttctctaataatttttttaattaaaaaaaaaaaactgaaaccaaaaaaattggataatttttagtgttctatgttgagaattgagatggttagaaatgataatttgcatgtttgtattttataattttacaaattgcaaaccacaaatgaaaataaaatttctcctctaacgtttgaggttacaattattagataaaactttgtttaaattatcttaagattgtagcttcacatctgagaagaaga

SEQ ID NO: 19984 - DNA, 617 bp, Arabidopsis thaliana columbia
ccttgctagaaaactggctggagaccaaaaccttcactttgtggagacaccagcgcttgctccaccagaggttcacattgacattgctgatcagcagaagaacgaggccgagctcttacaggctgcagctcaacccctccccgatgacgatgatgatatctttgagtaaatcatccttctagaatgtctgccgtgggaagctcttgcttgttccttttggttttctctatgttgttttggtgttacatataaatcaatcggtctttcttataacaaaaattaggtatgtatttttggatggttcttctgatggtatccaaagctaagttgtttcttcgcaagaatattagttgattggaaaactttattctacctcctattacttgccagttcttagatttcagatgccactctttagctaccaggtgatgtcatataaacctgggtaaaattagctgcaagtagatcttgttgggagacctgacctgcattgacaatggttaagttctttgcctccccgatctctctagctttgcagattcttctgcaatcctcttccttttcttctttgaaacttgatcttcttaatcaatccgcaccagaacttgtagaataat

SEQ ID NO: 19985 - DNA, 580 bp, Arabidopsis thaliana columbia
cttctttgggtatatgcagtcgttcacatgccattttcactatcaccgtggagcaaatgcgcaaaattaatacggattctcctgaaaacggtgcttacaatgggagcttgaaagaagaatatttgtgtgccaagttgcacttagtagatcttgctggttcagaacgagccaaaagaactggttcagacggtttgagatttaaggaaggttggcgttcttctgttgaatttggttttagactagttttaagcgtttttgatcttggtgctgtaatggaagttgattcttttcatcaggagttcacatcaacaaaggcctccttgcgcttggtaatgttatcagtgcgctcggtgatgagaaaaagcgtaaagatggtgcccatgttccctacagagacagtaaacttacacggcttttgcaggtatatttgttttcaaatcttcttgatattactctgttcaatgtttgctccattctcataagctttgcatgttaatttcttaggatcccttggtggtaacacagaactgtgatgataggtacctgcagtttctgttttacttttctgaggaagtctgct

SEQ ID NO: 19986 - DNA, 1017 bp, Arabidopsis thaliana
gtcgtcctgagtcttctaaagatgtcgtggtggttcaaatggatgctggaaacttgatcgacatcttcttaactgcggtacgtactaagctgacatcaacaaatgaatgatcaaatatcgtaatacctttttctattaaacttatacgtacatacatgttttctcaaagctacatttacaatataatgcaggagaaatgggcgaggctttttccaacaattgtgaacgaagctagaacgattcacgtcttggattccgttgaccatcgaggaaaaactttctcaagagtggtatgaatctttacaatattttaaaattttatttgttaagacttatgagcatttggtgaaaacaaattggatgataaataaaacagatttatgagcaactgcacatactgtcaccattggtgccaccgagggaatttatgatcctaaggacttgccaacaaattgaagacaatgtctggatgattgctgatgtgtcgtgtcatctcccaaacattgagtttgatctttcgtttcccatttgcaccaaacgtccctcaggtgtgctcattcaagccttgccccacggcttctctaaggtctctcttctctttaaaatccctttttattatatatgtaaatctattgtgttttaatatatagtttacaaacacacacacacacacatttttctttctaactattcccattgatgttgatcaacattttcatctagacatctacaattaatagactcttacctttatttctcaaattaaacttctgttcttctccatttcattagtgtatatatagagagcttcaataactttttagagaatatgtgttattgaaagcaaaaccagaaaataacaaaaacaaatgggcaggtgacgtggatagagcatgtggtagtgaatgataatagagtgcggccacataagctttacagagacctcttatacggcggctttggctacggagctcgacgttggaccgttactcttgagaggacgtgtgagaggctgat

SEQ ID NO: 19987 - DNA, 895 bp, Arabidopsis thaliana
aaataatgtttattgataacaattgcaggcaactaattttcagcaatcatgtccgggactattaatcccccggacggaggagggtccggtgcaagaaacccaccagtcgttcgtcagagagtgctagctcctccgaaagcgggtttactaaaggacatcaagtccgtggttgaagaaactttcttccatgatgctccgcttagggatttcaagggccaaaccccagctaaaaaagcgttgctcgggatccaggctgtcttcccgatcatcgggtgggccagagaatacactcttcgcaaatttagaggtgatctcatcgccggtctcaccattgctagtctttgtatccctcaggtttactattcaagactcctacgtactttttggtgcatatctttccttttatagccaacccatatctatattccatttttatcttttatggatgacaggatatcggatatgcaaaactcgcgaatgtcgatccgaaatacggactttgtgagtcttaaaacatttaaactaaagttttttttttcaattacgagatttgtggtagatccatagttgtgtgcaaagatttgaatgcatggctttttggtgtagattcgagtttcgtgccaccgctgatttacgcgggcatggggagttctagggatattgcgataggaccagtcgctgtggtgtctcttcttgtgggaactttgtgccaggccgtgatcgacccaaagaaaaacccggaggattatctccgacttgtcttcactgccactttctttgctggcattttccaagccggcctcggatttctacggttgggattcttgatagactttctgtcgcatgcggccgtggttgggttcatgggaggagcagccatcacaatcgctctcca

SEQ ID NO: 19988 - DNA, 1081 bp, Arabidopsis thaliana
ggaggcagatcagataccgaagggagaagcgttgaacaacaagttttagaggtgagttacttgctctgagtttttatctgcgtcgaacaagcttccaccattctaaatttttctatttatagtctaatccagtgctcgaagcttttggaaacgccaaaactgtgaaaaacaacaattcaaggtggtgtctatgaaacacttactgtggacatatttttcctttttctgttggcatcttttgttttgactcgtttgtaatattgtgtgtttccgacagtcggtttggaaaatttgttgagatccaatttgacaagcgtgggaaaatatctggagctgccatccgcacttatcttcttgaacggtctcgtgtttgccaagtttcagacccagagaggaactatcactgcttctacatgctctgtgcagcaccgcctgaggtaagtcttcagtaacaatgctgaaagaaaagagctggaacaattattggccagacaattctaaatatatgtttgattttcaggaagctaagaaattcaaggtaggagatccaaggacgttccactatctaaaccagacgaactgctacgaggtttccaatgtagatgatgcaagagagtatttagagaccagaaatgccatggacattgtgggcattggacaagaggcacaggtttgtctcatgactctcattctaaagatatggttgtagaaatttcaaatactaaccagagaaacttcaactttaggatgccatattccgagttgtagctgcgatcctccaccttgggaatgtcaattttatcaaaggagaagaagcagattcttcaaaactcagggatgataagtcaagatatcatcttcaaacagcagcagaattactcatgtatcttaccactagacctcgaaattctgcattttccaatggaaatgctgactaattttcaatctttcacttgacgtaggtgcaatgagaagatgatggaagattcactctgcaagcgtgttattgtcactccggatggtaacattacaaagccgcttgatccagaatcggcagcctcaaaccgtgatgctttagcca

SEQ ID NO: 19989 - DNA, 644 bp, Arabidopsis thaliana
cactcctgcgtgcctgtgtggtgtcactaacactttgcttcctcccttaattccaccgtccgattcacttttaactcttccaggccctcttccacggccactttcgccgcctcttccactgcctcttacggcacttccttcaccgcctctggctaaacctcttccacctctaacaccaccaccacgtcctgagcataatcatacagataaaaccgaaattaactaatcagaagagagtattattaaatctcctattaaacttggattgaagaagtgaagactcaaaacagtttacgtaacaagcaattcaggtagatatattgtgacaaaacgaatttggagttaacaaccctcaaccctatactataggtcgaacagagaaattaaacaagtagtaaaacaaaacggctgctagggttctaacctctttggggaggtttcatctttgctatagagcgagacgtatacgaacaaagagaaggttgatgttaatcgatgtttgcagctttcgtgtttggtttttttattttttagtttttatcgacccctgctagggtttaagaatgtttatctattggaatttggagttggtataggaaagctggaaaggttccatttatttttctgataaatatggaaaagtt

SEQ ID NO: 19990 - DNA, 620 bp, Arabidopsis thaliana
ccattatcaccaacctcaccagctttttctccacagaaccattcctcaataattttcaaagtttcttcactaacgcagccaacatattccctcaacttatgtaaatatctataaaccttgttttctcgacccgtggcagcacttaccttcaacaaagccgatatctctgcctcctccaatgcaatacctgcagcttccatgtgctcttctacctcataacccttttcagcctccaacttctcgcagaaacagagcaaagccggcgcatatgtcctcagacgaggaatcgacacacctccaacagaaacaaactccttaacaaccttgaaagcataatcaccattacctttagcagcagccagtctagccactgaagtaacagatgcctcattaggacttatccccgaactaaccatacgatcaaaaatctcgaaaccacggtcaatggcaaggtattgaagagatatgtcagtaatggaagctgagcataggtacagaagcgtttgaaaatgttgctggctgagacgtacttcactggaagtgatggctgcatcataaagtgctaatgcagctgagaggtcgttggacttggagcatgaattgagattgaagaggagatt

SEQ ID NO: 19991 - DNA, 621 bp, Arabidopsis thaliana
gatgaaaatgataataaacacaggggtggctgtgggagctggatggcaagcagttgtggcatacgttaacatagtatgttattacgtgtttggaatcccatttggtctgttactaggctacaagcttaactttggtgtaatggtaattaatgaaagcttgaatcttctttttcaagtaaaaaaaaagaaaaaaacaagaatgaaaacaccaataatgcgaaaatctttgatgtgttagggaatctggtgcggaatgttgacaggaaccgtggttcagacaatagtcttaacatggatgatctgtagaacaaattgggacacagaggtgagtcaataatataatataaaaggcaatgatgtgatgtctaaactcgattcttcaatatgtcctattgttactgatacatattcttgtgtaggctgcaatggctgagggtaggataagagagtggggaggagaagtatcagatcaactcttaaactaaaaagacattataagaagtgatatagtttgtgttttattaatctcgtgatttgtattcatgtcgaatctttgttgcatcaaagtttgtttttgtgtctttttggttgtacatgagtcttgtcaggttttgagatgat

SEQ ID NO: 19992 - DNA, 1436 bp, Arabidopsis thaliana
gatggactcttttatgctccgaatgacaatgtaaaagcatcttatgatcattgagttaggaaaagagtgttacggggaaccttaatttgcattcgaccacaatttatataaagtacataataattttaagttcaaaatgatatttgtacaaacatgatcacacacaaacgcattcacctccccataaccctttttcgttgtctcacttgggtgtgaaagcctgtaaaaaaaacacacacacaaaagctagtcaattaaacgtgtcgacgttatgaacatttagtaaagatatgttttgatttggatcacacttacagcgaagattgtggcgtgaccaggatcagcaagatgtgcaaaaaggttatcaataggaccagtgccagtgtagatgtgttggaaccaagcacccatcactgccaacatagccgaccttccgttcttgatctccttggtcctcaactccttgagcttagccgggctaccggatccccaacccaacgggtcgaaccataacccacctgggtaaccaacgtctgtgcccgtcagtttgttgtttgggaagactgggtcagtgttgacgctaccgggcttgatgatatcggcttatgcccagtagacctatgtataatttaaagagggagtttttccgaattaaaagaagtgaatattcggcttatactttaggaagatgcgaattaaaatttgatccgttgaacctccaagatatgtcagtttagcttggcacgcgtcgatgatataaaacaaggctaagcttgtgagttaggtagtctgatggactgataaagaatgacctttatctgagctaagaacaagtaaactaaaacaagcaatagagaaatgcgcctatttagacggagagttagatgagaagagaagattttagactcaaggtcgttgatagttcattgataacaaaaccctaaaagggaaggttccttaaatagcatctactgagactcaatacaaaacgcagcatttcgataacccaaaagtaaaacgacacagttggcgagctggcgagctgtctttctgtgccttagccacttttaaatagaagcttcctcaggaacttctcacgagctctgcctttccttccatttgatctcgccctacttctcacaccagccaacggcacccgtaacctattatggacctcatgagttgttgagttgtgggatgctctcctggatgatctgaatgcctagcagagaaatgacctgactgatgagccgagcagtgagataggttaccaaatgatcttgctaacaagctgcaaggcaagctcagatgatctgacgagcgatctgggatataggttgctaaatggtttgtcttgcgatctgcgagatagccgggcagatgagctgaaaaaaacatttgcgatgagctgcagacatgccattatcatttgggtt

SEQ ID NO: 19993 - DNA, 377 bp, Arabidopsis thaliana
tgaataggtatgcgattgtagactagagatgatgtagttgccggtaaattctcacaggtggcgttttaggaatgctctcaccgcgatggcagctgagtttgaggttgtaccgtagttaatttttgtattctctcacggcgtttattagcaggtacccacgtgcttctcacgtgagtagtacactctaagctatggctcttacaacaatttcatcatctctagtgtttgtaagctatcttctcttgattccctaagtcttgactagctcacaccaccacttctctccgctgccaccattacgtagcatcttcatcgcagtctcctaatccgatcatttattcacgttcttctcatctaacaatatgaacagtgaaaag

SEQ ID NO: 19994 - DNA, 268 bp, Arabidopsis thaliana
ttttgtgctggtctagagcaggctgagagaaactctttggcggcctatggttttccgcaaggctgcctccctatccggtatcttgggcttccgcttatgtgtaggaagttgcgcatcgctgaatatgagcctctcctggaaaaatctccaaaaaattcagatcatgggcaacaaattgtttatcttacgcaggtagagttcaacttattgcttccgttatctatggtatcgtcaacttttggatgtccacttccttgctgccaaaggg

SEQ ID NO: 19995 - DNA, 606 bp, Arabidopsis thaliana
agcacatgaaagattttcgaattatcggtcttttagttaatggttcttttatattttcaaagatttcaaatgatgaagatttgagattcattaccattacaccatagttaagcttgtaccccaataatagaccaaatgggattccaaacacgtaatagcaggcgatgttaacgtaggccaccactgcttgccatccagctcccacagccacacctaatattccagtttattaccatagccaacgtcttaatattgaagttttagtaacaaaattatatttagttaaaccctaccaaatcaaaccaaaagactaattcacatagaagtaggtataaaaccgaaataaatcaaactgactataatctaagactaatcaaaacgagttgaaatagatttggttattgagataaatagattgattacctgataagacaggttggacattgttgatgacaatggaaagtgcaagtattggtgtgagttctttaacaagaatgatgactttttcgtctttcacaaaaagtgatggatattgatcctaaagatgagtagaacattgatacaatgaatccgattagcgtcgatgttacactgccacaagtaggg

SEQ ID NO: 19996 - DNA, 1225 bp, Arabidopsis thaliana
gtgcaccttgtttccgtcagacgaaatcacaaagtctcgtgaaggagtcaccaagacagatcttaaggtctgtcctctccgagctctatcttcatcctctttgatctccttcattttctctggtgtgaaaggataagcatcagctccatagcttcgtatgaccccaacaccattctcattcacaagtttaccatgatcatcaaccatcactaggttaggtattcccctaaccttaaacaactcatccaaacggtcacgggtttccgaatcagtaaacggaacagcgagccagggcatctttctgaaataatctccaaatgactcttcatcctcatcacctgacacaaacacaatctcaaaaccaactttcgaagagagctcgttgtagacttccaccagctgtggagtaaaccgctgacacggtccacaccaagcagctgaaaaatacaatccaatcttcttccctaacaagctgtcaactttcacctaaacatcataaaaatgcataaaaaattaaactctacccaaacaacataagccatgtgaaatagacacaagccaaatcaataaaggaccaagcactgaatgaatcttaacacttgaaagcaatcgattaaagtcatctatagcaaatcaatcaactacacgaagctatctatattctgtaaaccagaagagtcggttcaaagaatcgcgagacaatcacaggatcgttatcgaagatcagaagaagttgcgatcgaagaccataaactcaaaatcacgtcaaaaactattttacctgttcgccgtcattacgaacgaggaaatccctcgccggagaagaaagaagcgagtgaagatcctgggcatcgtcgccgttgacttgcttcgaggtttcggccattgtttgtacggagatcgaatttgagaatcgccaattacgagcacacgaagactggtctgtgtattcttttgagagggccaagtaatgctcaaagcgttgtataaaagcgtctcttttgaagtttttttttcttcttaatccagaattagattacttagcgattaattaaagaccagaaaatgctaaaaacaaatggttgaccaaccaacacaattatattccggttcgtccatcaaacgaggtcaaatacaaaacactaaaaagtcagcagtagaaatatctcgatggggtataaattggtcaaaatcgaatatttggggttaatattaaatatttaca

SEQ ID NO: 19997 - DNA, 1553 bp, Arabidopsis thaliana
atgagtggaagcaaaggtgggtcaaagataaaaaacctagaggggtgaatgataaagtttttgaagggttgcaactacattgggtgaaaccggagacccaagcaatatccaagactaactccaaaaatcgcaaaagcgatcgaggcaggaaaggaatagctacgcacaacttgggtggaacgagccattacacgcgaggagaacaaattgtaagtttgaaatttttgagatatttctatgagtttgtttgcaaagtagtacgtttacagaacataattataaaactagtacacttactatttacaatatgtaatgtactacaggtggttattgttggcttttttgttaccccggttctgacactacgatttccatgtaattacagagttgccagtgaaaccaaaaaaaagaggtttcttctcgactcttcatatttctggtttcttaaggaagttgagagaagttggtttctgtattatgaagaatatctgcaatgacgaagaagaagtcgagtaaatcgaagacaataagccctccagtggtaatgaaacaagaacccaagcggcgaaactccagagcagatgcacagagaggtaagtcgttatactgatgacggttcctcaagcaattttcgggataatttatgggttaataggggttcataattaggtttctgggttatttgtagatacgcatgcaaaatctccggctaaatctccagcgagtgctcgagggttaagagacgagtctccaatttcaccagcgccggcgaaaattccggcaaaatctggaggattaagaaacgaatctaaacaaggtaaacaaactcttatttgttgtcccttgccggtgaatttgatgaatccgactctatcatcaccgaacattttttttgatttggtttttttctgagatgaataataggagatgagagatgcagagatagtgaatttacaaacccgagcctcccttgccgtttgctgcatccatcggagttcccggatgggggacgccttaacatacactcaaagccggagtatttgggaactctggtggaattactagagggttcagaggcgtgggatgagcttattgcgtcccaattcaaaaaattgtttgaacttccagttgctaggtgtcatcactctgcaaaactcattcatgggatgcttacaagacagcttctaacgaagaacaaacatgaattgtggacagtgtatggagggttcccactccggttctctatacgagaattccaaatgaccacagggctgatttgtgataagcttccatctgaatctaaggtagaagattaccacgacccagcatacctgtctgtttggaaccggctgtttggtgcgaaaagtatagtcacggtaatggatgtgatagatatgctaagggaggatgctaaagcggagactcggaagcgattctcaacatggaagaagctgagtcttgcattggtagtgctgattgatgggttgttgtatgcagcaataggaaacaacatcgggttacacgagactttgtagaaatgctgcatgatatag

SEQ ID NO: 19998 - DNA, 600 bp, Arabidopsis thaliana
cgatcccccacatggtgtatgttgcttctatctgattcattatctagaccagaatatgtttggaaacagacatgggagttattatcacaggatatgctgaaagaaaagagagatgactataacaatcagggtatgatcgcgtctaaaccttatacatgtcagtccgccatattggcccgaccttctcaattcactccttccaactgcaatcaaacaaggatctcaaaattcattacttagtaaaaagagaatcaaccatgcgttgaactaaaacgcttagtcagagcaatgtcactctatcaagctctccacagatggtgaaactttccgcagccaactcgggagtgtattgatgactcctcccggttgatagtagacgagatgagatatgaccgtcaatatttgactggcaagcatgctgagtggatagatatgcttacacttgagcagagaggtgtgtatgatgagattaaaggggcctgttttaaggatccagcactgttaatagttaatgaagatctaaaattctttcaaaaacgagccattttacacgtaccaatgatgatgtgacacaatcaatcagtatatggttcagaagat

SEQ ID NO: 19999 - DNA, 986 bp, Arabidopsis thaliana
tcttgtgtgccaaattttcattagttctttctcttcctctttgtcatagccccccaaccaaggagggttggaaacagggaatcatcgatcaacaactctgccatatccgggaccccaatgcctaccttcctcttgactaaatccgagtcaagacatcaacagtcagggggaagagagtaaaccttctgcaagctgacaggagccactggcaccaaaggtggcagcatcttaataccctgatcaacgataaccttagccacccacttcttacttagaacagaagaagattacataatgttcttccccttatcaacagcagtggaaccggtgacttttggagggagactagtagctcttctcttagaacgggagcaccttctcttaactttaggggtcgggaatccctaggagccacactagccgtctcaactcctgaatcagaccctgaagcagctaaaacaagggaaggatgagacacttccctggagcctgcggccttaactgtcttgaaagggagttttttcattagaggtttaggacatcgactcagtaagtggccatacctctcgcagttaagacacttgggaggagggcgaggatactcaacattaaccctagcagaatttccttggatatcgcggacaaccacagtggttgggagaactgaatccaactttatgataacctttactttagtagtcccaatattaaccggatccaaccaagacttctcagtatgaaggggttctcctatgccactagcaatgacactgatacctccctaaatgcatagtagctcaggcggggacactttttaaggactgcccaggtgggagcaaattggagctcctccaattcgagaggcccatcaggagaccaaggatacacagtacacgagcagttcccagcgtgccaaaagccaatatccactacccaattacgagtagcctgcgagggaatgatgataagagccgctgtctcggaga

SEQ ID NO: 20000 - DNA, 1360 bp, Arabidopsis thaliana
tatcgagctcgtacccctcgcagtatccattcatgcgatggtcaatggatataattagttctcgtcttgaccgactatttctctaagtggatagaggccgaatcttacgccagcataaaagacgctcaagtcgagaacttcgtgtgaaacatatcctatgtcaccacggaataccttatgagatcgttacggataactgctcgcagtttatatcaacccgcttccaaggattctgtgacaaatggggaatccgactttgcaagtcaacaccacgatatccccaaggaaacggccaagccgaagccgctaacaaaacaatcctcgacggattaaaaaaacggctcgatgctaaaaagggctcatggtccgacgaactcgaaggtgttctatggtcgcatcggacaactcctcgccgagccacaggagaaacccctttcgccttagtctacggaacggaatgcataattccagccgaaatgatagtaccgagcttatgccggagtctatctcccgagaacgatcctgataatactcagtggctcctcgacgaacttgatctgatcgatgaacgaagagattcagccttggttcgcatacaaaattatcagaatgaaacggctcgtcattataactcaaacgttcgacagcggagattccacgaaggagatcgggttctccgaaaagtttttcagaacaccgccgaagcgaacgctgggaagctcgggacaaactgggaaggaccatacctcatctctaaggtgatccgacccggaatatatgagctcgccgactaaacccggactcagaggagcgggctcaggagctagagctttgagatcatctttcagctcagcgataaagcgattgaggttagcctcagtatcggcgaaatccttcaaccactcatcaacttgttctttctctctctccagaaccccgcctttattagctgcgcatttgctcgcgcctgagataggtacatgaattggtcattgacctcatcaaggagcgacactttgtgctcgacaacttttaacttggcggtgaaggcttccaaaacctccagcctcgtcgtctgaatggtccgagtcacctcgctatcacgaagtcctctctcctcagacaacatccgcctgagacggacaatctcagaatctgccttgagattctgctcggccatcttgatggcgttttctttgtttacgaaggccatctgctcgaactcctccctctccaaatttgtcgcggcacgttcggagagcgcctcattcttctcccgctcggcggcctgaatccgagacttcgcgtcagctaacttgccaacagctccatattactccgcataccaaatcatatgaat

SEQ ID NO: 20001 - DNA, 1219 bp, Arabidopsis thaliana
ccctcaccaatgcatcgccaacacccgttttccaaagaaggccaccggatttgttagtgaagaagagctatgcatgatagaccaatctttggtcttcattttgagggagacatgagatgggaggaagatggtgggggatagagcggacacttcgttgagtgttgttctcttggatcacttattgagttacaaggagtatgctgcaactatccatcgctcgggaattcgtgggagtttttgtgttggtagtctcttaacgccaatactaggagctgtgggtatggaacttggagcccctgacgtgttgcccaagttcattgacctcgactatctcaaggggaggaattttcttgagaaaacaactccggcggatcgctatctcttcaacttcaaccactcggagcttggaccttctcttctacccctactatgtgagaaccggacttcggtgaagacaagacgcaacatcaatttcatgccatctccctctgccttgaacatcgacattggaggagctcaggaagatgaatcagaatatagtccggccaactatgagcaacatgagtactttactcaagctgattatgaggagcaaatcgagtttgaacaacatgttgatcaaccggagcatgggggtagcgaacaagagtaagctcattatgaagaaggtgttaaccaaggagaagatgagtttgctgaagttcacaagaagctcggtgtacttgaagagcttgggaaccttcacagcaagacaatgaagggtttagagaagaagatgagaacaatgaagaagtcgctcaagagtatggctgctcaactcaaggacttccagagcaacccaaggccaccatctccaaccgccgaagtaagaaggagcggttcaacgagctcagctgcaaggagagctgaaaggatcgtcaaccccgagcttcatcttttgagcctcgggaagtgatctccgagttgagagagccaaggagcaggcagagacgagcttccacacgctcgatcggacagaacgagcaataccctcccgcctcaacttcagcccctgcctatacccaagagagtatggatgactatgtctccatctacttcacctgaaaactgaggtaacaccacctctccattgtatataccatagcatctttttatttttctttgtgtgttttgtgctttggtcttgaatgctctttcagatttttattacactagggac

SEQ ID NO: 20002 - DNA, 629 bp, Arabidopsis thaliana
tgaaggagataatttccaaattcaaagcaatgatgttattactactacgattggtgtcaaaggatcatagccagaaccacccgaagcaaaggatacaccagtgagcaaatcttcctgggtcagtcccggtctcaaatatgccggtacaactggttttactcctagataatccgctgtgaaattcgggaaaagaaaaacaacctttcataagaatatttccattgaaaatatagtacatactatatagaagcatcaagcatgaatattttgtatcttcattctcatgatatgataaaggagaggaaagtcaccgataaagtccgaaggtattttgccgttgcaaaatctgccggtgggaactttatctggaaaattcatgccatatggaagaaaattagctttgatcaaggtcaaaatataatcgttatttcctgtgtctaagatcgaaccccaaaggcgaagatcgctggaaacgtagtgttatgtgcctcttagttgcgctggtgcggggtttggcctggactcggacatggcttaggctctggtgccggggaaggcgctggatttggactcgctgtaacggtttgctgaacatgcatcgcaagaggaagaactaaagagtgagagaa

SEQ ID NO: 20003 - DNA, 1472 bp, Arabidopsis thaliana
tctactatagaagcaattctactctattaattggtcgagtaaatttgcatcatcattttactctatgaactggtcaagtatagtgactagacaaccaagcatggtgatcgagtggcccacttgtttccccatcactctattactcgtcggataatgcattaacccgttttgctcaacgctatttggtcaaccccctttatcccaacaagaaagcatggagaccatcctcctccactcattcaaatcgacatcaaagataaggctttcaccctcttttctttttctcttttgatcgcacctaaccatcatctctctcactcgattcctttagcaaaatcattcccaaaatttcaatcttcagttttctttcactcgaccaaacacatcgatttttcttcttgtttttgactcacctattaatcttcgattttggtttctaagagttcagtatcaccatgagttcaaaaagcaacaaatcttcaatggatgctgatttcaacgtagatgaagcagaatcttggtctactaggcctgagagggagatggaagaatacaggcggttcagtgaacaagccgtcaaagtcctagctcgtgttagaagaagagctgaaattgcaagaggtaagagagccatggcggaagagagaagcctcgtggatgaagaccttggtggggatgaagactatgtacctgaaataactccaagagccaccaaatccttgatgaagaagactaagctgtcgccggatggatactatgagcttttggcggttcacaatttccatggaactcgataccctcactcccaaaccatgaatgagcttggcataacaaaagatgtcgagtacctctttgaaaagagtgatcttttgggtctcatgaccaaccctcactcagcctacaaaacagaagcgcttcagtttcttgcttcactggaagttgagttgtttcaggggctatccagccatgaagcgcgagaagaaggacttgggtatatcaccttcctagtctatggaaaagactatgttttggccatcaaaactcttgaagatatgttcggattccctagagggactgatgttaaacccaagttcaagaaagaggagctttcagatctttgggtaacaataggagatgacgcccaattctcgtcctcaagggccaagagcaacgcaatctgaaacgcctgcatccgttacttccagagagcattggctaacgttctctacgcaagggagaagacatgaccgatcaacaatggtgagatagagctgctggacattggcctaaaggatcttctagtctacacaaagaacaaagtgcctatgaagggtgacacaaatgatgcctaaccatcaatgcgtttattgaatcatctttgtggtttcagaaaatgggcactagcgaataagcacaagagaaccatttctatagaggtgggggggtggggtgggggggtggggggggggggg

SEQ ID NO: 20004 - DNA, 3236 bp, Arabidopsis thaliana
actcccttcccgtaggtggttttctaacaaatcagaaccctccttccctgctcttcaaagcctttatagatcctgatcttctcttgaaagatccatgcaccagttgttgcccagcgcttcacttattggattggcttctccgacgatgttggcggcggtgtacgatagagctcctctttctagaggttttctagggtttctccttttgggcgagtctcctttgggcctaactgttatcttcggcccatccctggaattggcagcctactttctccactagtttggcccaggtctgttactcttaaatctccaattagcccattagacttgatatcccgacttagcgccttaattggttatggactctgcttaagctctttgttgattttaatggttttggcgtgtaattttatctctagaacctaggccaattgtaattcctcaagtgcttcatcttctcatcaaagtttaaggctaatggacttggtgtatctaggttttagatatgctattagattagggaataacggcattatgatctcctccctacggagagacggttaccggaatttctttattcctctctccccgaatccgttgaatattgaatccgagtcgtacttgtctaacgtttttaagattgatattcatgaaagcaaggttttgagaagctatggcattatgaaaccggctctgtgtagtggtgcttaccaaatacttttcaactctatacctttaaacccattagatgacagaacccactcaactcctttccttgtcgacgaccatttcctgcttgttctacctgggacaacgagaatctcgactttggaaaccttttcaacgtcaccttgtctattatggaccattaccattacttcgtccaccgctctgtttgtggatgatgcttcgacaactcgtactttaacttgtaccagtctgttctgtagcattggccctaaagttttcatggatcctttgtcgatttatctttgctatctttgtgtagcatttgttttaacatttgcttcttgttgttgctactttgttttaaagcctttttaatttttgctccttgactacatgtaaacttgtttcagttattagatgaatgaaatcaagttgtttgacaaaaaaaaaagtatatgtcctagcaaattttcaacgtgcaaacatgaaaattacatctatatatgtcaaagatgatgaagaactttatgaatccggagaaatatgtcaatcatgatcataaggtagtcgttagcatggtttatatgacataatataaatacgaatattaaaatggttagtgcagatcgcagtggagagtaatcatttaactggtaatgaaattattcttgatagtcaatatggatctagtttacaagtcttggtttgttaattaaaatttgattgaatttatagcgaaggaaaaagaggattcattcagtagagatgagcttcgtctagtaaatttgaagaagaagatgacatagccaacacaaatttttttgttcaaactaaagagcgtgttgctttggtttatgataatacgttctcaaatatacggtcaaaatgatcactatattaacttttaaccgtgaaaggactcgattttctctctattaaaggcaacttttctggcgattgcaatccctaacccaatcgccgccattggccggcctcacgccgcaaacgagaatttctcgatgtcgaagaaaaagaagaagccctctcgccccttccttttcgcccttcctccaagttcgatcgagtgctggcttccttagtggcgtcgtcttcgttgtctgctcctcgggctgttccggctccgttgtcttctgaggttctttcctcgggtgccgcctcgcctcctcttccagttagcccttccgggactattcccgagcctgttgggtctccgtctccttctttgattccctggatctgaagatgtgtcttctcctcgtgaatccccagttgaagctttgtgttgcgtcgctgagcttcctgctcactctcttcctctcggcgactccagtgttaaagaactcctccactgtggtttccgaccatcttcctgtttcgtcagttcctattagctctgttgcgactccagtgttagagaactcctccactgtgatttccgaccaactacctgttttgtcggttcctattagctctgtggcatctccagtgttagagatctcctccactctggccaccgctgggattccggaacactttgtgcctatcctctttgtgtcaactagacctcctccattgtgattaccgccagcattctaggaagctcgccagtggctggagcaaacctgcagataaacaactcctcaggtcacacttccgtgaaatcctttgctgaagtttctcagtcctcgaattatgaccgtccttgggccacaaaattcaaagattcccttaggaatctgaagcaaatggatcccccttccttcttggaagatggcaccccagttgtagtggctctcccatcgatcctcttaaaaatagctgcaatgtggaagggtcatcttgttgcccaattccacggtctctgcccttcttcgaccacgatcttcacagacctacaccccatctggggtaagtttggcaacattacggttcgaatgatctcagagacagcagctctaatcttcattccgtcgaccgctacccggaaatgggtggttgacattggcttctggcaagctggaaattgctcttgtacggtctatccttggtctcccaatggcccattggaacttgaggaacttcaatttgctcccacctgggctgtgctgaaaaaagtcccccctcaattttattccttggaagagattagcgtcattgctagcggaattggcgagcctcttcatacaaagaagtcctggcttgatccgattaacattggagttcccaaagtgaaggttatcatcaagttggactctacgcttcccaccactgtggttgttcgcgacatccaggggaacacagcacgtgtctctgtggagtatcctcgtccacctcccaagtgcctgaattgcgggaggtatggtcactcctaagcagatgccgacatctctactgaaaaaatccctttcaaggctggcaaacctgcaagttcgagagaagtgtctcacccttccattgttctgccaaccactgattctaactctctagctgctaacggggtttaagaccctcgagggccacaatgc

SEQ ID NO: 20005 - DNA, 1546 bp, Arabidopsis thaliana
aggtcgactccatgttgtctttgatgattttggcggtgcctatagtggaaactggaaactgttgtctttgatgattcaagaatgtgaactttcaataagtttcttgatcagtttttgtcttccgcaaatttttagctatgaaaactctatttttcttttgttttatattactctgaatttacattgggatgaaaaatgagtggctgaggaatatagaaatagttgacaaaggatatatatactctattcagtgttgcatgtgtgtgaaagcttaagtgttgaagaacttgtacaattcatggtttcaggtagcatttgttataacaaccggtataaacagtgcctatgtgttgggatattccaagacagtcatggttccattgggttggattggtggtgtggttggtctcattcttgctactgcaatctccctttacgcaaacactcttgatatgtatataatttgcatgtttcacacatccttttatcaccattttgagtctagtttcacccatctttcatagcattcatcaatatttttgtacattttgcgtcttaagtcgagtctaggactagtcttgcatacattatgcattttggagttgtttcaggtgctttggagctattggtgctcagaaagaggaaaaacagaacagaaagtcatatttccaccaacatactcgatcaccagtatcagagagggaagcggtcagctcagtagtccatccagacacttatactcgatcgcagaggagaggaggcagtcccaactgcagttctactcgatcacagagctgaaggagtccatcctgacttttctactcgatcgcagaggcgactaggcagtccactttgccagtccaccagttctactcgatcgcagaagagaagaaccagtccatcctgacagctgacacacatactcgatcacagaggccaagaagcagcccaaaccattcagtcaaccaacctactcaaccaccacctcgaccatctgatcaatccgcactcaaccagacaacctgagcaacggaaagagaagagaagagaaggcccattcgaagcccattcgaagcccatcaggaagcccactttgagccgacactcttgatcacgccgtccatgggccgttaagtggctcgaagcccgctttcttatcttagtataaataagtctctaagggtttcgccctgagacatgcactttttagaaacgaatttcgcactattattcagcagccgcttttcattcctacaactttgtatttcgatttttcttctaagttattcagattttgctttcatttgcttgttcatctttcgtttctatgttattgtctttaagcatgttgtctgagtagtgattaggatgtctgaggatgggatagagtatttgtggaacccctggtcgaatctgttggttaagtgtagatttattgaatcccttctggattagttgtgtttactgcttattcctttctgatcaactggaatccaatcccagacgttccgagcgcccagaaggcgtttgggatcggcgccgttac

SEQ ID NO: 20006 - DNA, 1448 bp, Arabidopsis thaliana
catcacagtattgtcggcaataactggagcccggcgctgaacatatcgcaaggtttaggcgatgacttcacgctgaaaagtcgcatcgcccgtgcttataaagcgccgagcctgtaccagactaacccgaactacattctctacagtaaaggtcagggttgctatgccagcgcgggcggctgctatctgcaaggtaacgatgacctgaaagcagaaaccagcatcaacaaagagattggtctggagttcaaacgcgacgggtggctggcgggcgtcacctggttccgtaacgattatcgcaataagattgaagcgggctatgtggctgtagggcaaaacgcagtcggcaccgatctctatcagtgggataacgtgccgaaagcggtggttgaaggtctggaaggatcgttaaacgtaccggttagcgaaacggtgatgtggaccaataacatcacttatatgctgaagagtgaaaacaaaaccacgggcgaccgtttgtcgatcatcccggagtatacgttgaactcaacgctgagctggcaggcacgggaagatttgtcgatgcaaacgaccttcacctggtacggcaagcagcagccgaagaagtacaactataaaggtcagccagcggttggaccggaaaccaaagaaattagtccttacagcattgttggcctgagcgcgacctgggatgtgacgaagaatgtcagtctgaccggcggcgtggacaatctgttcgacaaacgtttgtggcgtgcgggtaatgcccagaccacgggcgatttggcaggggccaactatatcgccggtgccggggcgtatacctataacgagccgggacgtacgtggtatatgagcgtaaacacccacttctgatgctaacgtcagattgttgacaaagtgcgcgtcgttcatgccggatgcggcgtgaacgccttatccggcctacaaaactttgcaaattcaatatattgcaatctccgtgtaggcctgataagcatagcgcatcaggcagttttacgtttgtcatcagtctccgatgctattaatccttaaatccccgccccctggctaaaatgctcttccccaaacaccccggtagaaaggtaggatcgccacgatcgcagatgatcgccaccaccaccgcgtcagggttagcttttgccacccgcagtgctccggcaaccgcgccgccggacgtgacgccacagaatattccttcccgcaccgccagttcgcgcatggtgttttccgcatcgcgctgatgaatatccagcacctcatccaccagagaagcgttgaaaatccccggcagatattccgtaggccagcggcgaatgccgggaatgctgctgccctcttccggttgcaggccgacaatggtcaccggtttggattgttcgcgcataaagcgtgagacctttagagcacactggcggacgttacta

SEQ ID NO: 20007 - DNA, 1931 bp, Arabidopsis thaliana
ttgtttaggacagcctctcctttagataccaaatctgtgatgatctgaaaaccttgtgtccataagtttggttcccgattccttcccttctgtagttaagctcgttaatctgaaatgagatgttgttggtaccaactactgtagcttcatacattttgaaagtcttagcttccttttcctgactttcttgtaacagagctagaactcccttagctttatctctgttaacctccattccctgaatccttgaagctttttccaactctttcatttcaactttaacgtgtcccctttcttaatgatactttctggcatcgtaatcctttcatccttcattttactatcacacaacatccactccttgttttgatctctcaacagtggctgtcatcagaaggtccttcacttttctcagatttaacctcctctaaacaatctgattcttctgttgaggattcatctccaccttgaactgatgattccaaagccatatggagtaggtcctttgaattaaattcacgctgaaagtcaccttccttgacttcttcttcctcactccaactacagccttgacaacactttttccaccattttcagcatgtggtacactcttttcagccttaacaaccatgccttcaagatagtaaagcccttcgtgatatttcccagatatcactttcttaccatctttgtagaaaatcatggaaaaaattatagaagaataatatcttttattttatacgttatacatgtgaagcatggaacaacattattacaatccactttcatatggaattcgactttctttcagccaagtttctccatctaagagcttggctacagtgaattctgtagcctttttaggatctttcataactttaaatcctgaccacttcacccttctgctagtcacagctcccggacccctattttgatattcgcggtagtggagagttgatagaccagtttctcctttccaaggagtccagcctgcgggatcaactaaatcaccgatgaaagattgcagaaccgcgactgttgaaaatatcctccaaggtcttccaagatacgtttttacggttgctgtatctagatccgaacttgttgtgatgttgcagttttgaattgagaagcccgagtaaatgtccttaaatgcgcgtgattgagcggttatgacattgctctgccccatcttaggttgtcttgctacaatctggcagaattgaaagaccgccaccgcgttcccacaaatgaaatctacagtgccggtaataaagcactctctataaaactggcggtcactgtgaggatacaaggcatcctgatatccctcgacacggcatctataaatgacggacatatcaccactcacacggagggcaacagctggtccttttgccggcccggccgtgtttcggaagcacatgtctactccgatgaatccattaccattagaagcttcaaatatatttctagaataattagtaatgtctttaagaatgttatagtttggtataaagaagagaaaactataaattattcaagaagagaatacaaattcttaccaacagttgcggtgttgaacgttcttctaacattgctagcacttaaattgctcgtgatgatggttaaatcttgaccatcacatataagagttaaattgggtttcgtattctcaatgacgacgatttcatcataaatgcctgtctttatatagatgacgaatctcttttggctgtgttgaggtgccgctgcaatggccgcattcactgtgctgtactttccggtcccatccttcgcgaccacaacatcagcaatcttctttagagcctgctttataagaaacggaagaaattctataagcagtagaaagaaagaaaaaaaaggataaaaggtttgttaagagttgcaaacatatcgatcgaattgtg

SEQ ID NO: 20008 - DNA, 659 bp, Arabidopsis thaliana
ttgcactctgattttctggttatagatcgcgttggcacggctactgatggttttccccatgccacggatcctaatggtattcacattattcccctttaagcttatacatggaaactttagaatttttatttagagaatttcattgtatataggaataggagaagagtctttgaatattaatttgttgttgtttgtgaaatatgtggagcagaccccaacttgaccggcccgatattgatgccacattgttgtattgcccaaggatcgcagatgccttatgagtctaagaggctccaaaacggtggtctttacgtgcgtgtagacatgccgggtgttcccagtgacaacttcactgtctctgtcaccaatgggcgagtgaaggtgactggtgtagctcctgctcttagccacgactctgctggccgtttctacggtgatgttgctatcctctccactcctgttgactttcccgcccgtaagatcaagaccattgccaagaacggcgtgctgttagagtaaaattcttttagaggtaatggagaaagtgtttaagtgttttgagagagttttttaggaaatagaacttttattactttgctttaaacttggatacaacttcacaacattgcaacatttgagaggggcaggaggtatttata

SEQ ID NO: 20009 - DNA, 988 bp, Arabidopsis thaliana
ccatcgcgataagtgtagcagagagccctccaaagcgtgaatcatcgagtcctaacacaaactgatgaatcttctcttcttctctttctttggaaggttcaagagtagcaccacaggtacacaagccacacttacaaacagtaattggtttgtaaatttgaaaattcttcccaaagcttacacaagcgaccatagtagtcaataacaggctgtccatcttgcctacacgcagcaagctgagccttaatttggtgaacacgaactttgtttcccacagagaaacgttgttttaattcactccatagttgatgagcatcggatatgaaggtgaccgtggatttgacttttggttctatggaggctctaatccaacccacgatcattgagtttaccgcctgccaattctcataatccggattatctaatggtggttttgagattgaaccattgataaaaccagttttacgtttggcttgaagtgcattcaacatttctgttgaccactcgttgtaattgtcaccggttaacataacagaggaaatcatggcccctgggttgtcggagctggccagagtgtacggagacactttggttacatctggttgttgattggtacgtggatgtgttgcagaggagacttcttctgcaatagacatgatttcttgacacgcaagaaccaaggttttaaagagaaaagcggaaacgaattcgaaactatcgaataagaaacgaaaatttttataggtttagatctttagagctctgataccatgtagaattaggtattgcactaacttgagtttattgattcacaaagtgtgatatttatacaagagagtcatcgtataaaataaactcgaatccctaaattataggacataactctgtcacaaaatatatcacaagagattctactctatccccaatagatttagatttgattaagaaagtattaaacaaacccctagttgatgaataaataagttta

SEQ ID NO: 20010 - DNA, 1472 bp, Arabidopsis thaliana
gagcatactctctcgtgaactcaaactgattataaacatgtgcgcatgcaatgaagttagccgtcgcttcttccttatcagttttcactcgtactttaacgttttgagacaaatgccaaacacaatggccatgtctcacgtttggaaacacttgcataattgatttgatgatgctctgatgtctatcactcacaaaaaccatgatgtctatcactcacaaaaaccaaaccttagttcatctggtataactgttttcagcttgttaaagaattacgaccaactagcatcgttctccctatcaattacagcagacgcaatgatataattgtgatgattaggatcttgggctgttgcgaaaactagcataccgccgtatacggtcttaagaaaagtggcatccacaataacaactttcctcataactttgaacccttcaatgcaagcacccaaagcaacgaataagtacttgaacttttgttgtgcatccacttccacatatgatattgtcccgggattcacctcctttaatacgtgcagataagagtacaagtcggtgtagctttttcaggactaccacgcacatcactaacgtgttgtcttttccctctccatgcggtagcatacgagcaatgcaaacccattcttccccgaacaatactcattatgcttttaggtggtggagtttgaaactcacctggataatcctcatgcaaaatagacgcgattaatcgtggtgtgccggtatgtttacaattgcctgagttcttatcagaccgcttgcatgtgtgcatcttcctgtgaactctaacactaaaacaatctgaactctttacttttgcacatcgtaaataccatcgacaacctgttgttttagattgccgacatcgtaacatgagtcgctgtggatctgacgctatagttgtagtcgcaaaacaatacttatttgcagctctgttaaccaaatcttgcacgacctctttagaaacaaattcttgatgcaattcaatcctcgttccatcttcccattccgtaacactctgacttttctcactactctgacttccttcaccaacacatggaagctcataatactcaattctaccatcaacaccattatcttcagcaacatccatccggctatccacatgctccctatcttcaataactacattctccatagcctcttcaaaaacccggctatccgcattctcaatagcctcttctacactattagcctcttcaataatcggttcatcattcacacaattacctcctgcagcttctcctctaaaaatcgtcactactccaccattctccacatcaaatgcattcaactcctcataattaacaccaactgaacttcttccctctacccttgaaatttgttccaccctctcagattctttatttactacctccacgttcaaagctggtctaatcccttagcatcactaccgttagatacctaaaaa

SEQ ID NO: 20011 - DNA, 517 bp, Arabidopsis thaliana
acagccttaaccttcactttatattgattctccacttgttgaatgaacgctggaaatactgtaagaacctctgatttagtcttaagcaaatacatccatgttgctcttgaatgatcatcaacaatagtcaagaaatacttatatccttcaactgtttcaactgagaaaggaccccaaacatcaatgtgtagtagatcaaatatctctttacaaactttattcgaagtaggaaaagataactttcgctgttttgccaaatgacatacatgacaaaagtcagaacccttattcttatgcctagtagttcccaatgaatcagaaatagcatcaagtctttgcaaagaagcatgaccaagcctcctatgccacatgctgatgtccacaactgcattcactgagatagactgatctccaacatccaacaagtagaggttcgcactcgtctaccttgaccaagcatccggcccttgataagatcctgaatttcacaagaatttttatcaaatatcacacggga

SEQ ID NO: 20012 - DNA, 766 bp, Arabidopsis thaliana
gcagtgaagaaaagtcggactaacaacacttttttcctatcacctcggaaaggttttcgagtcttcgaagacttcccagaaaaagatgaacactggagaaagtcttacttcttctttcctgtgaatgaactcacttacgaggagaagtctgatttatttgtatctgactggacaactcgggcgggtagttagcttggcttaggataccattttgaactaactctttcatcaataaccccgacttcagcgatttaaccctttccttgctttcgtttttgcagtgaaggttaccattcctcccgtttctcgcacatttgcatctcacttctcgaacttttgccgtcatgaccttggttgggaagctcttacttcggatcgaatccgagcatctggcaaacgacttcggacccgtcctgaccttgctatctcttcacctcccttttctcctcgtatattttgcaaagctgagatgtctggaccatcgtaccgagctgagaagaagcgtgagagggaaagagctgaccaggaaaaggccaggatcctgtctgacagggtcgtgatgtcggggacccttgaggacagcaaactccgagctgcggagaaagccaagcatctggtgaccgacaacaaggtcaaatctcgccaggagcctggaaagaccccgacttctgctacgaaaaattccggagctccgacctccgaagcagggagccttgccaagaagccgcaaagcaaagattcggcgacgcgggaagccgaaaggaaa

SEQ ID NO: 20013 - DNA, 1329 bp, Arabidopsis thaliana
tttttttttttttttttttgtagctaagctaataatagtaccttttgaggtgggctgcattccacggattttccacttctttcagcttcatggtcatcagcagatagactcctggatgaagtaccttcgagatcaaataaggtccttcccatcgagctccgagttttccggcgttctcttcggtgatactgtaaacttcccgaagcacgaggtcgcctacgttgaagcaacgttctcggacgttacgattgtagtatctcgccgctgcattctggtaattctggatccggatggcggcttgatcgcgaagttcttcggcgaaatcattgtggtcgcctaaaagctgatcgttcagtttgtggtcgttggacatcatgcatcttcgtaaagttggaactccggcttcgtttggagccattgcctcgatgccgtaagccagggagaaaggggataatgatgtaggtcgccgaggcgtagttctgtatgactagagtacgccatccagctcgtttgcccaattcccctttttagggcctagtcttttcttaatcccggctatgatcgttttgtttgtggcttcggctagaccgttcccttgagggtatcttggagtcgagttgctcatgcgaatgttccatttggcgaggaagtttctagtaatgagcgagacgaactgcttcccattgtctgtaacgatctcataaggaagaccgtgccggcaaataatgttcttccagatgaatgcaaccacatcgcgtgacttgactttgtggtatgcctgtgcctcgacccatttggtgaagtaatcagttaggactaacataaatcttttggatccggaaggaggcattggtcctacgatatccatggcccatcgcatgaatggatacggcgccgtgatcgaacgcagtatctcgggaggaacgttcttcatcgggccgtgtctctgacatggttcgcacttcgccgcgtaggcttcgcagtccgccagcatagttggccagtaatgaccatcttttttgattttaaggcagagagctcgtccgccagtaatgactttgtggtatgcatgtgcctcgacccatttggtgaagtaatcagttaggactaacataaatcttttggatccggaaggaggcattggtcctacgatatccatggcccatcgcatgaatggatacggcgccgtgaccgaacgcagtatctcgggaggaacgttcttcatcgggccgtgtctctgacatggttcgcacttcaccgcgtaggcttcgcagtccgccagcatagttggccagtaatgaccatcttttttgattttaaggcagagag

SEQ ID NO: 20014 - DNA, 1315 bp, Arabidopsis thaliana
aatgaggacttctctgttcccctcttcaaccttttttctgactaagctctgtaagagtcaagcttaatgacttaaaacaagctcacttggaaggaagtcccatgtctatccatgtatataactttctattttccttgttaattttgatgtttttgtttaagtgtttcaggtttattttattgaccctgaggaagtcaacggtcgagtaaattcaaaacaagtaaagaatcatctcaaccgttgatcgagtaaagtgaggaggagagctttaagccgttgatatgaatgaccaaatgagagaagcatcacaaccgtttgatcgagtggcttcttgaggtttattctggtccgtttgatcgagtgattaaaagcaaagctttctccaccgtccgatcgagtgaagaaaccaaagagaccaccttgtggactccgactttctcgtgacccgcctccattgaaacgctgctgtctctttgtcttcttgtccccccccataatcgctttggtcccccattgcaattcttgaactcaacaacctcatctctccacctcccataccaaagcaatctcaaattcttatatctctctctatctctttctcttgcatttcctctttctatcaaaaactcaacaaaatccatctattttcttcatcactcaatgacaaacaggcgcacgctcctgtcaaggatccggaatagagctctctccccattgaagaggtacccaacaccttcttcgtatgtagcagctcgaggactttctgaaccatcacccatggggtcgagcaggagagaacaagcaagtttcaagatcgatcacagcgaatcaagccaagaggaggaagtgatgcaagaagaagaaacttttagctctcccgttggaaatactcgatcccgaagtaagtcctctgcaaggaaattctccaggaacaaggcagacatcactcgaggaaagaagcccgtggggaggaggttggaactggtagatgaagattctaaggaagaaatggcttcaccaaaggaagctgatcaaacagagagaggaggtgatgatgatttggaatcagagaagtctgcaactcgaaacgagtcctacaagctgctgaagcacaatgattttttaggaactcgatagcctcatcccgagaccatggagagactcggcatctatgatgatgtagactacatgtttaagcagtgcagcctgaatattcacatgtttcagccaatggaggggtatgaggaagagaccatccagtttctttcatctgtggaattgttcttatatggggagtcagaagacgatagaatca

SEQ ID NO: 20015 - DNA, 554 bp, Arabidopsis thaliana columbia
gctactgatcaataaccaaaacaaaccggttagataaccgagttacctgagctccgagaaacaattttccatcgtcctcggcttctcttttaagtgaggataagttatcaataaagctggatggatcattccaatggctatatggaaaattagtttcgggtgcgatttcaggtatttgagaaagcattccaagtgaagaaggtggccttgaagagagactgcaatggcgtcttaatccattggaattagatggactctcttcatcttcttcgtaattcatcaaattcctcattgaaccataacctgcaaatttgtaagtatatagtaaacacttattagatttgttgagtccaaagtgctttaactctatggttgacaaaatcaaatcagatcttgtcttaaaattattctcaaggaacgtaaaacattcaaaaatcttgaagcaagtgttaaaacattcaaaaaagttgaatcaagaagtccaaaaacacttctgttataaatgaaaaaaatatttcagactaaaaaaagggggaaaaactttgtagcagaga

SEQ ID NO: 20016 - DNA, 669 bp, Arabidopsis thaliana
actttcagatatattctctggaaaaactccactaagatgattctttcttagatgtagagcttgaagagtactactgaaatttcccatgcaacgtgggattgaaccattgaatttgttgtcacataaatcattgctagagagcgcaatgcacatatgaaagctggaagatttcccgtgaaattgttgttggcgccagaaaaataattcatagatggttgccaggatgaaggtaccattaatctttggaaaccggtgaaagtgttgttggaaagattcacgtagtccaaagttggtagcgtccataaccagccaggtacttgaccattaatcttgttgttggaaatgtctaaaatctccattgtttgttgggttcttaggaactctgggaactcagtgacaccgcatccggacaagttaaaccgcgataacaatagaggatttgtgagacccagtcccggacgtctcggtgtccggcgaccgtgtactcaagtttgcgcctcttcccggcctaacctcttaatttttcgcgattaaccatagaattgcctttacgaggctaaattctataatcgctttcttattacacagcggaagtctttctaaccttggtttaattctaaccaactcttgtaccagtttcatcgtcttgtcccttagacttagatcgat

SEQ ID NO: 20017 - DNA, 554 bp, Arabidopsis thaliana columbia
cttgagttttggaactttctgatccgactcatcgcttaaagcctgtcattttgtgttataggataatatttattattcatacacattattggagatcgctaatggttgtagtaaatagcctacttcacctatcagactaccaaataaaaatatactgaatttgattgaaatcaaagtacctgagagatgaggttggaagattgggtccaattgaaagaaaaataagtgagaatgcatctatcaaattcttcaaggagatgaacatagagagaatcacgctcagcttcattctccaaatactcatccacattctcatcatacccttttgttttcaacaaatatccatttgctaatttgcatagttgtgggtattcatttggatcctcaaatccgagctgccttgctgcatttttaacatatatatgattacacaaaattgttccaaaattatgtttggataaaataattacaaagggctcattttttgttgttgtggaaaggtcttctagcatttatgattttatggataaagagtacgtgtacataccccattt

SEQ ID NO: 20018 - DNA, 547 bp, Arabidopsis thaliana
aggatccccagaagacggcacgtttccttgttgtcgcatcgcacgccttacaccaactcttaattctccattctcgcccctgtagaagattaagatattccacattatagaaactaacagatacagctaaagaaaacaatgaactaaaatccacaaaccttagaaatataaacgcatcgcctgcaactagccttttggagctaacaaacacactccacccactctgtagcaaatgcctccgtggttgacctggtccattatcacaaacatcaacaaccagataagtttgatgacacacagactcgagaaaaacagaacataaaaaagttacagattcctataccccggaatatatgtctgaatcgccactcatttgcatgcaaatcctttgcaactaactcttgagtgggaggctgtcgagacatatcctgagggaagaaacaaaaaatgaattgaaggcaatcttagaacaaaattcaggaaaaataagccaatgaatagatagttagaagcgcaaatgaaacaccaacccagaggtgggagacat

SEQ ID NO: 20019 - DNA, 850 bp, Arabidopsis thaliana
caagtaccattgcctagaagcttgcttcagaccgtacagagacttcttcagcaggcaaactgcatttggcggaaaggagtccccttgtcttgatgagtatccaggtggcaaggtcatgtagatctcttcgtctaagtcaccgtttaagaaggcattggaaatgtctaattggctgagagaccaaccttttgcagcagcaaccgcaatgagcaattttacagtggtgagcttagcgactggagagaaagtatcaacatagtccagcccttcagtttgagtgtagccttttgcgaccagcctggctttgtatctctccaagctaccatctgcattcaacttcattttgtaaacccatttgcatccgacagcctccttacccactggtaaagagcaaacaacccaagtgccatgtattcttctaagagtctgctgagtttccatgtcgccatagcatcacaccacgtcctattatgtgattgtgcattgagcatactgtgtgtgcgttctgaggattttattcacagcattgatgaatatcatgtagggatctgatagtgatgagtaagacagaacctctgatatagggtgatctgaggaggatgtaacagcattgcagtgatagtccttgagataagctggtggtcttgacactcgtgaattctaatatgttgcggggacatctaacggtggtgtttcttggattggcaatgcctgagcaggaggactgatgtcctatcaacatagatgtgtggaaagaataacagaagagtcttcagtctctgcagttttgttcttgaaaggaaatatatcttcatagaagaccacatttcttgagatatagatagtgtgg

SEQ ID NO: 20020 - DNA, 506 bp, Arabidopsis thaliana columbia
caccatcttcatcatccaataagatatcttctaaacgcagaatcctatatacgaaaggtcttggaaacgcagtgtgaagataagctaaagcagttgcaatctcctctgctattttcaatctttgtctccatgacacaaccattttcagatctaaactagtaggtttctttgatgcacgataaaccaaaactggatgttcagattcaagacaacatccaaccaattgcatgaagtttttatgaccactaacaatcgatgagatggctatgtcacggcaaaagtttcctccgttatgctcactaaatctatatctccatttcttgatgagtaacagtttatgatgatgatgatggttattgtttttacctgaataataccaatcgtatggaatctcatcgaatagttcagaaacacgattggattcgctgaaagtgtcggtggcttctaggatttgatcagcggagaatattttgatgggatttgctttgccattgcaagatttgatg

SEQ ID NO: 20021 - DNA, 530 bp, Arabidopsis thaliana columbia
tggcatgttgtcattgttctcctgaccccaaaagagagagagtttgttgttcaaaaaatcatttgtgtttgtcaccttgtctgttagacaataaaataagataatgttaatgagaaagactaaactgagacagacgattaaagagtaaaagataagataatgtgtacctcaatttcgaactctaattcaaggatcaagtgcttggcacaggtttctcaagcaagtacatgtcaagttcactactagctacttcatttgcagtctctgctactatctcaaagtacaaagaatccatcctctcataaccatcatcatccgtcaaatcaaacaaggcactaacatctgctgcttcgccatgatcacttcttgttgcaccaccactatcagcttgagaagatgtgctcagcctcgccacatactcctcatatagcttcctcatcacatccttaatccccgatctaagatgattagcttccaagcgtatcttcccatagagcttgtcaaaacataaacttgcaaattggattttg

SEQ ID NO: 20022 - DNA, 535 bp, Arabidopsis thaliana columbia
cgactcttccctgaaactctcactgcaaatccaacaaataactcctagttgtttcttcttaccgcttgaccgaggttctggaacaacataggaaccaaatgctctattcctaccaggaatatcagacttgttgaatttcacagcaaacattggtttggctctgagaccaccgttcttaatcaaacgtacatatcgtagaagagtttcctcaggaacttcaagcaaatttgcattcagctcaatagtgtcaaaccccaactgcttacactcctgcgccataaaacacaatttaacctcacaaaaacctaattcttctccaataccaaccatttcctatggaatgtcaaagatttttacctccacatagtctttgaaagctgaaggaccactacgaagcatatgttcagcccaatcaccagtgctaacataaacaccatgttcatgagccatttcaatagcttgtttgatgaatgattttggaatcaaactgttggatccccagagaactttaacccatcaacaaactgtccatcga

SEQ ID NO: 20023 - DNA, 673 bp, Arabidopsis thaliana columbia
cgaggcttgagaggtaggtgagtcgatgggagtctgaggaggccatgtgaaggaccgtgtctatcacggaggcagagacgtgagtgggtgcgaaaggtgagcatttggcgttaatggggatgattgagaggtcgtcggaaccatcgggagcggcggtcgcacatgtgtcacgtgtggcggtggtgaaagtgaatggcaagagaagtgtcaagaagaagaagaaatggagacttgaggaggccatggttttggctaatgtgattgtgtagagatatttagataatgttcttcgagtgtgatgtggcctttatatatggccagcgaggtattgaaaatgcgaaaatgtccctcgaattcgatttataattggtgggatccggtccggtctatctggcaatagtactactactccgtaaactttttttttctattgtctacacatcttcttcgcatgtgtgtgagataaaatggtataatatttttctttcgtaattttctcaaaaatggtctgacttggttcactatatccgctgatttcattatagttttacacctaattagcttgctgataatttttgttttgttttgaataaatgttgttatttcgattgaggggggatagtaaatcttgaatacattcctatgctgaggtaagtcttgagagttgagagaa

SEQ ID NO: 20024 - DNA, 506 bp, Arabidopsis thaliana columbia
tccgagaatgagaaacagcctgaaaatgtaaggggttgatctcaataagtagaggcagaaagaaagaaaggtctaactagaaatccacatcaatcttgtattggaatgtttgaaatttcttatagattaccctcatctcggtctgtgtaagataaggctgaccatcaggatcccttgagaggtgaaccttctggcctttagtctctccaacatcaatccattcagcactgaccgcaggatccatccacatttcttctaaatcctctggctcaacacaatcattccagaacgtgaaactgttggccattcttgcattgctatacgacctttccattgatatctatcagaaacaaacgaaaaacaagaggaaacagaagcttatttagaacgcatcgttaacaacatccataagtaacatgtttgccgaatgtacagaagaaaatcgaaatatcagacctagccgaactgtaagcgggaaggaagagagtatcgacgagagaagcaga

SEQ ID NO: 20025 - DNA, 530 bp, Arabidopsis thaliana columbia
tgcaagtctacttcgttgcatgaagtaatagtttcccaaaagcccaaaaaaaaagaagtgaaaagtttcattctaaacgcaaattctttcccgattcagattctatggacctgtaatcatctcgaactctaattgctttccaatcagagtcctctttggtctgtcgcagagccataaagtggagtgcatcacttcgaacttggtaaatttgacaagcccatgggtacgagtcaggtgcagaccaaaccttctgttcttcaaactcagtctgctcggccaaagacgttggcatgcaatacactgtgttgagctctggctcgatgaaaccagccactgcaacacatccaggagagacgaatccctcaggagcccgtggatgccagatcgatacaggacttatgtaatcatctaagcaattcctccacacctgacaagtgaataaacatatatgtatcatgctaaaaactcaggtttgatagagtttgcgtttgctcaaaatttggatgctgagcacttaatgcatacgatga

SEQ ID NO: 20026 - DNA, 568 bp, Arabidopsis thaliana columbia
agtacagaacaataatcatacaatatcaatagagcacccgcaaataattttagaggaaaggattagctatacaaggtgcaagattttacacagttagctccgtgagaggtggcagcaccagatttccagactcaatgagcaaagattttgtacgcctcagcataaaggcacctaagatgaacttcagactcttatatgtttccttgtcattagatacatcaagacctgttttaacacataggaaacacacaagttagtttagaactcttacctcttccgaatgaatatccacacaaaaatgtcagagtgcttagcgcactatatggctagtgccagcgaacctgatagaccgtccccagtctctttgaatgcggaaaggaactggtccagtgtcccaaaaactagtggcatgcaaaaatgcatcagagcccaaagttcggtaagattgttctggataggtgtgccagtaatcaagagacgtcgtggaatgaggaattgctcaagtaagacattatacagaacctgtgacatagccaacttgtatcttagatgatttccaggataaaat

SEQ ID NO: 20027 - DNA, 1221 bp, Arabidopsis thaliana columbia
tgcgtattggctcatgaagtaaaataatttcactagacccgtattttattatctttcaacaagaaaaaggtaaaagaagctatgtttaaacaagcttcgagctctacattacagaaggtaagtttatacacatacataaagaatcatatttatagatcgtttgttggaagtgaacccataagaatagtggtttctttgtcttgttttgtctttccaaataaacttgagaggaatcttagaggcaagacagatgtagaatctgatttcttttccgatacttgcagctctccagggttcttgttcggctttagttgtgctccgcaatggcagtttgagagtcttgataagcatttcttgtggaaaactgaaccgcataaccggcatttgctaacctcgtctttctcctaatcattgcattcaatatatcttggattaagcaacatttgagtgatagcgcaatacagctatgaactttataagaaaagaaaatccaatgccatcaaggctatgatcaaataccgaaaactgagagcaggagaagatgtgtaatatgttcattgcaagtgtaatgtcgatgctcacctgaaatggaaatattaaagaggatgtgtcgtcacaagcttgtcgggcattacagggaaccccacatcgctacaaacaaggcactgttctgtaatatgctccaggattttcctcttaacggtctccacgattgcaggaagtgctgccattcaagggtaaggaaataaataaattgtttaacatcaaacaagtagcagcgtggaaatgacttgtaaatcagttgctattgagatttggaatctaattctaacttcattaactttgaagagcaattcatcatcggtaaagtcagcatgtgcaagcatgagggaaagtatgcatgatctttaaatcttggttcaagaaaagaaattcacctgcaaatggccctttggagagatcaattagatctctcaaagcaaaaaattcagagctctcaagaaggtatctgcgagaactgagtcctttgtagagtgtcttttggaatgggcagcgtacatatggaagcataatggttattcttttccggatgctcataatatggttgagtgcagggacttttgaggacaaaaaagggttgaccgcactgacacaaagcataggctgccaaacaagatttgtcagacatcaaccaaatcaaggcgaagtaaagttattgca

SEQ ID NO: 20028 - DNA, 593 bp, Arabidopsis thaliana columbia
tcaggctcattcccaaaatacaagcaccaaagaaagcagcagactacaaaccaattgcactttgcaatgtctacttcaaaataatctccaagattcttacccagagactaaagcctttgctccacaagctagtgtctgacaaccaatctgcttttctagctaggagagctatagcagataatgtactcataacgcatgaaacgcttcacttccttaagacctcgggtgctattaagaactgttcaatggctgtgaagacggatatgtctaaagcatatgacagagtagaatggtctttcatcaaggcggttcttcaaaggatgggttttgcaagctgctggattgattggatcttggagtgcacatctactgtgacttactcctttctcatcaatggccagcctttggaaaaagtagtccatcaagaggtataagacagggagaccctctctccccttatatctttattctgtgtggtgaggtgtatcaggtttgtgtcgtcaactcaggttcaaaacacatgcacaacacagcctagagtcaatcacttctatttgcagcgatcaatgtcttttcaaacaaagaaggggtcg

SEQ ID NO: 20029 - DNA, 646 bp, Arabidopsis thaliana columbia
tttctccctcttctctcaaaaagagccaattcaagcctctgatccaagtaactagcatatgtcctaacgaaagcagagtgatcccaagagctagaatgagcctcatcacgaaaatcagacatattaagaatcctcgtacctcgtcgtgtagcgtagaggatctcttcctgaaacagtggacaagcataagagccttgagagcaacgatccagtcacgcgtcttcttaagacggcgtgaaacagaggtgacacaggcgtgaacgtagccacgggagagtgaagttaagctaaggatctcgcggatatacttgtcactagattgatcatcgtcgtggcttgtagctttcacgatcgcaacttccagatctggagccatgttgctagctaccttcgctatgccgatactagtctgatccttaacaactccgatcgcttttcgcatgcttagcgccatgattccactactacttaaggattcgaattcttcaaaaaccacaaacaaaagaaaaagtagcaatttggttgagaaattaatggagaatcaacgagaaattgtgattgaatttttctttggagataaatccgattcgctagatctgcggggggagagagaatgataagaggtggtaggtagagagaaaatgag

SEQ ID NO: 20030 - DNA, 523 bp, Arabidopsis thaliana columbia
tccccaggacaagacaagaactaaactaaacttgaaattctacggctcaagtcagaccaattgcatcaacacaacatagagtgtagctaactcctaaaacgtatcaatctagaccagcttaccaacttcaagcaaaatgaaaacacaagggtcaatgataatatagtgtaccttatcgtcaatcgtaactttaagatggaacctttgagctttcttcttcatattatacaatctacgtcccaagagaaccaaacccatcacagcagcagccatagagacagaccaaaccggaccaatcctaaacacagagtacttaagaagcacaaatggcatcttccaccacacagtctctctactttctaccctcaccaccagaactcacgcctccaacttccacagtatctcctccacttccctcaattacttcactagaagcaactacactatcagaaacaacttctttttcaccattcacaaccccagaatctcgagaaaccaattcatttcccctaaatcagaacac

SEQ ID NO: 20031 - DNA, 579 bp, Arabidopsis thaliana
agaggtagaggattaccgagctcgaatttatatgtatttatatcttatacaagttaagatgtgaaagcgagcagtggtccacgttatgtggtgggttgccgaagcaaagtggataaggaaaagctaacctccggaactcgagttgttctcgatatgacaacactaacaattatgcgagcccttccccgagaagtaagttcgatttggacatgtgttcggttctgttatagttatactcttgtagtgtatttctcttgataataatgtggttttttatgttgatggtaggttgatcctgttgtttataacatgcttcatgaagaccctggcaacattagctactccgctgtcggagggttaggtgatcagatcagagaactcagggaatctattgagctccctctcatgaatcctgagcttttcctcagagtagggatcaaacctccaaaggtaattattgtgtttattccccttgaacatatctttattacctcaagagatttcaggctgtgcttatgtagttccatcatgttggtgattgcagtatgattttacatattaatttctcggattgaattt

SEQ ID NO: 20032 - DNA, 326 bp, Arabidopsis thaliana columbia
ggatacctgatcgatcaaaaatgttaccaataagtgacaaactaaaaaaagtacttagaagtgtgaacggtatgatcatattttctatatcaacataatactaaaagaaactatcttattatactatttgtatgtaatatcaaactttataaattactaataataaataacaatacgacatataatcattatacaacaacaaatttcactaaccactactcaaataaatacacttatggtaacacaggaatactctgtacgtacctcaagaaattaccactaacaactctcgtcttaatctgcaccaatctctcgaaattacctgc

SEQ ID NO: 20033 - DNA, 536 bp, Arabidopsis thaliana columbia
  unsure (1)..(536): unsure at all n locations
cccctcactgctccttcatcccccaatcgtctcgtggaagattcgacggcactggcaaagtcaccatggtttttaggttcaagattttcaccggcaccagagccttacttcgcctttatggatctttcaccagcagaatcgccgagtgttgaggaagtttcaccatcgccgtcgtggggagaaggagaagaagatttcatcgtaggcgatgaaggaggtccgttagatgggaggaataacggcttttgatgtacacgtgtcgaaatctctgtaaaacacctagcacgtgtctttgactctttgtaaagtcaaaagagtcctttcttcttctttttttggtcaaaagagtcctttgtttttatttttttgcaaaaagagtcccccgttttgtagtgaaatttgaaatgtaacctccggaatttcttaatgcagattgattctgaaccgaatttaaccgacttataccaaatacaatctttcaatgaatatgccagtgaagagacatctgtcgagcaagcggcagtagcgantgcatg

SEQ ID NO: 20034 - DNA, 533 bp, Arabidopsis thaliana
gcatgtgatttttcaccacgagccgtcgaattggtcaaggtcagtcactttcttcttctagtctaatgtgtactttgatttggttgatttgtctttcctagtgaggttaatttatagtaatagtctttctgtctctaagctcatttaacaggtccaccttaatttatgcctgtgagtagttacttgctgcgtctaccaaatggaatagtgtgtgatttgtcatgtgcttcatagttttttgttgaccagagtgtatttaacttattatgacattcaggctcatgatgaatacacagagacacgcgtttgtgcatttgcttgtgacttgacaggggatggtcttgacaagcatatttctccatcttcagttgatattgtgaccatggtattttcctaacaaatttatattattgtgttaactaggtagaagataatgatccatcaaattatcttagtaaaagattaacactccccctgtaattgcgtcccttggtttttctttctttgagtatataacgtttgagcgttttctt

SEQ ID NO: 20035 - DNA, 472 bp, Arabidopsis thaliana
tcctgtccatggcctgttcttcaactgcagggttccaccacgggtcaaacaagtaaacccttgaggctgcagttaggtttatgccagtaccagaggccttgaggctcgcaagcaacaccacaggtccggttaactctggattcccaaattctccaatgacttgggtccgtttcttcacagtcattgctccatccaagcgcaagatggtgaaaccgcagcttttagtggagtttctagtaaaagcagcatcttcctgaattgagagaacacaacagactttgtgttggggttttcttgtctcgatgccatgagcagggatagtaaagctgagacctttgaggatttggttgaagatttagcgtcttctccatcggtattggaagaatccggagagtgaggcggacgattgtagagatccgattgggtaagggagcacggcacagagggcacaatggtttacttctttgaagag

SEQ ID NO: 20036 - DNA, 546 bp, Arabidopsis thaliana columbia
ttgctttgtttttgattagattgttgatgtgtttttttttgtgtgtgtgttttaggagagattttgttggtgtgttagttgtttgattttggctgatgttgtgtgagggaggaggaggaagtggtgtatgaagccgagctttaatacggatatgcagggagacgttttggctgttcatcgagatgatatattaggatacccgaagaagaccgatgttgaagattttagggatggagatgaaaatggatggacaacttcgagtaggaggaatacgttggacatggttaaggaaggtatgttgttgaatgcagaggagttgactacatcttgcgaggagaaggtatcgataagtagagacgaattcggtaccttgaggagtgaagcacagattatggtggaaagagatggtgtgaggagtcctgtaactagtaagtgtaaaacaggtgatgaacaaattacatcttggaaaaatgaaaatggacatgagtcttttaagctgtatgaacaaggtgtgttggagagagatgaaaaggtactcgattttgt

SEQ ID NO: 20037 - DNA, 632 bp, Arabidopsis thaliana
  unsure (1)..(632): unsure at all n locations
gtctttcaacactggtcctcaactagttcaaacaggacaccctgcttataactatgcgggtgggtcccaatacatctaaagacaaaataaccaggacatcagtcactgacacatggggtctgaatgaagcaaagtgacaaaaatgaccttattgaaaatgatctccatcgtcatttttctaaatagattcgccggtccacagacacctatgttgctggaatctgtaggccctaaaatttgcttggaagctcgtttctcacctgcatacagccagattagccatttattgttttgtttgtgataacaaaaggagccttatgtatttagcaatctaatgattttgagtaacaaattctttaatttattaaggaaaacgtgtgtgttaccgtgaggtcgttaaggtagacaaatttccagccatgaagaccaacacgaacagccaagtccatgtcctctactgtggtccttgatttccatcctcctgctgcttccattgccgatattctccatacaccgcggttcctatatttataatactcacttctattcatatatatatggtctaaaaatatgcttatagcgtcacaaggtgtnttgacgagtctatataagtgaagagctagtaataatgt

SEQ ID NO: 20038 - DNA, 431 bp, Arabidopsis thaliana
tacatcttacaaagtcggaagtcaatacgagttttttgtgtgtaaatactaatacttacaagcatatactaaacgcaagtatggatcttcgcattcatctgcttgatccaacaaatgagaatactccattatctgtgagaaatttgcaaatgttataatacagtacacacaaaaaacaacaaatacttacaaacacaggagaattagatgtataacactaacctcagccatcttctggagcatagtcataggctcaaatataacaacaggaagagtcaccattgacgtaatatccgaacctatatatttctgcatcatcttccagtaactatctcgttcctattaaatacaaaaacataagtttcttcgggtaagtagagaaacatagaggaatttaagaagaagtatcaaagacaccatcgacgattagt

SEQ ID NO: 20039 - DNA, 1493 bp, Arabidopsis thaliana
tagtaacgtccgccagtgtgctctaaaggagtcctccctcttacaggaagtggtgctcttttctgtgattctgaacagtgtgtgttagctttgtgtgctcgctcacttaattgcttttgaaaaagagtctcactgtgtagctctggccttcaacccaggacctgcactgtagaccaggctgactctcagtgctctgccctgcctcggcatcctggctgctgagactaaagacctgagccactactcccagctgataatcattttttaaagaaggcattcccattgctataattcttaagaagacctaatgatatagaggcagtgtgactagacaaagtatgaggattaaaactcctcacagtactgcatgaatgaaccagctagatgctcttcacctcacacaggctccaaccaccaagagataaggtacaattgctattcccattttccaagcaaaaacaatgaaagctgatgttaaaaactccccagtggagctcagtgtgtaaattacagaacaaagatttggatctaggcagtttggctccatgatctgccatcaccacactgcctggaaatacagttgtacagtgcatgaccctaggggagagaccagaggagaaccttcactattcctggaaatctgcacaggcttcctggcagatcctaacagcagagccctcgaagtcctccaaggatgagccctcagagtccctcatggaggaccccatgctgtcccaaaagtaggagctctcacagtcacttaaggaacccacacagcccatcaaggagaagtcctcgcagtcctttaagaaggaacccttgaagttctttaaggatgagcccgcaccatccctaatggaggaccccatgcagtctctcaaggaggagccctcacagtcactcaaggaccccacacagcccatcaaatgaagtcctggaaggccctcaaggaggcaacaagtcctcacagtcactcatggagggccccatgcagtccctgaaggagtactcctcacagtcactcaaggaacccacacagcccatcaaaaagaactcacagtccttcaagagggaacccttgatttccctcaaggaggcaccctcaaaatccctcccagagtagccattacagtcgcacatggagtagccttcgaagtacttcaggtagaagcccttgaggtccctcaaggcagaaccctcgaagtccctcaaggatacgccctcacagtcactcaaggaccctacacagcccatcaaaaagaagtcctcatagtccttcaagaaggaatcctcggagtccctcaggaatcacccttaaaatccctcccagagtagccttacacttgctatgtacaattttctgaggaattgccaaactgatttccagagtggttgtaccagctttcagtcccaccagcaatggaggagtgtttaagaatttcattaatatgttgctttcaatagctgagtagtactccattgtaccactttag

SEQ ID NO: 20040 - DNA, 576 bp, Arabidopsis thaliana
gttgttggatttgctctcaatgagtatttgaaagttaagttgttgatactttacgccttatcaggtgatcttcaaacagctgggattctctttcgtagtttgaagattagagatttgataccgtggaatgcaatgatatctgggtatgtgcaaaaaggtttagagcaagaagggctttttatttattatgatatgagacagaacagaatagttcctgatcagtatacatttgcttcagtgtttagagcttgttctgcgttacgatcgttggaacatggaaagagagctcacgctgtgatgataaagcggtgtattaagtcgaacattatagttgatagtgctcttgttgatatgtactttaaatgcagtagcttctctgatggccacagagtatttgatcaattgtccactagaaatgtgattacgtcgacctcattgatatctggctatggatatcatggaaaagtttcagaggtgttaaaatgctttgaaaagatgaaggaagaaggttgtagccaaatccggttacttttttggtggtcgcactgcgtgaaccatggaggtttagtgataagg

SEQ ID NO: 20041 - DNA, 538 bp, Arabidopsis thaliana
gttcaaagaaggcaaagatatcgtgggaaaaagtttgtaagccgaaaatagaggggggtttgggtttgcgaacgttgacaaaagctaatgatgtttgttgtttaaagttggtctggcgaatcatttctaatagcaagtctttatgggttcaatgggtcaccacataccttcttaggaggaagcatttttggacattgaagcagaatacaaatgcaggctcttggatttggagaaaaatactaaagtacagagacaaggcgaaataatgtgtacaatgcatcattctctaccaaagaaacgtggcaccatatcagagctccttctcccacagtcccctggtacaacgggggttggttcaatcacgccacaccaaagttttcgttttgtacttggctcgcggtccaagataggctctcaacaggggagcatatggttaaatggaacagaggagaatcgggtctctgtgtgttttgtactacactatggaaactcgtgatcatttgtttttccctgcaactatgtctcgacaatttggggt

SEQ ID NO: 20042 - DNA, 516 bp, Arabidopsis thaliana
tccgaataagtttccattcatatgatttgattattgatgtgtccactgtccaaaccggtcttggaccaaaccgtattgtccactccaatggttgatgacttgatggtatatctacgtgtcattgaataatgttttgttatgattccaaataggcaggtgggccttactatcaagtgaaaaaaggaaggtgggacggaaaaagatcaacggcaaagaacgtccctccaaacatacctcgatcaaactccaccgttgatcaactcatcaagctcttcgcgtccaaaggactaaccgtagaggaactcgtcgtcctttctggttccacaccatcggcttcgcccattgtaaaaatttccttggtcgtctctacgactacaaaggcacaaaacgacccgacccgagtcttgaccaaagattactaaaagagctccggatgtcttgtcctttttccggcggaacgtctggagtcgtccttccgctcgacgctacaactccgtttgtgtttgataatggata

SEQ ID NO: 20043 - DNA, 1258 bp, Arabidopsis thaliana
ctagtaacggcagtactgtaagcatgtcgtatttaacaacttattaaggtataaagggtcataccagtcgggacttgacaaattagccttaagcttctgcactttggccggatcaacctgtgccagaggatcatagattgcttgtgaaggcagacaacccttcctcatgcagctcagcccgttatctccaattactggaaaagtgttagtggtcattagatcgggtttaatcaatgacctcccatccggggccagcttaacagtttttctcctcgcatcttttactctctgcagcctctcggtttcctcctcatcttgggttttttattgtaacctttggcacctttggaggcacctttgtaggctcctttgtagcagcctttcttcctcttctctctggcggtttctcgattagctcatttaatgttttctccttaacattagctttttgctttggtaatggcttcggtttggaaattcgaaccgccaccatcgtagagcgtaaacggcggttgagaggagacgtctcaatgaaatcaatatcagaaacgatggaggccttagcaaattctccatcaagattcctacttatcccaacctaagcaatatcagcatcattctctaccgctacagcttgtttcgactgcataaacgtaacgaaaactcaggcgttaaataacgaaaactcatacctatgtataaataaaactcagccataactaactaaaagttataactcagccgtataatatgaagataactcagacataactaactaaaagttataactcagccatacaatatgaagataactcagccataactaactaaaatttataactcagccgtataatatgcagataactcagccataactaactaaaatttataactcagccgtataatatgaagataactcagccataactaactaaaagtttaccggaggaggactagtagcagattggttatttgtaggcttctttggaccttctggtgtctgttgagtttggggcttagggtagccttgctgtgttttgggtaaaaacatatctctaatataactagtagagtttaattctgagtcagatatgcccttcagatgctctttaatttgtttgacatcgttctcattagatccaaaccttctttcaaactttgcatcaatcctcgattctacttgaactccaatcacatccagacgcgaggacatttctttgatgctattacaacggtgtcaaccttgagtttagggaga

SEQ ID NO: 20044 - DNA, 496 bp, Arabidopsis thaliana
tgatctcctctggttacgagaaggattgtgttaaaatctacaagaagtttcgcaaaaagatcatcgtcgacacattgtctcatctagggttcgagaagctaacctctacacagatgcagaaactggaatgggagattctggagaagaagatcaaaatatggggtgattgttgcgagagtagcaatcaccactctgttcaacggagaacgaatcctttccgatcacattttctcctcctccgtcgctgaatcttgcttcgttgacataacgctacagagcgcgttaaacctcttcatcttctcactaaccgtagcgaaatccagaaaaactgcagagaagatcttccctacgcttgacgtttaccagacgatcttgcaactgactcccaaaatcgatcagatttttagctacgattcaaccgctgccgttagattacaggcgaatgaatctctagagaagctatcggaatcggtgaatgcaatgatgacggagtttc

SEQ ID NO: 20045 - DNA, 646 bp, Arabidopsis thaliana
  unsure (1)..(646): unsure at all n locations
gggtaccgcgtctgcaaaggataccatcgtttaagctggcctaaggtaccttccccacaatccaagagaatactgcctctagagaataggtcgatgtaaattgccgtgacatttcggtattttgagggttgggaggaaccagtgcccaaaagaactatctccatgtcgtctcttctaatgttttcaagacagcttggaacagtgctttcacccagccatggctcttcgatcatcatcttgttgtgttgtccattccataactgcttgatttcttcggtcttactgctgatttcaggaatttctgaaagaagctcatccatcactcgtaaagctgttaatcgactagggatactagatctgtctaccccaagattaccatgtggacgcaaagtgaactgcccacaatatatcaatgagagaaagcgagagacttaagagctaaagaaaggaagtttcatatggaatgatgcactgaagcaacattcaataccttgaggagattttcagcagaaatgctttcaccaagattcgaatcgaagcactgacaagagaagaaaagaacacaacttgactanatgacacagccagattcactcaaaaagaaatatcagaaaagccgttgtaccttgctcacagaagtggggtt

SEQ ID NO: 20046 - DNA, 845 bp, Arabidopsis thaliana
  unsure (1)..(845): unsure at all n locations
ttcatcaacaatctgcccaaaacattgttactaggcaacatgtaagagagaaagagagacgactaagagaaagtaaagtctcattagagaataagagttaccatgcactcccacttaattggttttagaactgctgaatctaggttgatcatctcatacgatgtgaggaggacatcaaacttgattcttttttgcttgtttcgctacttatttgtccagatttctttttcttgatctttttttgatctttcgataagtaaaactcatgttctctgataactgctcgnagttgcgcagtgccaaaatacataacctacccgtcaaatgaccacgaagaccattccattaacaaacaacaaaaacatacaaatggcacagatcattgcgtgtataactgcatacataccacgttcatctgtggggcccatgtggcaaactctctctcccagttacgcagagtcgatagaggagcaattaccaaatgcggaatgaggttctcctcaaaaagtgaagctaaaagggcaatgctttgaattgtcttgcctgtaacaggaaaaatctcacaacattacaggaatagaaaacaaaggccccttacaatggatgaaaagatctatgtgaccacccaagtgggacaattgaaaaattacctagtcccatttcatcagcaaggattacatgcgtctgttttgaccacgagaaccgcaaaaaattaagtccctcaagctggtatggatgtaacaagccttcaatcgcaggaaacaaataaatcataacatctataagtaccaaatataagaaacatttatagtatatgatttaaggtgaccaaatacctttgagga

SEQ ID NO: 20047 - DNA, 1912 bp, Arabidopsis thaliana columbia
tattactaccatgcagtttggttcttctatctttgattacttcttaatttcgatattattttagggaatgtattattttagggaatgtgacattattaggcactttgtgagaatctttttacgtttgaggcacttgtgagagagagggcactttgccatctttttttagaggagattgaaccaatttgcgccctgaagtgatgaaaacacaataatttttagacttattcctaatgagatcgtgtgggtgagaaactaacttttttttttgctatcacttctcctttccatattcttttgtttttcatcattttcaattcctctttcacatcatagtcgttctcaataattcttacaaaattatgaaaattctgaggttatctcaaaattcacaatcacaatctatgtttaccctaaatttcctttatttttttagttttgtattcttttctccattctccatcatcaaatccatttcattatctgcaacctccatcaatgaacgactatgaccaacaaaaaaagtaaaatcatcgatttctccttttcgagacgaagaagaaggagatccttactctctgctaccgaattccctcttcccttaatctccctctttttctggttccatgttcttctctcttgtcttacttacggtttctggtttcggtttttttttttttggtaaaaggtttctttggttttgaatcataaaggccaatggtacatgtgattcgttgattctagcttaggctttaaattgtaaatctttaaacttttttttttgttatgggttctagattttatgattttatccttcaatttaaatttatttttgttagatctgttgaatttattgccttgtttttgaattgaaaaatgtttggatgtcatttgcgtagatggaaagtgattggacgcataaggctgggtatgtggtggttatgcaagaagattggttgatgtttatgagctttttttgaaactttggtccatgaggctgcggtggccgccgtgagctccagtgtcttgtctggcaactccatacttatgtcgactcatggatgtcaagaaaagtttacgagaaaacacgaaatgtatatccatttgttcggcgctaggtggatacaccttcatttgttgcactatatccatttggtcgatgtttcatggatacaactctacttctaaaaatcatagatgaacacgtacttgccgattgtcagctataggaatccgtccattactcttcgaagatatgttatccaactaatgaagtattcttttatttgattttggtgaacaatgtttagatttggtgaacaatgtttagattttgtgttattcatctttcgtgtatttgtttgtgcagataaaacattttaatgtaaaaactgtaaaatataggatcattcctatggtaatattcatatgattatattcaaaaatggttcatacgagtgtgtaaaccctctacctttaacgctttacactaaatcctaatttacttaccctaaaattaaacccaaaccctcccatgatccttctccactaaatctaaaaccataaaacaaaactctgaaccatacaaaaaatgataattttaccaatcaataaaacacatttgaagcaaatcaaagacatagttgtccattgatgactatccaagcggtttagtccatgtggtaatctagtgactcatgaggtcgtttcatttcaatacacaagtttatacatgaatgataatcaccaattcaaacacccattcaaagtacatcgtctatttttctttaaccatttattcacttgtgtatggaaactcccaatattataaccaaaattgtctactaatcctagatataacaagaaacagatttacttatattgtgtataaaaggagcgttctcgctcgggg

SEQ ID NO: 20048 - DNA, 775 bp, Arabidopsis thaliana
tttgaatgttcttgtgctacaagctatcatctccacaaatctccacctgatagcataagcagtaaacattcacaacatctagagtttagaaaagagagagagagtacctgattctagtttctggattccagtctcggatcctgagtccattactcagacttgactcggagcaagttcaaagcagcctgaaacttgctcacagccaataccttggtgaatatatctgccggattcttctcagtagatatcttcaacacctccacagtaccatctgaaatgatttctctgatgaaatggtacttaacatcaatgtgcttcgttctctcgtgatgcacattgttcttcgagagtgcaatagcactctgtgagtcacagaagatctcaacactcttctgttcataaccgaagtctttaagtaagcccttcaaccaaattgcttctttaacagcctccgtgagtgacatgtactctgattcagttgttgactgagcaacaactcgttgcaagcctgacttccagcttattgtgtttccaccaagtgtaaacactaaaccagtgattgatcttctcttgtcaaggtctgcagcatagtctgcatcacagtagcccacaatactgaaacttgagcttttcttgtaacacagtcttgttttaagagtacctttaatgtatcttagcacccattttactccaagccaatgctccttgataggttgactcataaaacggctaatgataccactggataagctagatcaggacgtgtgcaagcatg

SEQ ID NO: 20049 - DNA, 1594 bp, Arabidopsis thaliana
  unsure (1)..(1594): unsure at all n locations
tctaagtgttcagtcgctcttcacaagactagattcatccctcaaagatttttccaagtttcacctctttaaaaaatatattcatttcagcgaaatctaagtgttgagttcgctcttcagaaaactagatttcatccctcaaggatattttcaagttccacctctcgaaaaaataaattcatttagctcgctcttcacatgactagatttcatccttcaaggattttttcaagttccacctcttggaaaaatatattcatttttggttaaatctaaatgttgagtttgctattcacaagacaagatttcatccctcaaaaagtttttcaagttccacctcttggaaaaatatattcatttcggtgaaatctaagtgttgagttggcttttcacaaaactagattgcatccctcaaagatttttccaagtttcacctcttggaaaaatatattcatttcggtgaaatctaagtgatgagttcgctcttcacaagactagatttcatccctcaaggatttttccaagttccacctcttggaaaatatattcatttcggtgaaatctaagcgatgagttcgcccttcacaagactagatttcatcactcaaggatttttccaagttccacctcttggaaaaatgtattcatttcggtgaaatctaagtgttgagttcgctcttcacaagactagatttcattctcaaggatttttccaagttgcacctcttggtaaatgttggagctggattcccctccaagaatccttctgcgaaaataccaagccagcccacaaaagcccaccaagcccaccaagtagaggacctacgcagctgacgtgcccacatacgcgaatgggtacttgggccagataagcccagtcacctgatgaagggagataagcgaataatgacctaggaactgatgacgagatattcgcggaggnaccttgatatctcggaactgacctcccgaatatccaggaggatctccgcagagcccggacggagttaccacgtgcgtagacctatataagggagcaaggacgacttggaagagacattcaatctagcttacattcacacacacacttttacacttgtaatctcttttctcattgtaaaagctttgtcaaaatcaatacaaaagtccattcgttcttagcaatataactctcaaggtttcagtgaagatctagccctcctttctcataatcttaaatacaaatctctagtgtggaaataaaaacccacaatagtgttttaggattaatggactaaaatcctattatcaatttggcgccgttgctagtttggtgtttgtttgctatatttgagatcattagaaacgttaagatcaagttcgtttttgttacacaagttactaacattgtgccttttctgtctttgtgtttcaggtaccttgcaacccgctttacagacgcatctctgattcgtctgttatagcccagctgctatctgttgcatgtatacacggtcacaaggaagttagaacctcctatttaacaataacatcgaccgtattgctcgcaacttagagaacagacagaaacagacacaatggctgacattgtaga

SEQ ID NO: 20050 - DNA, 1715 bp, Arabidopsis thaliana
tgctcggaaggtcggtcgagtaaagtggtcgagtggctgctcgagtgactggtcgagtgactggttgagtggctgctcgagtgactggtcgagtgcctgctcgagttgtttgccagcttgatctttattgagactgaaatcctcgccattttagtatgcactgtcctcagtgactgacttgggtctctctccagtagataactctcttccacttcttatggtgatagcatgaacattagcatactcctttggagtctgtattgactttccaggaagtcctgtaactttgggcgctgaggtagatgctgattgtccttccaagtatctgactttggtattcaatgcctccagtttggcgttcaggtcattgtagctgcagtccagcttatggtgcaattcaaataactacttagcaatttccatggagctagatgtttgtccttgtagcagctgttgtaccatttatttcatttcagcatcatgagcagcaggaccttggttttgctgatgtgcaaaccttggtggtggttgcggctggtagttcccctgaaattgctgcttggaacaaaaccttgattatagggaacaaaaggtttgttttgaccttgttgttgctgtggaggatacacttgatcctgtggattagcaacgttagtgctgcggtaagagtggttggggttgtgtgtcttgaagttgttgtaccctttgtagccaccttgattgtggatgtagctaacttcctcgtcatcaacaaggaagtgcacatgcttctgctggctaaaaagaatcttgtcctgcttgtcattcagtgctttgatctctttcttgtgtttgtcatccgagtcagttgttcctctgatggtcctgttgcagtcctcgttgtaattaccatctgattgagctaggttctcaaccaattcccagccttcttcaacatctttgttctggaaattcccattgatggcggtttccagaagcattctgatgtgtgttaaaactcctcggtaaagagtgctgagcagagaggctttcttgaagccatgatgagggcattggttggtgtaaccttgaacgctcccatgcttcacatgagctttcaccaatttttggtgaaaaaccagaaatctcatttctgagtcttgcagttttggcattggagaagaactttgctagaaaggccttcttgcaatcatcccaagtggtgattgagtcatggggcagactcttctcccaattgtgtgctttgtcgcccaaggagaatggaaacaaccggagcttgaattcgtcttcactgacaccgttgattttgggtaggttgtagagcctatcaaattcatcaaggtggtcgagtggatcttccattggcagaccatggaatttgttccccagaatcatcgagatgagaccactcttaatctcgaagtttttgttctggatagcaggaggtgcaattcctttcctttgacgatggtcccgtggtgcatctccaacaccaatgttggcagggccattatgttgattttgttcgtcagccatttcgagtgggtgctggggtaagcaccaatgttggccggcccattctgtctgttggtagggccattctgtctgttgattttgttcatcagccatttcgagttgatctaagcaagtttgaaatatcaaatgtaacaaacaaacaccccaattggcaacagcgccaaattgataataggttt

SEQ ID NO: 20051 - DNA, 1024 bp, Arabidopsis thaliana
ggacgtggtcttcttcgccgagctcaatacttggtttttcaatgaattccactgggatgattcttctcaggttcgggtcggaggttgaggccagagcaactagggcgtcggccgatgaattttctcctcttggaatccttgttatcttgaattcgtcaaaatattttgctaacttttgaacatgaatcaggtaggcttccattttttcgtcccgagctgtatattccccgttgaattgatttgcgacgagctgggaatcgcaaaaagcgtggattttttcaatctttaacccccgagctagattaagtccggcaacaagtgcttcgtactcgaccacattattggtagcttcgaagtttaacctgaatgactgctcgaggatttcacccgttggcgaggtgaggcggatgctacacccgagccttgttttgatgacgagccgtctacatgtaggagccaagttgtgtcgagtgggttttcccgagcttctttggtgggcaattcgacgataaaatcagctaggacttgcgattttgcgcatgttttgttccgatattcgatgtcgtattcactgagctcgattgcccacttagctagacgtcctgattggctttgactgtgtaagatggcgcggagtgggatggatcccattactacgatggaatgggatagaaaatagggtcgtagcttccgagccgatattacgaccgctaaagcaagtttctccatttgtggatagcgagattccgcgccggtgaaagtctgtgagacgtagaaaatcggcttctgttcgcctctgtcttctcggactagcactccgctgactgcagtatctgatacggcaatatacaaatataatggctctccgattacgggtttggcgaggatgggtggtgttgctaggtacttcttgagttcttgaaaagcttcttcacatcggattgtcactcgaactttttgtttcccgtagcacatcgtaaaaggctaagcatttgtctgttgatcgagagatgaacggttgagg

SEQ ID NO: 20052 - DNA, 1232 bp, Arabidopsis thaliana columbia
ctgttttccgtttttgtcttccaaatgatccagttttacaataaatcacggtaacttttgtcaaattcctacaaaatataaaatttcaaatcaggaaaaatttgactaaaaatggtaagaatataaatagcaaaaaaataaatctctgtaactttcgtcaaacataaattgtaaaaataaattatttacgtgtagcacttgtgaagaaaatggtcgcgtctttataattggattgttggtagctgcatataactggatatcggaagaaagagttgaatcatgaaatcatttttatcttgtaattagtgtacataaatatattgacaaattcaccaaaaagtctaatataaatagtaagaatgatatttttaccagtagcacttgtggagagaatgttctcatctataaaatcagatttcaggtagctatagataactttatatcagaaaaatttgaattcttaagcatttaccttttttattttgtaattaataaacataaatatattgatgaggtcaccgccagtcctgctaaccagacctgaacacccaaatgttgcaggacaacctggacttcatcgacaaacgcaaagatcagacaatgattcgagttcaaaattatcaacaagttgccgcccgcttctacaactccaatattaaaattctgagatttagcgtgggagaacttgtcctacgaaaagtgttcagcaacacgagagagataaatgccgaaaaattgggcaccaacttggaaggtccttatcgaatctccgaggtagttcgcgacgacgtctattagctcgaaaaagtaatcaagggaatacctgagttacggtcttggaatgccatgcatctaaaaaaataccacgaaaatgctctctacaaaattgaactacgataaggcttgaccccttggcatggtacgtaggcagctcccccaagagtgcagccaccaccgcaatcaaactacgtcatggcttgatcccgtaacagggtacgtaggcagatcccccaggagtgcatccaccaatataaccctacttcagcgtaggtcaatcccttagcaagacatgaagagaccacgccgtcggacaaccaaaccacgatgaattacgctcctctctgatagttagttttttgaggtctaactatgttgtgttcaattttaccttaaacactaacatgtcgatgcacaataaggggtgtcatccattcacagtgattgctaggtga

SEQ ID NO: 20053 - DNA, 2204 bp, Arabidopsis thaliana
gtgctttggctctgagtccccgctttcaaacctcacctccagcttgttcttgattgtttgcttgagggcaagcaaagactaagtttgggggagttcataagtgtgtattttgcatgttttgagcatccatttgtcatcactttagcatcatatcatcattgttttataccatttctcatcatttgtcatcactttacatgtttaggatagatttgcatgcatgttgcatatttgtgttgattttaggtgatttaaagctgttgacaagctatctggaagaagcggacctgatcatgtcaaaccactcgaacccgaggtcgagtaggagcttcaagatctcaagagaccactcgacccccaggtcgagtaaaagaaatcaccacttcgcctcaccactcgaccacgaggttgagtgtcctcatctccatcacctgaccatcactcgatcacatcactcgacccctaggtcgagtgtcttcacctccattatcataccaccactcgatctcaccactctgccttgcagtcgagtatcaccatcatcaccactcgactgcgtactcgctgacaagcttcagagccttcttcattccgcactcaaccagacactcgagcacaaggaagaaaagaagactccaactattcactcgatctcccactcgaccacatgggtcgagtacagtttttaatccgtcccagtactgcgtcgttttaagtattagggtttcagaatatttggctataagtagcatgtacttcacattttcgcagacaagttttatttatctagttttattctgcagaccttgtgttctagaccttttgtaatccggatttctctttatctattcagtattcagtattcagcttttgttcttgatttcgtttactgttgttcattctgttatcatcctgctgttacactgttgttatcatgttttcaacttgttcaacgtttatgctttctgttatgatgtctgagtagtgaatagatttctgaggatgggttagagtagtgtagaattctcaatatgctaggtgattgagtattggttgatagataccttctggattagttgttcttaatgcctattgctttctgatcaactggaatttgagcccagacatttccgtgcccaaaaggtgttcgatgaaatgtctgaaccactaattccagatattcgtgaccctgtaccaaggtattggttgcaaggagcgttttggctttaacttgttgattcgtaatgcctgttaggttagctctcgtcaatggtgattgagtctggaaataggttaacttgagagtctctgttgcggtggcactttgatttggttaatgaacttgttgtttatggttaatttattgagcatatcaatcacctgtaaactgaggaaacgaaactactcaattaccccacccttgggaattctttatctgattgaattctttgtttactctactgttgtaaactgcatcttgttatctgtcgcttaatttctgcaattctttcttgttactcgacctcatactcgaccacccagttatttggcaacagactgtgcagtcgagtatctgtgttttattttctgtctgttactcgacctgtcactcgacctcacccagtgctctgcaaagagctgtgttggtcgagtgttttactgtttctgtttgattttctgttttctgcatgttcacttaggactgctagaacacaccaaaacctgttattgcttggcttgacttagtgacttctgatcacatcttgattgttagcatcacacccatttggattgacaaccttcagtactacaacgagatgatagtgctttaggtttaattgattaaaaacctattatcagtcctttcctttgacatttgtaacacctaacatcacaaactctagatgtagaaatttcagcctttcctttgtgatcttgaactgcagcatatggtttactttcagcccttgaactcacaatcggcttatagctgctggttctctcctctctttggtaagtaggcttagaaatggttcctgaaccataactagatcgtgaagaactcttcctcttaacttgctgctcaaacaaaatcgccttgtgcaacatctcttctctttcaacatagtattgagtctccaatctgtcttgaatatctctgttcaaacctccaactcttaccctatggatctcggtgtagtgtt

SEQ ID NO: 20054 - DNA, 727 bp, Arabidopsis thaliana
tactactacctggcgagatcatcccagtgttgaggagagccaagctcgatattgaaatcgataccatctagaacagcatcacctaagggacgtgatgatgattttcctcccaagaagttgttccacagataatcagcgataacttttgcgtcctccctcgacccaatcgagtagtttccaatcccgccgccgagagacaacataaccttataacaattttgacataagtatcaaaacaaatgtcatttcaaagtagctaactaaattatagaatcaaaatttgagtagataaaaacaaaagctatttattttctatctcggaaaaaaaaccatctagacctaaaggatcggatgtatgtgaatgaacgaaccaaccttgatgccacgagactgacaatctttgacctgagagccaaaatgggtgcaagtgttcgccgcagggttgcagtggccggcaaggttgagctccggtgtttggccatttccgaatttcacaagaaaggcgacgttgacgtaagcataccggccggtggacacgtggcagagaggtaccttcgtttccgttttggccccaatagatggctatgcacctctggatgcatcggagggtttgctaagagagcagcttatgaagaaaagaaagtatataacatgcttgcgaagagtcatgttggtcatgtttttggttaaagatgttttgcgtcctttgtggttatgtgtttgtttg

SEQ ID NO: 20055 - DNA, 1562 bp, Arabidopsis thaliana
gtaaaacactcgaccaacacagctcgttgcagacactgggtgaggtcgagtgactggtcaagtaacagacagtaaatgaaacaaatatactcgactgcacagtttgttgccagacaactgggtggtcgagtatcaggtcgagtaacaagaaagaattgcagaaactaagcaacagatgacaagatacagtaacaacagtagagtaaacaataaattcaatcagataaagaattcccaaggatggtaattgagtagtttcgttttctcagtttacaagtgattgacatgctcaataaattatccctagacaacaagttctttaaccaaatctaagtaccaccgcaacagagaccctcaagttaacctagtcccagactcaatcaccattgacgagggctaacctaacaagcattacgaatcaataagttaaagccaaaacgctccctgcaaccaataccttggtaaagtgctatgaatctctggaattagtggttcagacatttcatcgaacaccttttggatgcggaaatgtctaggctcaaattccagttgttcagaaaccaataggcattaagaacaacgaatctagaagggatcgataaatcaaactcaaccacctagcatactgagaattctaaactactctaacccatcctcagaaacctagtcactactcagacatcattgcagagagcataaacgaagataagaatgaaaacatgatagcaacagagtaatggcaagatgataacaggatgaacaacttagtaaacgaaatgaaaagcaaatactgaatagattaagagaaatccgaattacaaaatgttaagaacacacagtgtcatcggaataaaacttgtctcgaaaaatataaagtacaagctacttaaaatattctgaaaccctaatactcaaaacgacacagtattgggacggatttaagataggcactcgacccaggtggtcgagtgattggtcgagtgataagctggagtcttcttctcttccttgttcttgagtgtctggttgagtgcggaaaggagaagactctgaagctggcagtcgagtatgatgtcgagtggtggatgatggtggtactcaacttggtggtagagtgattggtcgagtgtgcgattatgataggactcgaccatgtaatcgagtaagtgatcgagtgaaggtgatggtggtactcgaccagggggtcgagtactgatgtgaagtgatgaggtcgtctactcgaccagggggtcgactgcgtggtgagaagaggtgatgccatctactcgaccagggggtcgacgtggtgatccagagtgttgcggtcgagtgatgttgtacggaggccgtgaccgagtccttcagcaagtccaagatggaggtactcgacctcggggtcgagtatattgatatgatcaagtccacttcttccaatgatgtcgtctacagctccaaatcacttgaaaataacacaaatatgcaacatgcatgcaaaactatcctaaacatgcaaagtgatgacaaatgctgagaaatggtataacatagtggtgatatgatgc

SEQ ID NO: 20056 - DNA, 560 bp, Arabidopsis thaliana
tccaaatgttccaaaatattcataagggaatagtacaggcagagtctcaaccatcacacactaagataccattatcctctcatatccatgacgctgcatagtactaaatcaacgtatatatgcatgctttaccccagtaaaacaaatgacccagaaagtagcaagcacacaagtgagattactacacttgtcatgataatggtgcatacctattactaatggaccccttgacaattgcaacaggagaatactcgtccccagtatgtaacatgtcccagtgaaagtgaagtctccctcctccacctccaccacccccaagaggcccaccccggccccctcgaactgatagagatgaattctttgagagttcaagcatctgaaggaaaagaagaatcgtcccaccagatcccccaccaactccaccgaccaaagatctgttaccattcgctgttggcttccaaaggctttgaccatcagagctcagagatccccgcagattaagagtcaaaagaggaaactggatggagccaattactgaaaaggtggaaaacaaatttgta

SEQ ID NO: 20057 - DNA, 1496 bp, Arabidopsis thaliana columbia
aagctgttgggcgtgttcaccgaattggacaagagaagcctactctagttcatcggtttctggttagtgtatctgctttgtttgccaccttggtcttgtacagcttcaagatcctgccttatgtgattcactttgatcttgacctctcttttttggggaaccaggtatcgggcacagtggaagagagcatctacaaactgaacaggaataagaatacaaacttaagttcatttagcagcaggaatacaaagaatcaagatcacagttcttgacactaaaagatcttgaatctctatttgcttcaccaacagcagaaacagcagagatggaacaaaacccaggagagagacaggagaatctgagagatctaccaccctcagtcgctgcagcattagcagccgagaggagaatgaaggaaagtaatgcatcctcatcaactacaaacgcatcatgactatggaaaaggttgcagagagattggttccagccaaatgtttgttggagcgtcttgttgtatgcacataagatggtgaagagagaagctgctcgaaataatactttctcttttgtgtcgtccacgttcattatgtaggttaggcaaaggataagctcttttatttattcattgtattgcaacagacattactgcgttaggtcttctatactttgacatggaaataataactcatgataaatgcaaaatgggttctcttttcaagtaacttggagtaagtgcttttcttgtttgttataacatttgagaagacaaatcagtcaactacattgaagaaatgaaaccagaaagccccagaaaagaaccaaaatttattcagctccacgccaaagaggcggtaacaaacttagaaactggaaaactcttcacttagtcttgaatcttggtgatatctcacttctcttcagttgggggtgggtcaatgaatgtcttctttatccaaccaaatggctgtgatgataaagaatgtgtcagatacaatacattatgagtttgaaaagaagcttagtaaaatagggtcactagcagcttaaggcgcctaatctcttcataacaccaaaccaagagcaaattgtgtctgtaagtgatgaaactaattcatgaagaaacaagctcatgtatcagtctgaaataagtgcaactctatcctccttaagatgttaatggcgtgaagcaaggatcaatagaagctaggcattttctgtagaagactaaatcagaatgtaagtgaaaccaatagtacaaggaaaacgaaatgaagaagatttgatcaccaattcaagaatagactagcaccaaaacgaatcaagcctttcatgaaacgtaattatatgcaacgatgctcataaaagtaaccacctttatagataatctaatgagatcaaagcaagtaaatttgataaatggtgatcaattatgaaattttcatctttcaaccagataaagccaacaatttcaccagaaacataacattagctagaga

SEQ ID NO: 20058 - DNA, 984 bp, Arabidopsis thaliana
tgactcaataaagtttatgtcattgatatgatcctggtgaggaatcaatcccaatttcggcacttggaagatctggagtggatattctcaaaatagagatgacacacgactcaaagacgagatgatggattgaatgactccacaaaaggatgcggaaaagccttttgataagtcgagaaagatctaaattcgacatacgaaaatggatcaatgatctatttttaagagagagtttttgataaaaagatatatgagttctcataagagattacaagaggtttataaagaagaaagaagtattggaacacactcacaagactaccatggaaaatgaaaagaaataaaaactagtttgaaagtttaaagataacccttctacttcttgcctccaaaatgactcttgaaatgctatttttgtcactcctcttgaccagcaaattacccacttggtttgggctcttcttgggcttgtgatggtcataaaattggctggacttcatatatattctattgggccaatttttgaatattataccatggtttggatcatcaaatgggtgatttgaatgtgaatcatttgcctcattaaaaaccttgtcaagaaaacctattgggacaaaacttgacaagggaaaaagagtacaaatgagacacatgcccatttgatgatcatgtatcaaaaccaacgaggttaagataacatctttcccatactctttcttcgctagaagctcgttttctggttcaaaatgctcctcaggttcaagctgctcctctgcttcaagctcttcctcggctacaagctcttgatcaaattccaagtcctttgtgctttccatgatcacatcactagataagtcatcctcgtccatcagctcttcagtacagaagctcacactttccaatggtgtcttaaatgttgagtcagttgaagacagcgccactgttgaagacaacgccactactgagacatcgggacgagct

SEQ ID NO: 20059 - DNA, 1996 bp, Arabidopsis thaliana columbia
gtgacttcgtaagttcatatacacctataagacaagagcaaatatcaagtataaaggattagtaatgaaagtaaaaggcttagtctcaagcaaatatgaaatcctaaaggctaataaatattgcaaaccggcaacggcgccaaattgatgtagcattttattcaattgtttatcgaaccacaatttgcaatcaatcaactcaccaagatacacacaattgcttaatctaagctaacagatgatttgagtattctaaatcttaataaccatgcattatcaagcaaacaatgcaaaacaaagtaaaagaaaccaagaaacaaaagactaacaagtttcgaaagtaaacaaagcgggaaattaacaaattactaagtgataactaaagacgaattctcgggttaaggtaatcgattagaaatgataaatagatggattctagagcaacaaacaacttctaacaagcaatgatccttaggccatagaacactaaacaagactaatacatttccatgatattaatccttttactaatcaatcaatcatcaacaatttccaaaggcaatcaaatgatcaataagcataaataacaagtctatctagccactaataaccctaatcaacaatttccaaaggtaaggtatgaaaagcacttaaagattttggttcgggaatttcatcgaacaccttccgggcatgaaattcctagtgtctaaatcaacatgatcaaagttgatctagccttaaaagcaatcaataagtaagaatcttaagtaatctagccctaaaatccataacccaacatctaaaccatcctaatctaccctaaccaaagaactctaggagactactcactcatgatcatgatcatacaaaggaattggtttgatctttgtaaagccataatcattagagaatagatgagaaatttaaaagaaatacttgatatagaaacttaagaactcaacattcatacaaaaaccttagataaagaaccttcaagagaagtttttatccctaaacaaaagctccctctctctaaaactaggttaagagtatttatagtaacgagaaaataaaccggattaacccggaacaaaccgggttttgatccggttaaggaaggaaatcgaccaagcaatagatcacttggtagattcaatatcgtccgcaacattaatccttgaccagtagaccacgaaatcgaccactttggtagattcatattcctccgtagctctggtcctgaccaatcgaccacgcaatcgaccagtttggtagattcctactagcttctcttctttggccactttgcaatcttttagctcctttgtttgctccatttgctccattttacttccaaaactttaaactccactcatgtacctaaaaaaaacaaatgcaaatgcaaatgcaatactatatgccaaaatatgaatgcaaagcaacaaaaactaagagaaaaagaggttttttttttttttttttttttttttttttcaaacccaatcccaagtattcaatctaaccacttaaatctttcattcccaacctagtagctagtccaaagatgttccaaaagctagctaaaaacaagagctaaaaccttgtcgttctcaatactttgaagatttcaaaatctatagcattttcatacaagaggcctcactcacaaatagtacataggcttgaaagaaaggttttaaggttaagggtagggaaaaccattctaaaggtgagaatggccattcgggttaacaaaagattggcaaaacgaataagataacccgaatgagtcttttagactaccatgagaatgcatttaggatccataagcgagaaatcaatatcaaattaagtccaaattcatagagatatttcaaaagtcatgtaagcttcacacaagtagaaattgctttcgagaaacgcaaaagtctaagcatggattttccattttttccaagatgatcaagcaacgattaacggggatcctctcctc

SEQ ID NO: 20060 - DNA, 839 bp, Arabidopsis thaliana
aatctgcttaggattggcctcgatgcctctttcggttttgcttcatttcgaatttgtttaggattttgaagcattcccttaattgcgggacgtggtcttttttgtgagctgacttgaccagcatgtcgttgatataaacctccatcattttacctagctggtcagcgaacattttgttcaccaatcgttggtaggtagctccagcatttcttaaaccaaagggcattactttataacagtaggtacctcggtcggtaattaaggctgttttttcttggtcatctgggcgcataagtatttggttggacccggataatgcgtccatgaaggacaatatttcgtgtcctgcagtggcctcgaccactctgtcgatatgcgggagtgggaaactgtctttaggacatgccttattcaggtccgtaaagtcgatgcatactctccacttcccatttttttgaaggcgtcgtagaagagtacgtcaactgagcttcccttgtcaatcattatacaggagagttcctagttgcctatgtcgattcggataacgagagcgtcatcgtgaggtttatcgaggtcggtggtctcactttcccagaatgtgatctggtgatcaggtcccatcatcgggctttagccttttgtgtaggaatctgtcttcctcttatgagttttgatcgaattgattgagtcgttgtagagctaagatcctcccatgatgaaatcgatgcgtttcggggagaggtgctcggttgcgtttctacagaattttgagaggcctagtgggaacctcctgtttttcttttgcgggtcgggaggaggtgtagtgactgaccatcctg

SEQ ID NO: 20061 - DNA, 527 bp, Arabidopsis thaliana columbia
atatgttaggtaattcgtctttccatgaaacgtattatgatatctacaaattattgacgaacttatatgttagaaatggaatcatcacatgcatgtagttactaattaattgtgtttataagatttgttgtgaaatttaaactgtttttatgtatttatattacataatatatagggatttgggtgccaagaagacataacattttgtgggatgtttgatggacatggaccatggggacatgtgatagccaaaagagtaaaaaaatcatttccatcttctctgctttgccaatggcaacaaactcttgcctccttatcatcctcgccggaatgttcctctccgtttgatctttggaagcaagcttgcctgaaaacattctccatcatcgatcttgatctcaagatcagtccttccattgattcttactgtagcggctgaccgctctcaccgctgttttgcaggtaacatacatacatatgttcataatagtactgaacacctttagcaaaaaacaagaatacataag

SEQ ID NO: 20062 - DNA, 1333 bp, Arabidopsis thaliana columbia
ttcttggcctgggtttcgtcaacgattgtttttgaggtttggtgcttctgtggatgaggatcctgggaacaaattgtttgcaattaaacagacaggttctgtggctgcttatgttattgaatttgaggatttgtctgcacaggtgacggggttagacagaactcatttggagaagattttctataatggtttgaaacaggagatgaaagaggtgttgaagatgaaagaacttcaaggtttgccaaatcagaaagcggcggtgttacagatggaatcaagttctttttgtcacatgaatggagaacgttatgccaaaggagtggtgcataaaccatatgtgagtcgagctgtggctccggtggttcacaattgtcaagtggtgttacctggaccagcagctcaagaacgtcagttagtatctccgaggcaaggtcatacagctgaagagttggatgctatgaggagtaagggtatctgtttcaagtgtaagggtaagtattttagaggacatgcttgccctcttaaagagttacagattcttaccgtggtgaatgggttggagttagaggtgttggaagaagagtttgcgcagggagtggagattattgaagaagtggcacctgtgttgtgttgtttatctatgaattcttatctaggtagacactctccacagaccactaagatgcaggctactttggggaaaggttgtgtggttgttttgatcgattctagagcttcacataattttgttattccacggattgcagctgctcataagttgaagttgtcacaggatactggtatggaagtaatgctatgaactggggtgtctgttcatggttcaggcattggcagagaggtgaaatttgctttgggtggtgtggaatttcagagtgactttatggtgttggatttgggtggtgtggatgtgatattaggcatcgcttggttggaaactttgggtacttgtgaagttgacttgaagtcacggtatggcagtttatgtataaggggaaacaagttactttgcagggtgatccatcattacattatccagctttgtcccttaaaaaaatggatgtttctccctcccaattggtgcttccaaagaaggttcagttggaggatgatgtagggcagatggatccggctgtttcagcagttcttccagcttttgagtctgtgtttgaggttcctgttggattacctccagtccgcggaatggagcattcgattactctgttgccaggggtgtaatctataacggtgagaccttatagatacccgcattcgacaaaggaagtgatggaaaagatggtagctgatatgttag

SEQ ID NO: 20063 - DNA, 284 bp, Arabidopsis thaliana columbia
ttcccctatatcgagtcttaatgaattcaggagtctatattcttaaacagcgtagctctaaaccagaacaagttaacaggttcgaagcagtctgaattaaaccggataaaccgtctccaacgactttctctagctgataacgatctctctggttcgattccctccgagctatctcattacggcgaagatggtgttcgctgtcatggcggacattgtggcaagccgttatccaactgcggttcgtttaacggtataaacttaacgatcattgtaactgctgagcg

SEQ ID NO: 20064 - DNA, 565 bp, Arabidopsis thaliana columbia
agttgcatcgaatgattcatacaacacaaaggaatcataggaaggcaagggattaccattccaaatcatgccacatggcaacaaatgtaaatacaacccacacattcagaaattttcttcgtgatccacctagaggaatatacatatacctaaaggaagatgttaacttactattttacgagctaacattaaaagaaaatgatgttgcgacgcttttaagttgaaaccagaagtttagtgttaaacattctcacctgataagccacctattaaatgaggcatgccaggttttccagaatagttctaggctgtagcaattgttaatgcaattcggcatgttctcaacagtttcaatgccattcacctgaaaaaaatgtttacattattacatatcagaaccgcatactaattttttatccggcaatatttctcggaatttctattgaaaattcaagcaccatgaaagtagcaacgatttgaaaattgcttgctattgaaaattcatgcaccagaacgtcatcagtacaaaggaccacgttaactaccgtaagacagcttgaacttt

SEQ ID NO: 20065 - DNA, 583 bp, Arabidopsis thaliana columbia
caagcattctcttaagaaaaagagcggaagaagaaaaagtgatggtcgagtgagttctgtatccattgaggatgtgagggatgtcgaggagctacaagctgttgatgcgtttcgacagtcgttgttaatggacgagttgcttcctgatagacacgatgattatcatatgatgttgaggttcttgaaagcgaggaaatttgatgttgagaaagctaaacaaatgtgggctgatatgattcaatggaggaaagagtttggtactgacactattattcaggtatgctattaaatagaagatagtagtttaaaccattgttgtctgtttttgtaacgttttatttctctcgttaggattttgatttcgaagagattaatgaagttttgaaacattacccacaatgttatcacggtgttgacaaagaaggtagacctatttacattgaaaggctagggaaagttgatcctaacagactcatgcaagttacaagcatggatcgatatgtaagatatcatgtaaaggagtttgagaggagctttatgatcaagtttcctcctgcactatttctgcaaagaggcatattga

SEQ ID NO: 20066 - DNA, 2544 bp, Arabidopsis thaliana
gtggtctggtcgagggacggagggaatgaaatggtgacggcggcggggaggtcgagtgacattgcggaggtcgagtgatttattctagatcgagtagttatttgggcggcgattcgtggtgtagagaaattggagtgtcggtggtgagatgaaaagaggtagctcgagtggatatggttaagtcgagtgaagtttcaaaaagagtggttgagtttgagttttagattctctctccagcttatcctcagcgcgtggcccacaatctgttgactgagaaaatttgtagaaaacttactgtaaactgcaggaaatccctgcaagtctctgtagcttctgttggtcgagtaagatgatgatttaaaagtttttggttttaaaacatcacacatactcgaccaatgtactcgagtgcaaggtctccaggtgtaacagaagattttcaaaattttgtactccaacgggctgtacactcgatctccaggtcttctgtagagtaaaagttatgaatgtttactctatctccacgttgttctctatgtctcttaaattcacaaacacaactaaaacaaatcaaaaataacaagaaagtaaaaattatttacaaggatagtcatgggacttcctcccaagtgagcttgtttaaagtcattagctcgactcctttactcctttaatcatcaagaagttcctggagatgaatcgacgtcacctctggaaggatttgatctgctaagtatttcttgagcctttgaccatttactgtgaaatctccactcttaccagctagagtgactgctccataaggacggacgtcagtgataaaaaaaggggccagaccatctggatttaagctttcctagaaagagtttcaaacgagagttgaatagcagcacctgatcaccaacctaaaaatccttagtgattatcttcttgtcatggatttaagctttcctagaaagagtttcaaacgagatttaagcttagttatctccttgtagattttagagctctcataagcttctaaacggatctcatcaaggtcactgagttggatcaaccgtttctcctcagcggtttttatgtcaaagttcaggagttttactgcccacattgctttgtactcgagctcaacaggtaggtgacatgattttccatagagaagattgaaaggtgttgtaccaattggggtcttaaaggctgtcctataagcccataatgtgtcatcgagctttgcagaccagtcttttcttgtaatcccaacagtcttttctagaattgtttttatctccctattggagatctcaacctgctcgctcgtctgtggatgatagggactagcgaccttgtgctttactccatgcttcttcaggagggtctcaaaaaccttgttgatgaaatgcttcccaccatcactgattactaccctgggcactccgaatctcgggaagattatggtcttgaacagcttcagcacaacttttgcatcgttggtaggactagcaatagcttcgacgcactttgtacataatctacggcgaccaatatatatttgttgccgtatgaagatgggaatggacctataaaatcgattccccatacatcaaagagctcaacttccaagattgggttctgaggcatctcatttcttttactgatgttgcctttcctatggcatgaatcacatttcaaaacaaactcctgagcttccttaaacattgttggccaccaaaagcctgcttgcagaatctttgacactgtcttgaatgtcgtgaagttaccaccatatgtagagcaatggcaatgcagtaggataccttctacttcatcttctgagacgtatctcctgtagatcttatcttaacagagagtgtaaagataaggctcatcccactagtaatggtgtatgtctctgaaaaacttcttcctttcataagtggttaggttggtaggctctactcctcatgccaagtaattgatgtgatcatcgtaccatggagatcttccttcaacaacgttcagttggtggaactctttcccgctgtagctcccaccaaagaattctacaaccatgagctgctcttctagcattgagtcgtctatcggaatgcgttcttcaattctcatccttgacagatggtcagctgcaccattttcaatgtctttcttgtctactatttctatgtcaaaccctctaatagaagtatccatcttaacagtcttggtttagtatccttcttgcatacagatgcctcaaagctgcatggtctctatagacagtgaccaaatagcttctgaatttctcaaatgcgaatacaacagcttaaagctccttttcagtggttgcatatcttccttgagcttcatccaacgttcggctggcgtagtatatgacgtgaagcttcttgtctattttctggcctagaacagctcctacggcgtaatctaatgcatcacacataatctcgaacggataatcccaattagtagctcgaacaacaggagcagataccaaagcttccttgatggtgtgaacgatttggggca

SEQ ID NO: 20067 - DNA, 563 bp, Arabidopsis thaliana columbia
tgaaagagagactaatagagtcattgattttcttatgggactcaatgattgttatgatactgttaggagtcagattctcatgaagaaaactttgccatctttgtctgaggttttcaacatgattgatcaagatgaaactcaacgttctgcaaggatttctactactccaggaatgacttcatcagtgtttcctgtctctaatcagtcttcacagtctgctcttaatggagatacttatcagaaaaaggagaggccagtttgttcttactgtagtcgacctggtcatgttgaagacacttgttacaagaaacatggttatccaacttctttcaagtctaagcagaaatttgtgaagccttctatctcggctaatgctgctattggttcagaagaggttgttaacaacacaagtgtttcgactggtgatttgacgacttctcaaattcaacaacttgtgtcctttctgagttccaaacttcagcctcctagtactcccgttcaacctgaagtacactctatctcagtatcttccgatccttcttcttcttccacagtgtgccaat

SEQ ID NO: 20068 - DNA, 556 bp, Arabidopsis thaliana columbia
caaatcaatcaaaaaaatgacaaaacctgctgtctcctattgtctcctctcatgtatctttgccttgcttgttgtgagtttcgcttcagcagacaaagatgatcaagacaaacaggtaattgcacaaatccttcttcgttatttgattattataatcatatcatggttctaattatattactaatgactaaccataactatgatgatgatacttgtaggagtatatagtatacatgggtgcacttcctgctcgtgttgactacatgcctatgtcccatcacactagtattcttcaagatgtcaccggagagaggtgcactgaatttattcaattttattgtttagtgttaatgtgattatttgtatatggtttcatgtctatcgatcaaagtctaacaaatgtatttcttatttgtagttcgatcgaggatcgtttggttaggaattataaaaggagtttcaacggattcgcagcccggctaaccaaatccgaaagagagatactagcaagtaagtgaacataaatggattacgcccgaaagtttcaaaaataata

SEQ ID NO: 20069 - DNA, 551 bp, Arabidopsis thaliana columbia
  unsure (1)..(551): unsure at all n locations
nnnnnnnnnnnnnnnnnnnnnnnctaaagaggtaatctccagttcaccacgctccgacggcttcacctgctttgcgtactccacgactttactgtcgtagaaataaagcccggtcaccgcccagtttgacttcggctgttttggcttttcttccagcgagatagcgcggaaattgtcgtcaaactccaccacgccaaagcgttccgggtccatcacctgatagccaaaaaccgtcgccccttcggtgcgcgccgcaacatgacgcagcttcggactgaagccctgaccgaagaagatgttatcgcccagcaccagacaagaaggttcaccattaaggaaggtttcaccgatgataaaggcctgcgccagaccgtccgggctgggctgttcggcatattccagctggataccgaactcactaccatcgcccagcaggcgctggaaataacctttatcttccggcgtagtgatgatgagaatttcgcggataccggccagcatcacaccgacagcggatagtaaacattggcttatcgtaatcggcaacagtg

SEQ ID NO: 20070 - DNA, 522 bp, Arabidopsis thaliana columbia
cgtaatctcctaagaataaatagttagctgtaggtgggaagcctccatactcaaacagcctcaatagatctgagtattgtccatgaatatcacctgaaaaaaaaaaaaaaaaaaccattacaaatccatctgaattttaacagacaaatcaacataggaatacacacaaaacagataaacaaacaaatccatcctaggttacattaatcactaagatattcacagctaatcattatagcctcaacgaaaacgttgtcgatgatttaaaccttttttcacgaggtctcacccaaaatatagagcaatccaaggaaggatctttatgtgtccattaacttgtctctttgttacgagatcagctgctgcaatcagatgatggattaaacatttctatcatctcttagctattccacaaatccacaccaactagaccaaacaaacacacgagagagaaacaaaccaaaaaatactattttttggggggctgatctacgaacaacgctaaacgagcaaacaaagaca

SEQ ID NO: 20071 - DNA, 603 bp, Arabidopsis thaliana columbia
ctgaacgagagctttggttccggatcttgattatggcaaatgggtgggtcaaatcgttacaatgcaagtcgaaagctttcgatgatgtttacaatccgattaaaaacccgaacccgaatccgagcccgagtccgaaacatctcatgtcaagctacagttgcagaaaaagcacacagagtctaaaagatgtgatcgaaaccaaaaaacccaaacctaaaccgaagaaacccaatccaaaaccggataaacgagaaaccgacccggttttatcaccatcaacccggatccgatcaaccggagttcgtgatcgtgatccgtttttaccgacattgacggagctatcggaaggtcatcagtcacgtaatgtggtggagattatctttcagacgagctggggtccgaaaccgttttcgggtcgggtcgaaatgattttcaaagtgcaaaacgggtctaagactttgacccggttcgaagagtatcgtgaagccgtgaaagctaggagcgtggggaaagcgcgtgaacagaacgcgcgttcggttgctgacgggaatgatacaatgaggtttactgtttgggtcaagtacggtggaggtggcaccgtgg

SEQ ID NO: 20072 - DNA, 451 bp, Arabidopsis thaliana columbia
tgatctctatcatccctaacatctatagaaagtttcaacattagagagtgactcacgaaggctcagtgtcaccaatctttgcattggttctgttaaagagtgaccagcaagtagagccagctagaccagcttcatcaccaatccacctgacatcaggaccagcgtcagagaatataacagctttaggctgaagctgatggatcaaactaaaccaagtatcaaagaaatattccatatctttctctccgtctcctttagctccatctaaccaaacttccttaatctctccatacctaataaagattcaacctttttaaaaacttggaactggaatcacgaacccatttgactgatatgagaaaaaggagcttactttgttagtaactcggtcatttgactcagctagaactcgttatactgcaatgtcttgccataacactgttcatgtcga

SEQ ID NO: 20073 - DNA, 598 bp, Arabidopsis thaliana columbia
agaaattatttaaaacccttatttaaattatatagaaaaaaaaaaggtcaagtagtcttctattatttactagtataacctctagaaacatcatcaccacattcctggctaatatccttcatctagaacaattattaacgaatcaaaataccaaaaaacaaagcacctcattgactattaaattagtactaatacattaattaagttattattcctatatataaatctcacccattctccaccttatcatcacaatccaaaactctctctctctctctctctctgtctcttgtcttatcatttatctctctaacggcgaggcaatgggttttccggtgggatattctgagctacttctcccaaaaatctttttctacttgttatctttcttaggtttgatacgtaaactcatctccacaatgttcaagatcattggtctaccagatttcttagaacctgaaccggtttcaacctcatggcccgacccaccacccacgttgaccaaacctgactcagcagcaatactagccggagagatgttacaggttgttcgattctcggatataaaccgaccggaatccgagtgttgcgcagtgtg

SEQ ID NO: 20074 - DNA, 1419 bp, Arabidopsis thaliana
gtggaggtggggagctgtagacgtatggtggtggtggagatttgtagtcaacctttggcgaaggagagtagtacggtggaggtggggagctgtagacgtatggtggtggtggagacttgtagtcaacctttggcgaaggagagtaatacggtggtggtggggagctgtagacgtatggtggtggttgagacttgtagtcaacctttggggcattagacgagtacggtggtggtggggagctgtagacgtatggtggtggtggagacttgtagtcaacctttggagaaggagagtagtacggtggtggtggggagctgtagacgtatggtggtggtggagatttgtagtcaacctttggcgaaggagagtagtacggtggtggtggggagctgtagacgtatggtggtggtggagatttgtagtcaacctttggcgaaggagagtagtacggtggaggtggggagctgtagacgtatggtagtggtggagacttgtagtcaacctttggagaaggagagtaatacggtggtggtggggagctgtagacgtatggtggtggtggagacttgtagtcaacctttggcgtaggagagtagtacggtggtggtggggagctgtagacgtatggtggtggtggagacttgtagtcaacctttggagaaggagagtagtacggtggtggtggggagctgtagacgtatggtggtggtggagacttgtagtcaacctttggagaaggagagtaatacggtggtggtggggagctgtagacgtatggtggtggtggagacttgtagtcaacctttggcgtaggagagtagtacggtggtggtggggagctgtagacgtacggtggtggtggggacttgtagtaaacctttggagaaggagagtagtacggtggtggtggggaactgtagacgtatggtggtggaggagatttgtagtcaacctttggagatggggagtatgttggtgggggtggggaactgtagacgtacggtggtggtggagacttgtagtataccttaggagaaggagagtagtacggtggtggtggggagctgtaaacgtatgctggaggtggggacttgtagtaaacctttggagaaggagagtagtacggtggaggtggagaattatagacgtatggtggtggtggagatttatagtttacctctggtgatggagtatagtatggtggtggtggagaactgtaaacatatggtttcggatgtggtgcgtactttgggcctttgtgttcatagctgggagaatcgtaagctggggtatgaggagatgagtaagggtatgatgtcactgtagccgcaatagcacttaggaccacaacataaaccatgcaattcattaatcccattgttcttgaggatctcatcacactcttttatttctttcttt

SEQ ID NO: 20075 - DNA, 473 bp, Arabidopsis thaliana columbia
ttacttggtagagaaatgttcataaccatatgtaatggaaatgtgtgagttgtgtgtacctcttaggctagatcgaggaggcaatcggataacaacgaccaaacttggaaacaatctttggataaagtgtcggaaacctttcttcccacgaacgttagaaccatatgtccattatgcactacttcttctgaacgcatttttaagaacaacgaaaaatctatcttgaactgatttaaataactcttgtagacatttgaagggtatggatatttaatatgaatgcttttagtgttgctctcaaggccatctggaattctagaaagccaatggatactaaaagctgaatgaacaaaatggagagactttcttgggaatagccttgagtaaaaagaacccgggactcccgagacaaaccactttcctttaaccgccggtttcagcttctcttggaaagaatgaaacaacttgaaggt

SEQ ID NO: 20076 - DNA, 921 bp, Arabidopsis thaliana
actacaaaatctctttcattaacttgaaccgtgaatagaaacatacctggacaattacatcagaggagtctatgactttgtaaagttccccccaaatacgcttgctctgtcccttttcaaacatagtatgcctcacaaggtctctaaacccgtcctcttcttctcctccttcaccagaaggacctgccccattcttctcctcaaatgcatcttcaaaatgaaccaaaatgtcccaaatgaatacataatgcatcattttattacaacaaggtcaaaaatagcccaaattaccctgagattcagctgccttcttcaccaaggcttcataatcagaagcaaccagctttggtcgctttcttttagtcttccttccaaaagcatcttgaaagggctccatgtccagcaaatgaactctcgattgcttaacaaagaaacaccaaaaccaatcaaaaatcgaaactttaacacctttgataatctaaattcaacaaagttaaaaaatttaccttcttgttatcagttaaaagagacataggcaacttcctctccttcaaaatcacattgtaattactagacatcttagtctgaagctcttctctaaagtactcaagctctttctgattcacaacacgagtgttccctatacaataacacatcaacagaaaatcagatgactatgaaaatcaattgagtgacataaattctcacgaaaatctgaaactcaccaaaccatcgtcgatcaggtgcgattcgtgagttgggtaattcctttgactggtactcgttgctaaggattttaccaccggcgtttctcttaggtctagtcttgtacatcttaagccggttaactgtggatttggaccgggtttcggtggttttctttttgccatcagcacgattcgcatcgagcgaatgctttgg

SEQ ID NO: 20077 - DNA, 487 bp, Arabidopsis thaliana columbia
cgtcttgtgtgtatctctctgcttactttgctatctttttgtttttcgataggcattagctgatccttacttcaagggtctttctaagattgaaagagaaccttcaagtcagcaaatctcgaaaatggagtttgaatttgagaggcgaaggttgacaaaggacgacattagagaactaatatacagagaaatactggagtaccatcctcagttgctcaaggactatatgagcggatctgaggggtctaattttgtatatcctaggtttgaatttcttcctaccttttattattatttaccaaatgaaacatttcttgtttctttctcccgttgaatttatgtccaatcgcgtacctctgcctggctttttattcatgtttttactttttcacttgcagcgccattggacatcttagacagcagttcacttacttagaggaaaatagcagtagaaatgggccggtcatacctctcgagaggaaacacg

SEQ ID NO: 20078 - DNA, 506 bp, Arabidopsis thaliana columbia
ttactccgttgtgaacgcatcaaacccagaaaatttcttcctccgatctcgcattctccacttccataatccccaaaattgtttcgttgatttttccacaagatgaagctaacggacaacgaagagatcaccatgaacggaactcgagaaatggagacgacagagcaagagacatcgtcgccgtgttcgttagtaatcgaagcttttccggtgaagaaatccattattgtaggttacgctcttacatcaaagaagattaagagctttttacaaccaaaactcgaaggtttagctaggtttgtgattctgatttttaaccctaattttattgtttgtgctatcagatattatttaggacttaatcgagccaattttgaggaaaactgtttacaaaagtgatatgtacgtgttcggcacgaattttttgtgtcaaatagtcggctttgatattatttaggactcaaatgagccaatttagaggaaaattgtttacaaaagtgatatgt

SEQ ID NO: 20079 - DNA, 816 bp, Arabidopsis thaliana
tgaatactggtttgttgattcatttgtggtttttgttttattttggcagcacattcggatacaacggttgcgaggatgctggtgggaaacaaatgcgatctagaaagcataagagcggtgagcgtggaagaaggcaaagcactagctgaaaccgaaggactatttttcatggaaacatcagctctcgattcaacaaatgttaaaacagctttcgaaatggtaatccgtgacatctataccaatataagccggaaacaactcaactccgacacttatagatccgaactaagcatgaaaaacagagtcagtctcgttaaggacgataataaaagctccacacaaggctttggtttctcttgctgttcttcctcgtgacctgaattttgatcccaaattatttttcttttgcttcatttgtggattttttttcttttgaatttttttcaaccatagaaaaaagggcagatcatatagattcaaaaattgtagtgtttatgtgtggatcgtatagtaaacaatttatacgataattatttattgcataatctcgataatttcaatgacatcactaggtaaccactatcgatgaaacttaaggagaaaaacgtttattaagtggctccaatggtcacttcactctcaaccaccactcacaatcttaaaagatgatatgcgcaagaatccgaccgctaatttcgtcaccactagctttcactatctcaacaaccaaacactccagaatcaatctccgattactccctcgccgctccttctccgtcatgtcttcttcaccccacagagtcagatcatagaaca

SEQ ID NO: 20080 - DNA, 535 bp, Arabidopsis thaliana
acaaaacataagaaacagagcaaactcacaattaacaagtggcctaaatcaacaagatctaaagaacgatatgagtcagctcaaaactagcatctaaacgctcaatgccattaaactaggaattaatgagccaaagaggaacagatctcaagaacaaaatcaaacagataagagagacatagagaagtgaaaagagctctcacatcttctttctgacatcgacctgtttctccttcttctcatactcttgtctaatcttcttcttctctgcttcaacaagctgcaatttctcaatgttgaattcctgtcacatcaaaagaccaatcggttttagactcaaaaccattttttcatgttcagaaataatctcacagaggatcttaagatccgaagatcaatgtaaaacaacagtcaacatattttcaaaagaacaaaccataatagtcacgcaattgtcaacagagtcacgtattcgtaaagatcgagatcaaaagagagtggatgtaatgtatggacttacttcttcagaggagat

SEQ ID NO: 20081 - DNA, 602 bp, Arabidopsis thaliana
attttgatgaagaaattaatactttaaaaaatcatttcttctcccgtctctttcgccattgtcgttgatgtctcgttccgccgcgagttccgttggctcaataaccggagaatcgccacagaagaaactgcttcaatcggcgtcttcttcttcttctctggcaatacttcatgacgaaatcgctgtgagttgcttcgcacgcgtcccgagatgttactacccggcgatttcactcgtctgcaggaacttcaggcgtttaatggcttcgcggagatctacatcgaacggtcagtaattcgtcgcactgaaaatatcctctatgttgcaattagatcagaagctacaaaaacccttagctggtacacactcaatctaaaaccctttggaacaacagagattagccatagattagttccggttccatcattcccttcaattcctggatatggaacaactattatctcgtccggttctgaaacttacgtcattggtggatgcattgacggagaattagtctctactgtggtctgcatcgattgtagatgcacacttgtcgcttcctcctaacatgaaggagcacgtaaatgcgcgccgtgggattg

SEQ ID NO: 20082 - DNA, 591 bp, Arabidopsis thaliana
acaagagcgtaaaccctagcagcagacacaacacgagttcatcgagaagcaagatggtactcattttctttgattttgattatcagatttgcaataaaagatagagaattgatgatcatccattgttgtttgtgttgcagactttcaagcgaaggaacggtgggaggaacaagcacaacagaggacacgtcaacccaatcagatgctccaactgtggcaaatgttgccccaaggtactctctttcaccttctcttctcaatcaatcaatctccagtaattcttatgtgtattttgatttgatcttgtggtggttctataataatttgggataggacaaggccattaagaggttcattgtgaggaacattgtggagcaggctgctattagagatgttcaggaagctagcgtctatgagggtatcatttcattcctctcttttatgtttctttgacctttgttataattctacattataaagtttggatttttagactattggtattgagaaagtttggattttcgactattggcattgaagtttactgagatctgtaacttgattgaatcatgtaattgacaggatcacatt

SEQ ID NO: 20083 - DNA, 522 bp, Arabidopsis thaliana
tgattcttgttgaaatgactgcagtttttataacatttgcatcagaagaaaggtacttgaagctgaagaagatgtctgcagagaaaataaaattactcacaagtgtttggctttcaaaagaagatcaagaccaggacttgagcctgatgaaattggaatgggtcctgtcaactgattatccgcaagatccagccaataaaccttagtgagatttcctagagacgccgggattttacccgtgaagttgttcgagttcaaggccctgagaaaacatggtggaaccaaagtggcaagtctcatcaaacatgagttggtttgaggacaatatcaaacactgcaaaatgctattttcttacaagaaagatagatctttgagatagccaagctcatttgggatggtaccagtgaagccacaaccagcaagaatactgaaaagaccaatacaactgtttagatatgtacacaaggaagagaaagaacaagaactacgagatcacttttagcttgtttgcgcgggagaga

SEQ ID NO: 20084 - DNA, 474 bp, Arabidopsis thaliana
tacaatcgagctatatatccgcgtttaattctagtcattgaataaatcaaactttgatgaataactaattctttttttagttattcttttcccctttactagtctattaataaccaaacgaattattccaatgtataaaaaaaattccaatggcttttgctactctaaccttccccaccactattttttgctaggtattttcctttactttgaaaggccttgatataaaaaaatagaataactacaaaacgtagtaaatagaattggataaatagtgggttccatcgtttctatggttacttctaaaacggtgaggtcctctctatacaccggagctccttcttttaattaatcaatactattggtaacttgtacaattcacattctttggctctaccccatgaatattcaagtaatagggcttcacaatgagatcccctttatacaggtacggtattccattttgaaaattga

SEQ ID NO: 20085 - DNA, 530 bp, Arabidopsis thaliana
taaaatttcgggctttaagtatagtatctggttgatcgttctgaataggttgaacatgttagagctgagaggaacttgctagccgaagttgctagtgactgtattgtgaagctttattattcgttccaagatccagaatatttgtaccttatcatggagtatctgtctggtggtgatgtgatgactttgcttatgagggaagagactttgacggaaactgtggctcggttttacattgcccaaagtgttttggctattgagtccatacataagcataattatgttcacaggttagtctacttgtttctggtctcatcattctgaatggagaattaaattgtatatatatttgaggtagatcttttgcagggatataaaaccagacaatcttctgttggacaagtatggtcatatgaagctgtcggattttggtctttgtaagcctctcgattgtagaaatatttcggctatgaacgtaaatgaacctttgaatgatgagaatataaatgaatcaatcgatggtgatgaga

SEQ ID NO: 20086 - DNA, 820 bp, Arabidopsis thaliana
tgtcacaagagcattacaaagaccaaacggcattctacgataggcgaaagtaccatagggacacgtgaatgtggtcttctcctgatcatcttgatggattggtatctgaaagaatcctgagtatctgttggagctggattcccctccaggaatccacctgcaaaaataccaagccagcccacaaagcccaccaagcccaccaagtagaggacctacgcagctgatgagcccacatacgcgaataggtacttgggccggataagcccggtcacctgatgaagggagataagcgaataacaacttaagaactgatgaggagatattcgcggagtggacctaatatctcggaactgacctgccgaatatctaggaggatctccgcagatcccggacggagctaccacgtgcgtagacctatataagggagcaaggacgacttggaagacacattcaattcagcttacattcacacacatacttttacacttgtaatctcatttcacattataaaagctttgtcataatcaatacaaaaagtccattcgttcttagcaatataactctcaaggtttcagtgaagttatagccctcctttctcataatctcaattacaaatctctagtgtggattttagaacccatagtatccatcaagtaccataggaatcagctcattcttgtaattcttaaccactataacacctcctttcttaggaaccacatgcactagactaacccaatcactatctaacattagatagatgatccagcttccacagtcttatgatctcttcgtgcaacatccttcagattcgggttta

SEQ ID NO: 20087 - DNA, 1387 bp, Arabidopsis thaliana
accacaggtttgtgggaatacgcaaattcactagtaagtctcagatggaaacacacatacattataacaccgaactgcttcatcaactcgcccaatatccttcaatgcattacccttcaagttccaaatgcaaaaaatatcatatgttagatactgagaattatagttcagacacaaaacccacaaaatgtgtgttgttgatgctaaccaagttattgtaagcctccaaaaatcgtggatcccgggagagagcctgcttgtagtgtcgaattgctaaatctagttgaccttgctcatagtatatactggctatattccctgcatttagtagttatatgtcaattatgaaagacgtcacgcatttacttggcaagtatattttatttcagctgagcatttagttgatcaaattacactcaccaaatgccattgcagaatttggccgcatctgtaaggcatgctgataacacatgatcgcttcagtaggtctcccgagggccttaagacatagaaatataaaattttgttactactattgtccagaaaacattattgcactgaacatatcttaacacactatacgtagacataccttatacacgtttcctaaatttaaatatgcatcagggaatgcaggtttcaacttcacagcttcctggtaaattaagaaaatcagccaacatagttaaaacataaagaatttaatctgggggacaaacgcacacataacacaatgtcaacaggatctttctaggagagaatgaagcataccttgtagtattgaagggctctgttgagatcacctgactccatgaaaagaccagcaagattcgaccatgcaatagcaaatgttggttgtatacgaacagcttcaaggtaacaactgtatgcctgcacaaaatattacattctaactatttggactctggcagtagacactgactataagactgacgatcatccctgcttgcctttcagtaacaacttgatgtctgtattgattgtggattatgacacagtacaacacagaaaaatgaatgcatctattagtaattgcagttgataaaccagtaaaatgactacagatgtgatgctatattcctagtgcatcacgtcaccgtccatttaattataatatatttaggttcaattaaaagttcttctgcaatgacaaaacattgatcaatcaattgtagaattaggggccgtatccattgctaggacacaagaaaattgcagataatcgggttggaaccgtaacagaataacttaaatagactaattcgaaagacttacttcatgactctatccttgagccttcatcagattccccagattactatgtgcgtcaacctaagaacagtttacattaccaggtgataagact

SEQ ID NO: 20088 - DNA, 584 bp, Arabidopsis thaliana
tattttgcacatgagtctaaagaatcttgttgtggagaggcgagaagaaggactcaaaacaccagtaacgatgaatgcttttgagctcatctcgacatcccagggtctcaatctcggttcacttttcgaaaaacaaatggtacagaagtctgatacgtaaagctggtctttaaatttcgtcccccaaggctcttattttgttgacaatttttaactatctttttgcggttttggtcaaacctaataagaagtagctttgccacaaaattttagtgaccaatacttttctttggaagcccgtacttagtttgatagaagtcgtcattctgattgataagcttctctgatttcaggggctggtgaaacgaaaaactcgatttacttccaaatcttcggctaatgagatagttacaaaaattgaggctgcggcacgacctatggggtttgatgtcaagacaaataactacaaggttagaatactgttacgtatttcccaatgctgtggagttgtgtattggtttgttgcttctgaatagaccctttaaccatgtctcaaatgcttcagatgaagctgacaggagaga

SEQ ID NO: 20089 - DNA, 979 bp, Arabidopsis thaliana
tggagaagatcttgaccaccattattaaagatgctttagagaactcatctgctcaacttatgagatatgtcaagcccttggtcaagaatggaatcaactccgaggtagccaatcttctcaccagagatatcagttccatcatattgaagaaggtcaagaagggcaagtccaagagagtagggatttctgatttcgtggtcctggcatatgatgaagaacccaaggattctcttatccttggtagagcttcactagctacagctggtgctaggattgatgtgaagaagggaaggatatctctcaatatatgcgatgtggagatggagtttggcatggatggttcggaatataaattgcttgtcagtagcattgcaacaaacaaagacacacctctaaggctgctcagatttcaactccaacgccaactatagaggctgctacagctcagcccacagatgagcattacagagagacaatgtcgatcgacaccacaccccatgtcgatcgataccatcgcgcttcacagacagatgcttctgcacctcttccacagcccacaactgctttagttccctgtgataggtactcctctatctcttatccaactgttactttgattatttctttagactcttcgaaatgtgcttcacatgtaaacaagaatcgagattctcgagagcttgtttcttctgctgatcttgcagataacagaaagagtatcgatcgacaaatgatgctgcacggagccgatctgtttacacacccccttggaaggcaagattgcaatccgccaagtaacaagtcttctatcactcgatccaagttctgaactccgccaagtcaagttattgactctaaacaagcgcttagtgaaaggcaaccactagtatgtttttttactcaatcttttagttttgaattttgaatatatttttcttgcttactttggacttgaatgcactggggacagtgacgttta

SEQ ID NO: 20090 - DNA, 519 bp, Arabidopsis thaliana
taagtaattgtaagatcttattactcttgtaaaaaaggaaaaaacaagaatatctcaaaaatataaaaaaagaagaagccacatccactgctaacaaaagaaacaattttctttttgcagcattctctaattatggaagtggttatttattcaatactcttgtggggttctaaaactaaactgagaaacacttgtttctgaaatcacagggtatagtgttgctggatagcctcaatgtctagtcccttctgcttcactactgattccacgtgacctttcaaggtgtgacgttcccttaacctgaaatttacaagacaagaaatgtttgtaagcccattttctgaggaacctaatggtatggaataatcagttacttgagcgttgccttgcaacttcagctcgtctcttggcttgatcagctatctctgaaagctctctgtaagtgctcttgtcattgaacatatctgaggtttgagctggctgcaatccgtgaagtgtacgttgcgcttgtgccattgt

SEQ ID NO: 20091 - DNA, 1022 bp, Arabidopsis thaliana
gggagttttgaatacaagtgatccacatctgttatccacttcatctgtgtcgggacttctcctcccgttgataagtgtgtattttgcatgttttgagcatccatttgtcatcactttagcatcatatcatcactgttttataccatttctcatcatttgtcatcactttgcatgtttaagatagttttgcatgcatgttgcatatttgtgttgttttcatgtgatccagagctgttgacgagctaattggaagaagcggacctgatcatgcaaaaccactcgacccccaggtcgagtagacgattcacaacctcagcagaccactcgaccccctggtcgagtagaagacaccaccacttcacctcaccactcgaccccgaggtcgagtgtctacatccccaccacctgaccccgaggtcgagtgtcgactacatactcgatggcaagcttcagagccttcttcattccgcactcaaccagacactcgagcacaaggaagaaaagaagaccccaactattcactcgacctcccactcgaccacatgggtcgagtacagttcttaatccgtcccaatactgcgtcgttttaagtattagagtttcgaaatatttggctataagtagcatgtacttcacattttcgaaaacaagtttttatctagttttattccgcagacactgtgttctagaccttcgtaatccggatttctctttgtctattcagtattcagcattcagcatttgttcttgatttcgtttactgttgttcatcctgttatcattttgctgttgcattgttgttatcatgttttcatcctgttaaacgtttatgctttctgctgtgatgtctgagtagtgaataggtttctcaggatgggttagagtagtgtagaattctcagtatgctaggtggttgagtattgattgatagatcccttctggattagttgttcttaatgcctattgctttctgatcaactggaatttgagcccagacatttccgcgcccaaaaggtgttgga

SEQ ID NO: 20092 - DNA, 566 bp, Arabidopsis thaliana
  unsure (1)..(566): unsure at all n locations
ctcatcaaaagcaaaaggtaacctctgttttttttctctgttattgaatagtatatagcagatctgccgatgttattgaagagtatcagttgatttaccgttgtgttgttatatctgtttatcttaaggccttgaaagtggtgagggaaatgtcactaggatgggagagaatcagcaaatttgtgatgcagatcaagaggaacctgtagatggagatgaagaaatgaagaagacaatagccaaagcgtggacggatgctaggtcaggcaaagcagcagatcctttaaaaggacaatgaagctcctgtgatcagtataaccgttcactagtccgccttttgtaacggagcaagtatgcttttgttatgttctagtcactctatctgtgaaagaacttagcaaaaagcataacatctatttttttagtttagtcgaatgttgcatttgctgttttggatattatttggtcataagtcataagaattgcatatatgctcaaaccttgcttgctctgagatggttcagctccgggattgtgtncacattttggcatcatagcctttgaga

SEQ ID NO: 20093 - DNA, 741 bp, Arabidopsis thaliana
cattccggtggaggactcgggctagctctctgtaaacggtaacaacccaaaagtatatataagttataagcagatggtgttacaaatagctaaaaggcaagtttctgttgatggatgtctctggttaggtttgtcgggctaatgggaggatacatgtggatagaaagtgaaggcctagagaaaggctgcacagcttcgttcatcatcaggcttggtatctgcaacggtccaagcagtagcagtggttcaatggcgctacatcttgcagctaaatcacaaaccagaccgtggaactggtgatacattacgttggaaagacttgtattgaggtgagactttttaactacacagcagcaagagaaagaagaaaatacatgaccggacggtgtgatctaacttattggattttgttggatgtaatatgtaaaataaaaatcctatatacggggagaggtaccttatctgttctcactatattttattgaacattactttagagaatatgttttggaattcactactaaataaacgatataaatcttcacgaaaagagcaacattttgtggttgtggcagattccaaattcttttttatatatgataaattaccttagaaagttttacttactcatcaaacttctcaaatacattgcaaaagtcgatgaaaagaaaaatgtcttctacaaaataaacaaggaagctcaatgagacaaagtgatcagttagctgattccatggtttg

SEQ ID NO: 20094 - DNA, 942 bp, Arabidopsis thaliana
tcataggataaaaacaagctgtagaagtggtgcaagaagcaggacaagctactcaccaagtgcctcaagactatcaagtttctgacagataagctgagctattcctcttccactacagctattccacagggatagtctcctctagagatgccaacgaggagatttgatgagcctgagccaagtaagcacaggcctgagcctagtgagcagagagtctcacatgtccctgctagacattcatcattcgagttctcgggagcataagagaagaaggaaggctacactcgtcgctttagaagcgaatcacgccttattcactcgaccgcggtgctggctgtggatgtcggattcacacactcaagtatttatttatttagtgagaaggattattcttgatgacaaatgtatgagaaaaatgaattaatgattatagagaaaactatgagttttgtaagaaaatgtgtatagtatgtttgcccaaaaatgcgtgtgtctttacatgacctttgacccataatttatactcaaggaatacatttaattctcatttacacacaattattccatcttaaatgtatcctttttagttttcgaattaactattcaaacgttcaaatttgaattgactccgggctccctgaaccttatcttccggcccacttggctcttcaatccgaacaactttgatctcgtcgtcacatccacctcgcggtgtgaccacttcgctcgtattctcctcctcgctcagcgaagaccgtgggcccttcctcctttgggcctctcctacctacatggcaatctttggtaggtccgaacccgtgatgcgggatctgataccaacaatgtgtaggccactataagaccaaatattggaataccatagaagtccaacaaaacctagagatcattgatgatactccatggctttgggtttgtgatggg

SEQ ID NO: 20095 - DNA, 1119 bp, Arabidopsis thaliana
caacaattgtgtgtctctctcctcccacattcccatcccatgtatatatacagatgcttggcttttccttttgcttcacttttaatttctactcatatccatcattctctctgatctcaagaaataatctcaaatctcttacactcatagtcttcaagcaacttctcagattcagctcttatggatcatttgttacaacaccaggtaaactacaattcaagatccactgtttctaacatcttgatgtgttttgttaatttgtctaattaagaatcttgatgtgtttattttttctcttttaaaggatgtttttgggaattataacaaagcaagagaagcaatgggactatcatattcatcaaacccaacaccgttagataacgaccagaagaaaccttctcctgcaactgctgtgataaggccacatcctccggagctagctctcaggtgtccacgttgcgactcaacaaacacaaagttttgttactacaacaactacagtctcactcagcctcgctacttctgcaaatcatgccggagatattggactaaaggtggaactctaaggaacatccccgtgggtggaggctgccggaaaaacaaacgatccacatcttcggctgcaagaagcctcagaaccactccagaaccggcgtcccacgacgggaaagtcttctcggcggcaggttttaatgggtatagtaacaatgaacatattgatctgagcttagcctttgccttgctgaacaaacaacatccggggagttcttcacagctagggtttcattcagaactcggtagctctcatcagtctgacatggaaggtatgtttgggacaagccaacaaaaagagaacgctacttatgcgtttggtaacgggagcagcggtttgggtgatccaagcagagtcttatggggatttccatggcagatgaatggagagagctttggaatgatgaacataggaggaggtggtggtcatgtagatcagattgattcagggagagagatgtggaccaatatgaacctcattaattctggtgctttaatgtagtcaaaattaaaacccaatattatttgggttttgattagggttttgaattcagtttttatgggagt

SEQ ID NO: 20096 - DNA, 1448 bp, Arabidopsis thaliana columbia
tttagcagactgtaatcaaagacgtttctctcgtttttggctcgttttgtttgtgaatcaaacgaagtcgtgtaggtttaacgatgtccgttaatagagtattaaccccgtttctcgcgtactaacagagacttaacgcgatgattaatttggctcggtcaacaaaacttttgtattttttggagaagtcaaccaaaagtatgtgatataaacgacgtctcatgagttggagattttatcgtcccatttctgaaagttgggaatttttctgacattttttccaaatataaataaacgcgtgacagtggcatttgcaaaaaaaattcccggactttctctcttctggcgatcatcatcatctcaaacactaattgaatccatcatcatctttaattcttttttgtccccaccgccaccaaaagctcggtcgcgctatagtagtcaggaaacaacattggcgatgggaagaacggttaaggatgtctcgtcgcatgagttcgttaaggcttacgccgcccatctcaagccggcaaggtattactcacacttatttgtttcttttcttcaaccatgtatttgaggattctgatgcgaaattcgttagtacacaccacaatttttgcatttcattgatgttaaggattaacatactaagcttgattccgttggatttgcatagtttttttgttaatgttttgaatgtgtttgcgataatgaaagaaaaacagggtatggatttaatcaatcttattgacttgattgtattacactttcgattgttgttacaggaaacagagactcgacctatacttatatgaaacgaaacattgtgtttgtgtaataagaaaagacatgactctttgatgtaaagacatacctgtaaaacagaacaacttgtgtttcttgatcaaatagctgatttctgtaaatgtgatatgatgcgagaattgattatgcttcaacatacttgagtatgatttccgattttgaatgacaagattgcttacattggttattttgagaaaatttctgtaacacctcgatttcaggaatatggtggtgcatgcaaagaggtttataagaattaatttgaccacctatgtcaccaaagtgcacttatcttttcggtcaaaggtcctaaaagaactccacagttaaacatccttgagctgtagtagtttcaggatgggtgactttccgggaagtgatagccggaaccatgcgagtgaggacaaagaatgaaaaaagatcatgtggcgatttgtaggatcggtaacaagtttttaaaaacctcccggacatggcgcactgaccgtcggacagggatatgcccatgggcccaagaaaggacgtggagcctgctagtaggggcagtcagggggttacaatttcggtgagcccttgtttttttctggatcattatgtctctatgtgtgttgcaatgttgg

SEQ ID NO: 20097 - DNA, 474 bp, Arabidopsis thaliana columbia
  unsure (1)..(474): unsure at all n locations
atccccgatcagttgagattacaatcgttgctttggctattgatcctttgtttctgtttatccctttgattgattctcagagattttgcttcactttcgacaagacacttgtagcagtagtttgtgtcattcgtacttttattgacacgttctatgtgattcacatcatttattatcttataaccgagaccattgctcctcgttctcaagcatctttgagaggcgagattgtcgtgcattctaaggctacactgaaaacacgtctcctctttcacttcattgttgacattatctctgttctccccattcctcaggtattgttcccttcgtttgtgtgtgcatgacatctacttttccatgctttttattagagatgtacatgcgtaattataggtggtggttccactctcatacactgtctgcgtcgctggtgtcagagagaatactgaaatggnatatacttagtcaatatgt

SEQ ID NO: 20098 - DNA, 751 bp, Arabidopsis thaliana
tttcacgaaagttttggctttgttcggtgaattgcgaggacaaggattgtatcctgataatttcacgttaccggttgttctaaagtcaattggtcgtttgaggaaggttatagaaggtgagaaggttcatggttatgctgtgaaagctgggcttgagttcgattcttatgtatctaattcactcatgggaatgtatgcttcattgggtaagatagagatcacacataaagtgttcgatgaaatgcctcaacgagatgttgtttcttggaatgggttgatttctagttatgttggtaatgggaggtttgaggatgccattggtgtgtttaagcggatgagtcaggagagcaatttgaagtttgatgaaggtacaattgtgagcactctttcggcttgttcggctttgaagaatcttgaaattggtgaaaggatttataggtttgttgttacagaatttgaaatgagtgttaggattgggaatgcgttggtggatatgtgctgtaaatgtgggtgtctcgataaggctagagcggatctcgattcgatgagagacaagaatgttaagtgttggactagtatggtttttgggtatgttagtactggtaggattgatgaggctagaggctagtttgagagcagtcctgtaaaggatgttgtattgtggacagctatgatgaatgggtatggtcagtatgacaggtttgatgaggcattcgaactgttcatggtgcatgcaaactgcgggaattag

SEQ ID NO: 20099 - DNA, 630 bp, Arabidopsis thaliana columbia
tagctctaggggaaatgagtcacgaacatgtatgaggaagagacgaagaaatcaaacaaaattaaaaagacaagaacacatggtatagctgtataggcacatgccaatgcttgggtagagccatttcatttgcagcatactatgtgcagccacataaaaattacatatataatggcacaatgcttcccactgttcgcaatatgatacaaagaatgaggaaacacttttacaaatacctggaggcgctttgccatggccagaaaaggctgcacatcgcctcgagttccaaccacaagtatagcaatttttaaccttggaatggatctaaaggactcagttaaggacttttcatatgtgattgtggactgccctttcgttggctcaaactcccataactccgacaccggagtaccgttatctataacttccactgtcccgtcattttgtattctgactagctcaacaatgagtttttgctggaaccacaagatattatcaaaaagaaatcatgagaatataataatgatttgagtgtaccgcattcaagaaacatatcctagtgattctaacagcacaaatagagattctcacttgttaatatcaagattaacacattgacaatatgtatgt

SEQ ID NO: 20100 - DNA, 402 bp, Arabidopsis thaliana columbia
ctttcgcatatcaataaattttagataacttccttatttacccaataataattagttttccttctttcttgaaggtaatggacggattgttaaagtttagcaggcatgtcctccgtactgacgtcgtcgacggccacaagcttcgtgttgatgtgcttgagaccaagtgtatctccccattgtgccgcctttacccgaagttcatcataactcctattcctcaagactttgagttcccttcatctttgggtcaaggccgtttctggcgttggcgactctgaccgtgctcagctgtttactgaagttgatttcctctatcttccattcaactttgataagaagcattgggttgccttgtgtgttgatctcacatgctttaagatcattgttctagactgtaat

SEQ ID NO: 20101 - DNA, 454 bp, Arabidopsis thaliana columbia
gactcgtaccttcttggccgaactttttgagattcttgatctcttcgacgacgttaagttttccaggaggaactcgaggtgtagagattctgacaacgccacgtgtctcgttctcgacgcaccagtgttggataagacggcgaacgatgtggttaggtgtaagatcggagtctaacataataggatgcgtcgagacttggacaatcaactaaccatttcgagccaattaacgcagttttgacggtcgtaagtgatgccagaaacggtcgtgactggatctttcatgatctccagtgagattgggcagataaagtaattaggaatctcgagctattcctcttcgtgatgcagatgctggcgaatgtaagattctgggtacgtatatatatgcatataatgatgatctagactaatcgtagagatgacgtcgaagaggtctatgtggtggcagtaa

SEQ ID NO: 20102 - DNA, 498 bp, Arabidopsis thaliana columbia
tttttctaaagacatgttcactttcaattttttttacaaagtctgaaaaatctgttagaggtctttgcggattcaaccataaaaacgagcttcacaaaatccttgacaaacgtgtggtcattgacggctagcgcggataacgcatacgaatttttagaaagatgttccacatgaaagactgtcggatatagaaggttggagaagacgcggtaatgacctcctaaggacagtgtcataatgtcgctcgtttccaagctttcacaagtttgcaaattattcaaatatttgatgattacttgaatgagctcgataattaccggataagaagatagagagttgaagaatctatggtaaccaccgctccattgagacggggtcataatgccattcttcgccactcattgggcaattggtactgacatggaatagaaggctcagttagggtttgtaataaaatttccatctgacttcagccatgatagctatcaaaccattcta

SEQ ID NO: 20103 - DNA, 526 bp, Arabidopsis thaliana columbia
  unsure (1)..(526): unsure at all n locations
tcgacgaaagcttgattgcgattggcgccgacattgctcttggtattgacgatcttgccgaatcgtttgcaaaggtcgatgagctcctcttcgacgcattcccatggaagattccgcagatgaaccaccttcgacggcgtctgtgtataacggaactgagtttggcctgagctcgacatctccggcaaggcgttagatacttgtttcagatttagtaaacgaacgatcacacacacagcaaagccggcggaggaagtagctcgattcgatgctctttgtgatcggaaccaaaaccatacagctaaaatatcacgaatatttgctaatcacccctacaatttgtatcttctccatatttgacccttaatcttctaaggccgtaactactagtccaagtgtctatacaaggaagtatattaaaaaatgaaacactgnaaagacctaaataaaagggccttataacgtatattactagaaaacgccgagggtgatttgttttgggcctataacgtacattagcatttgg

SEQ ID NO: 20104 - DNA, 499 bp, Arabidopsis thaliana
agcaatgacctcaagcaccactgaacaatctgtttccgaaactcagattccgttaacctcagggataaaacttgagtctttgaactacatcgttacagttgaattaggagggaaaaacatgagtttgatcgttgacactggaagtgacctgacttgggtccaatgccagccttgcagatcctgttacaaccaacaaggtcctttgtatgacccatcagtctcatcttcttacaagacggtgttctgtaactcatccacttgtcaggaccttgtggcagctaccagcaattccggcccttgtggaggtaacaatggtgttgtaaagacaccttgtgagtacgttgtcagctatggagatggatcatacactcgaggagacttggcaagtgaaagcatcctattgggcgacacaaaacttgaaaactttgtctttggttgtggccgaaacaacaaaggtctgtttgggggatctctggtttaatgggtttgggaagaagtc

SEQ ID NO: 20105 - DNA, 598 bp, Arabidopsis thaliana columbia
gaggatccccgtggaaagaggtatatgagcagtggttactggttagtttcttgattgcagaatccattttggataaatttcggttagctgatagtgtctgccatttttgcaggtagaggagttcttggatcagcttccagtcgggacactacctggtgtaggttctgtgttgaaggagaagctggtgaagcaaaatattcaaacctgtgggcagttacgtttgatttccaaggtaaaaccatttttgtggttatggacatgtctggttgctattcaattgttaacattatcgttttgttgaccagtaattgttgggccacctgtgaagccaaaatatttttgatcgatttggtcttaaaagagcatgtggttcttgtataatatgtagacattatcaatcgctgttaagaagaaattttctatgaaacagttcggcaccaatttctttacttaagctttatattgaaattggttctgaagttaagcaaaacaccataggtagttttatttaatatgatacttgcctttgaagactactgtttcttcttagttaataattgttatctacagacaactttgttaagctataccagaaata

SEQ ID NO: 20106 - DNA, 483 bp, Arabidopsis thaliana
caacccaaatcgtctccgacgtcaatcatctccgatacttcgctgtcttctttctcctctcgtgccacgtggcatccggcgacgaaggaacatgggagcttctcttaccaaacgtcggaatctcagcaatgcactctcagctcctccacaacgaccgtgtcataatgtacgaccgaaccaacttcggtccttccaacatctctctccctaacggagcctgccgcaatagcccaggtgacgcggtctcgaaaaccgactgcaccgctcactcggtcgaatacgacgtagctttgaaccgtatccgtcccttaacggtccaatccaacacttggtgctcctcaggaggagtcactcccgacggaactcttctacaaacaggaggtgatttagacggtgaacgtaaagttagacttatggatccttgcgacgacaattcttgtgactggatagaagtcgataacggtctcgctgcaagaagatggt

SEQ ID NO: 20107 - DNA, 597 bp, Arabidopsis thaliana
ggatgaaacaagtgttacctggtaacaagaaatgatggaggtgatgaatccaaaagctccggtgacacgaggagtgatcttcgttggagctaactgaagaagaccagctgctacaacaatgtccatagctgatttgatcaaagcaagtgacctctcgtttgatttttttagcttagcacgataatcctcatcctacatttttatacaatttgaattgagtctcttataataagattttgtagaattagaagtttcttaacaaagaagaaaactttacctgatacttgtttccattcttgagtcccttttcgatcttcttcattgatgaagaaagccttcccatctcaccaacctgataacagtgaaaaccgatacataagctggcgaaaaaggccaagatgacatgaggaatcgatcggaaaagtgaaagaagaggcggacctcgactaaagttgtgcagacagaagatcccatccagcagaagagagatatacgtccaagtaactcagctcgttctttgttctgtgttgagatacacatataagacattagccaacacacaaaactagaatacaccagtggaacataaacttgatg

SEQ ID NO: 20108 - DNA, 559 bp, Arabidopsis thaliana columbia
ttctgcgtctcctcaagcttagcaattgtctctttacaagagcttagagcagcggttgccaccagcgtcctagcttcaccatcttcgatctctccaccaaccccaaactcatcttgtaaactgcaaactctcttctgcatttcttcaacttcattctccaaattccaatacctatcataggactgctcataagaacttctcacaaactccttctcagtctgcagcaccaagatccccttatggatcttatcgatctcctccaatgcctcttctctactcaatccggaactcaccaatgcagaagatgtttccgaactttgcaaaacaccaggttcctttctcgacaacaccatcagagattggctcttgaactctttcttgggaacctcagggacttgtggtatgttagttccactgggaatgagatgaagatgcttaggtggtttcttgggattatcatcatcatcatcgtcatcatcatcaacaagaggaaatggaacatgttcagggaaagcggtcgggtcatatgattggcactttgaagttctgtggacaaatg

SEQ ID NO: 20109 - DNA, 445 bp, Arabidopsis thaliana columbia
ctcttgttctctaatatcatgaacagtaactctcccaagctctatccatggctttaaaacctcaaacacttcctctgtaatccctccggcgtcatgtagaacaaaatgagatctttcaccgaagaaccttacatggtaagcgatccattctctgattctctgtggtgataagttgccgtagagagaagatccacaatagagataatcgtacttctctcgccggcggagattggattcgtagagagcaaaatcgacggtgtttggagtttcggtgagtaccggaattgaatcggtgatgttccggtctgtatctccggtggttgcgtggaggagaagagtacctccggtgtttttagggtttatcacggtgtttgacggaaaagtacagtttacgacgacggttgtgtaaactctaccgtaaccccaatcggttaagattttggta

SEQ ID NO: 20110 - DNA, 394 bp, Arabidopsis thaliana columbia
gggtaccgagctcgaatatgttcatatccgataaacttaatgccggcgtgtgacaacatagagatggtgtacataaccaagaagaaaaagcctgcatccatcattgtccggatgatgttgcgtgtgtttttgagcttggtttgtttcactatagccgttggattcccgttcttgccttatctagcggttcttattggagcaatagccttgcttgtgacgtttacgtatccatgtttcatgtggatctctatcaaaaagccccaaaggaaaagcccaatgtggttgtttaacgttttggtgggttgcctaggtgcttctctcagcgttttgcttctggttgcctcggctatgcgtttggctcaaaagggtttgcatgctaacttcttcagaccct

SEQ ID NO: 20111 - DNA, 554 bp, Arabidopsis thaliana columbia
tcctccaccaagtttttcttcacctcgggatccagagcgagagtgcgaaacgtggaaggatgatctagagtcacagaggtccactccacggagtaagaatcaacggtgaagatcttcaatgttttaaacttttgtttaatagaagcagcttgttccacaacaaacggtaaataagattcaagaaccatgttcttgaacttctttcggaaactaagctcgtaactacgcacttctgatttcaaagtggagttgagatctctcgggttacgaaaatcctttttatcgacatggcgacatacaaggatccaactaagcttgacgccatcaaaaatatcaacaacttcctcatcacgttcaacagtaacactataattgctctgtttctcaagtttgttaactttgattcttctagtggagttagatatcttggtggagagataagcctctgcagcttcaaacactgtggttgtgtcaaaacctccaaattcttctattacagctgtcatctgataagagaagtagctgaagaatctgcgaaaccggtgagagatata

SEQ ID NO: 20112 - DNA, 719 bp, Arabidopsis thaliana
catcatgtcgatcatattgttagcaatcaaattgtgagttaaatgttcacttgagtccttaagcaacacatccacaacatcctttgcaataacatcatcttcctccttgttctttgttttcctaattgtgccttctatgattctttcaactggttcaccatattcttcttagcttggagagatctatggagttgcgttccagggaagttaattggtaatgacatgagtcctgatatgaaattttcaaactctctctttagctcttctaaatcttctcctttctctacacttatcaatgccttggcaagtactttgaatgcaacctaccagttaaaataaaataaattaaattattaaatgccaggaaggaaaaaaaaaactgaaagggtaatgattagtatttgttaaacaaattagaaagagaatatttgtaatcattatatcaaatgtaatcattgtaaccatgttctataaaatagattaatatttctatggtaacattattatgattgtcccttttaatttcttaatcaatgctttaactcatatataaaagggattattggattatttagaacttttgtaagaaaatattaaattaagggataagtatactgacagtcttggagacgtcttggaggagcacaggttggtcctcggaccatagatccatggattcgacaaagacttgtgcatgtcctaacgatttgagctttgag

SEQ ID NO: 20113 - DNA, 597 bp, Arabidopsis thaliana columbia
tcctctttcttgactttctaatattaacatttttacttgaaacataaaaagcagtatcttttataatttcattctcttcaattattaatattgatccgtacacgaactttatattgatacgattattaataagaagacgatattgtaggtttcttgacgggtacggcacaaagagatttggccttgtgtaaggtaagaccgaaagtctcgctcatgtcaatgtttccggggacgacaccgttttgaagcttccagtcaaaggaatagagaagagaggcaagcaccatatgcattgtcttaagagccatcgagattcccggacacatccttcttcctgatccaaacggtatcaactcgaaatctctgccttttacatcggtttctcgtaacaagaacctctctggctcgaacttcattggattttccacacgctcgcgtctcgtcctatcgcccatacgtgcacaacaacctaatctcgagacacagaggtggaagattttaccaaaccaaacttttttattggtgtaatactcaagtaatgactgttggtgtaataaagataagtatgagaaaatcttgggtgtctttaggacaagg

SEQ ID NO: 20114 - DNA, 639 bp, Arabidopsis thaliana
tctctgaatctagtctctttgtttatccttacaagatcatcatcaaaacatgcgggactactaagcttctcttgtcgatcccgcatatccttaggctggctgattcactttgcctcactgtcaaatctgttcgctacactcgtggtagctttatttttccgggagctcaatcttaccctcaccgtagcttctcagaggaagttgctttacttgatgactattttggtaagctcaatgcaggaagcaaagcttttgtgatgggaggttcagataataaccctcagagatggcatgtttactctgcttcttctactgaagaatctgcggtttgcgataaacccgtgtacacattggagatgtgtatgactggtctagacaatataaaagcttcggtgttctttaaaaccaactctgtttcagcttctgagatgactattagctctgggatcagaaacatccttccaggctctgaaatctgtgattttaactttgaaccgtgcggttactcgatgaattcgattgaaggggatgcggtttctacatccatgtgacccggaagatggttttactatcaagctttgaacagttggttatgactaaaggctttgactttaaggagttggtggatagggtctggtt

SEQ ID NO: 20115 - DNA, 269 bp, Arabidopsis thaliana columbia
tgcctgtttcttgcacctgcacaagctctcaaacctcagtgtcggagtccggttcctgaactcctcaaggtaactctctggttggcagacccggaaatcaaatgactctgaagttgatgaattctctgaagataccgtcaccgaagaaggcgaggatgaagacggcgagagactgattcctactatgccaaggaatgatcttacaatgcctttgacaatggagatcgataatgctgtattaactaatatcacacataacattccttctg

SEQ ID NO: 20116 - DNA, 640 bp, Arabidopsis thaliana
  unsure (1)..(640): unsure at all n locations
tgatgaaagattttacataaatttttttgtatgtaatttgatttttaacaaaaaatttcaatgaatcttttcaattacatatattttgtatttcgagctttacaaaatccaccacacttgttaaaaagcttatgcagttgccgacaacactttgacgtttacattccaaaaatgatcgatgttcatatgagcctataataaatgctagagacagtaagatataagtatcaaaagagtaaaatctctaccaagaaattgactccaaccaatcggaggtaaactcataggccacaaaggttacagcaccagcaggagcagctttcacagtcgatggcacaatgcctttgtacagaccatgccacccttctgatatcataatctgtctaagaccgtctaacatgtttctgtatgcacgtcgctccactcgggctccatatcttggatgtctctgtaaaccttcaatctgcaacaaaagaaactttcaaaatctatctggcatttctattatttcatgtttgaaggcaattgcattttcattgcgttggagatcactggcaagtttgaaaagcttttatatttaagaaatgtntcacacaaattggagtttctttctataggtacggtgacagacaagtggggt

SEQ ID NO: 20117 - DNA, 639 bp, Arabidopsis thaliana columbia
cagtgacagttcagtcttcagttgggagcacagccacaggggtacgcttctatctatatcttcagggtcaaataatatttagttctataaaacgttttctcttccccttttgatgggataagggtagggcatctgggatgtggagatgtagctggtattagatgccttgtcttttcccatcgtgttgtctaagagtttgaatgggttttatgtcttgtatctatttgcctagtcgctcttataacattagtgtctccacaatcgttataccacttcaaaatttatgcagaactcagacgcttcctttgtaaggaaatcagctgcaagcatgttgagcggcaaaagacccgctccttcggctgtgagttttttcatactttttcttttgtggctgttgaatcctgcaatcatttggggtttcatgacacttgcacgccttttccttttctcttttgttctcaattccactatgacttggacgtcacattgtatgttaacattttatagcaggcgagcaagaaggttgggactggcaaaccgggtggaggcaaaaaagatggatctgtaaggaatgaaggtcaaaatctgttgaacacctgaagatgcgaggtcatagaatataatataaatggtatgtga

SEQ ID NO: 20118 - DNA, 500 bp, Arabidopsis thaliana columbia
gcaaatatgctcatcaccatcgcaggcagatattttggccaaatggaatgagaggagaagtgtgtttacaacagtttaaattttaaattcattaaaaactaaaagaaagagagttcaacataagtcgccgacatacaatccagaacgagaaaactaaaccgacacgcaagttgaaagattgatgaaaacgggacgcaatctggtttgataagagaagaacaaaaaagtcaaaataattaaaaaatatctctcgacctctcttttctctctattgattctatcgctctgcgcatttgtatcttgctctgtctccgataccaaaaggtaattcaaaggaattttagggtttacgttgatttcttcgattcgattttttgggacgtgttttgaggattcttctatctctgggtttacgctgattgatttcgagagctgtagctagggttatctgctactctttgttgcaaattttgtttttgttatcctttttgaggtgacat

SEQ ID NO: 20119 - DNA, 566 bp, Arabidopsis thaliana columbia
ttaggaatcttggtttgctaggtggttgagtatgatttatagatccgttatggattagttgttcttaatgtctattgctttctgatcaattagaatttgagcccagacgtttccgtacccaaaaggtcttcgacgaaatgtctgaaccactaattcaagagattcgtggctctgtaccaaggaattggttacagggagcgttttggctttaacttgttgattcgttacgcctgttaggttagctctcgtcactggtgattgagtctgggactagtttaacttgaggatctctgttgcggtggcacttagatttggttatcgaactagttgtagggatagtttattgagcatgtcaatcacctgtagattgaggaaatttagctactcaattaccccatccttgggaaattctcttccaattgaattctttgtgtactctgctattgtttactgcttcttgttacctgttgcttagcttttgtatttcgtacctgttatcactcttatactcgaccacacccatgttgtctgataatagactgtgctgtcgagtatatttgttacag

SEQ ID NO: 20120 - DNA, 644 bp, Arabidopsis thaliana
ttgttacatgagaaaatcagacaaattatctctcgtgcacttcctatcttctttcttcttattcctttgttttactttcttcttaaactctgaatcttctttactgtcctctgtttgatctccatagtctttcccgagactgtaaattttcctcttcctcatgaaaagctgttctaaacaactcataagcttcaaatgaagaacccggaatctcatttgtctcatttcttaaatccccatgaatactccagcatgaattcctcttatacttgtgatccatacctctaattaccagatgatcaagtaccgtgtctcctggttgatgacacacattgcggcaatctacacatggacaaaacatgttgggaggattacccagcttcctcgctgatgctttcacaaaatctgtggctccttgctcatactcaaggctagtcctggagaacataactaacataactaagattaagatacaactccataccttgaaagccaaacccaagacttgtccatgttacaataagatcacagctcacgagcaaaagatacatacatttgtgataaaagttctagagttagacactataatactagacgcaatcacatacaatatgaacatattttaagagaatcaatgaaatatg

SEQ ID NO: 20121 - DNA, 265 bp, Arabidopsis thaliana
acaaggcccgtcaatccgctccatgtgttcttttctttgatgagctcgactccattgcaactcagagaggaggtggaagtggtggcgatggaggtggtgctgcggacagagtcttgaaccagcttttgactgagatggacggaatgaatgccaagaaaaccgtcttcatcatcggagctaccaacagacctgacattatcgattcagctcttctccgtcctggaaggcttgaccagctcatttacattccactaccagatgagga

SEQ ID NO: 20122 - DNA, 519 bp, Arabidopsis thaliana
gtccaatcttcagcaatcagagagagaaaagctagtcatgttggaacaaatactccacgagagaataattgctcaagacttggatgtagagtcagttgccgatgctatccgttgttcaaaggctggtatttcagatcctaaccgccttatagctagttttatgttcatgggacaaccaagtgttggtaagaccgagcttgccaaggcactagctggataccttttcaacaatgaaaacacaatagtgaggatagatatgagttagcacatggaaaaaacgttagtctcacagctcgttggtgcatcacctggctatgttggttacggagacggtgggaaattaactgaagttgttcgaaggagaccttattcagtggttcagtttgatgagatcgagaaaccgcaccttgatgtcttcagtatcttgcttcaactactagacgatggaagaataactaattctcatggtaggacactaagtttccaaactgttttgtaataattacatctatataggca

SEQ ID NO: 20123 - DNA, 551 bp, Arabidopsis thaliana
ttttttttttacccaaaggtataaaagtctgaacttttttgattctgaatctaattttgtttgttgttatcgaattttgagtagatgtcattggaagaggatatagtatcagatgatgagatgaacatgattgatgaggatgatgctactgactccgaagcggagtctctttcggattcggatacagagaacgagatcaccgagaaattggctgagcctacgaagactgcgatatacaacagagatgggttgcttgataagcttcaagatattagctggcctgaagatgttgattggactcataagcttactgttgagattgaccagggaggagctgtggatgtaaacgatgaccttgcgagagagacggcgttctacactcaagcgcttgaagggacaagagaagcgtttggtaaactcaatgaaatgggtgtgaattttctcaggcctgcgaattactatgcggagatggtgaaatcggatgttcatatggagaaagtgaagtctcggcttttgcatgagaagaacagattgaggagtctaagagagga

SEQ ID NO: 20124 - DNA, 1550 bp, Arabidopsis thaliana
tgtataaggacaactagaaaacacttaagacaacttaatagtatagtttcaacttatgtgattggtgcatggatttatacgttaacgtgattaatcatacattggtttgcattagaaaattgaattctgaacaaagttgataatgttggtctgagataactagtacaagtagtacagcgaaattttaattttatggttgtgtatgaaatttcaggaacttgatgatgaggaacaaccaatgcagccacaagggatgttctttggtccaagcgaataccagaagacgtgtaaggtagggacgagatacactgtgcagcagataatgaagtatttggaggggtttatagaagatttgtcatggttcaaggcgcattcacagtttaggaatgtattccacatgcctgaggagaaaagccacatgactcaaggcatggggatgcttttgcttcgcacaacacaaacagagatggatcgggagtgctggtttgtggttattggactgcctactaggtactccattaaagagcatgcgctcttatgtggttttgattgtcatgagtacctgaaggaattgcagccgagtattaagatcttggatgcagaattgaagtttgccaaaaagatctttaaaaaggtatttgggattaagatcattgatgttgagaagaaggtggatgaaatgaagaattgtggagaaaggaagaaggcggatagaaagaagttggctatcttgctttttttgtgcaaggtgattgctgcgaagtcaaaggctgatgaaaacatttagcgtttcttgctgaagattgttgatgatgtgcatgcatgcgagacattcccatggggtcgtttcacatttgatggttgtatggaagggattaagtcggtaatgaacaacatgaaagggaaagcaaaactgcagacttgtttctccggatttatttttccattagaggtaacaatttagagtattatatataatgagatgcattattagacttaaaactaatacttatgtgacttttaatttgaatgtgtagattttgccatttgaggctattccacatttgggacaaaaatttagagaccctgtaaggttcgagaatgagtgtccgagaatgtgtaagagcaaattctctagtagtgtcatgaaagggttctcgttggaagagataaacgaggagcttggaagtgtaaaggtaagagttgtcctagttatatcttattacatgtgactatgagctttaatatgattattttgatgtttgagtttgtacaggttatctctagcattttggaaccggataacgaagagaaagatttgttgagacacattgtagatggtgatgatgctgatgatgggataggtttcgttgatccggttttcgatagctggagaaaccgtttgatcaaagagaggaagagaatctggtggaaggacatgtttgaagcggatgtgcgggctcgaagcggcgagcaaatggaggaagaacatgtctcagagaatgttccgagacatgttctggatgtttcgggcagcagtagctctttga

SEQ ID NO: 20125 - DNA, 577 bp, Arabidopsis thaliana
cgcattagtaaaggtggaggctttggtggtggaatcggcaaaggtggtgggattggaggcggcattggaaaaggtaaaggatggggctttggcggcggaataggcaaaggtggtggtattggaggcggcattggaaaaggtaaaggatggggctttggtgttggctggtttggacaccactgagctaaatgagaagaagattgtagttgcattgcatggatgtctcacgtaaacaagttggttaaagcaactacttctgaataaattaaattagctttcacgtatttgtaactttgagtttcacagctcaagataagctttgtactgttgagttccactagtttctatctataattatgagaatttggtatcctaatatccatcattacggatcaaaccccgtaatcccaaaagatattttaacaatgtggctctgccttgtgctatcacagtgtgtgcctatctatgtttgtttcaactcacccctcacaaaagaacctagtagctcacatactgatacaccttgcctcttcgttctcaagtgattactcaactcggagtaggagcagaccttgaa

SEQ ID NO: 20126 - DNA, 623 bp, Arabidopsis thaliana
atcttcttgcaacttgtttatagacttaaagctgtgtacttactttgttttgttgcttcttcttatcctttgtcttgttctgtctcttggtcgtgatatgaattagttctttcttcttggttaaattgcagaacaagtgaaagagcttaatatccacaagactcttgtttctttcttaaatggctaaagtttattggccttatttcgatcctgaatatgagaacttgagctccagaatcaatcctccaaggtaaatcattattacatttcacacttgaaacccattgatgctacttccaagaagctcatactttttttctatgttgttgcagtgtttctatagataacactagctgcaaagaatgcactcttgtcaaggtaagcatcttcttcctctgattttagttgattcgatgattaaactgagattttgatgcatttgtgactgttaattattaggtggacagtatgaacaaacctggaatactacttgaagttgtgcaagtcctaaccgatctcgatctcactatcactaaagcttatatctcttctgatggtggatggtcatggacggtctaattttgatatatgtatatacatcatacttattattcattcaatga

SEQ ID NO: 20127 - DNA, 994 bp, Arabidopsis thaliana
attggcagttttgatcccgcgagattaacaaggacctggtctaccaacctgggtcagatggagacctgagcctcttgatttttctttgttgtttgtgtcgaatccttgactgcttttgctggacgttagtactgaaactaattgtttgtttttgatgatttgcagcaaggaccaaggaagttactctctcggagacggaacttgagctgttaatcctttccactggtcttacactcacgaccgtgatcacccgatcgttgagaacatggctgggttagcaaacctgcttcgccacatcaaaaggaggaactgccaggttcctggagtgaagaacatggccgaggcggcggcttatgctgacatgatggcgaaggagggccaggtaattatcgataattgtcttcttctaatttatatctttacgctagttgtgactttctgttttgctttcggaaggcgatagtgccacaaacaagctggttgctctctatgagcagcgtctgagccaggtcccctcggcgaacgagctagaagaaggaaaggccctcatccgggagctgacgtcgagtgtgaaggctggtcaggatcgcgaagtctcgttccagttacacctcggttttgacttgtttataaataattcgtcgatgatttgatgattctgacctgattgttatttcaggcggagatcgagaggctgaaaatggagctgtctatttcaaaagacctcgagaaaggttttgctgagaagatcgggttcatggagatggagatcgaggggttgcaagccgacaagcagacggcgaggagctagatacatcgcttggagcagaagaggaaagagctctcccaaaaggtggtggaccggacttcgattgcaaaaggggcgaagaaggcggttcacaatgctaaggttgagctggctgctgcgtattcgaagctgctggctgggatcaaggagaagtgggtcgcaaaaaggagtcacggtactggagag

SEQ ID NO: 20128 - DNA, 578 bp, Arabidopsis thaliana
attttatctatttgttgaggggaaggctgcatctccaaatgtgtctcgagttttggagaccatccctgtaagctctggagcttatgaatgatccctttatttgtttttctgacttagtattttcttactgctaatacgttctgttttgcagggtgtaaaagttatttacaggacaaaggaattagaagaaaaacaggctaaaaggtatttctctggtctgcatctttgtggatattggtaatggatctgctgtgatttcattgtgtcacttatgaaacttgggattttgttcctttacttttagatctataaatccactaacgtgattttttcaacagccggatatggaatgagacttggctgtcgagcttcttctacaaaccgtgtaactatgaattattcgtgaaacagtccttgaacatggaaatggcaatcaccatggctcaggtatctcttactttttaccatatttgttgaatatggtttgtggtaatacactagataatgtaaaaaagccaacggtctctcagactctcacgccattttatgcggtgtatttaggacgctggtatggaatg

SEQ ID NO: 20129 - DNA, 1217 bp, Arabidopsis thaliana columbia
taacaaagcagactacttagacatattgaatgaaacaaacaacatattttgagataaaaagcataaacatagtaaatagagaaggggaaagaagggatctcttcactgtttatagatctgaatgaaactctcaagaataatcgatgaatagcttatgtctctcacaatagggttttgcaaagaactttataaaaagacttgataaaagaaacttaggtctaaaaaatatatatatagaccctaaaaacgtccagggactaataatgcaaatatggaaatcttctggggcaaacttgagcttctgaaaacttgaaagcgtttagggtttttgctgggccgaaactggtgtcgaccgacaccaagagtgtgtcgctcgacactcatcgctgattcctgaaccaaaatcgttcttagtttccttttccttagtttttgctccaaaatgtctccttatctccattgttgtcccattgcatagaatacctgaaaagacactaaaaagactcgagaaataacataaagactcaaaatcttatacctaatatgtagataaaatcagtgaaaattaggttatatcaactcccccacacttagcttttgcttgccctcaagcaaaacacaaaagccaaacccgtggaagaggttttgaaaacaaaggaactcccaacattctctagcctcttgccatgatcatccaaactaagtccatatgcctaacaagtttaatcaaatcctaaccaacatgtacttctctgcaagcttacacaacattctagattccatgcctaagttccacaactatacccaccaggctttcatcgttgggtctcatcaaacaagccaacattcaagatctttctagactcattcctgtactataccatgataaattgaccattctttatatatttttttctttttcggtgttctttctctccccagacttattctttttagagagtaaacaaaggggaactcgcatactggatcgacaccctcgacatttttccaacctttgtaattgattattccaaataatgtataaaaacggggtcataggaaacattcctacccctatacactatctgaaagttgtctcaatctctcattatatttttctttttataaggggagaggaacatattctttttatcacattggtctcaatatctggtattctttgccatctagattttccgaatagtcggattgacaca

SEQ ID NO: 20130 - DNA, 754 bp, Arabidopsis thaliana
tctcagatgcataacgcagtctcctcggccccaaacatcaatcgtattctagaagagtcccacaacactcctttcactcgcaagatctccaacgcgataattttagacccaagaaagttaaggatcgagtatttcaacgggtcattcgacccaaaggggcatttgaagtctttcataatttctgtggcccgagccaagttcaggcgtgaggaaagggacgctagtctctgtcacctgttcgttgagcatttgaaaggaccagccctagattggttctcaagactcgaaggaaattctgttgacagtttttaggagctatcgacgctcttcctcaagcaatactcggtgctaatcgatccggacacgtctgatgccgacctgtggtcgctgtctcaacagccgaatgagccacttagggatttcctcacaaagttccgatccaccctagccaaagtcaagggaatcaatgacgtcgcggctctctctgctctgaagaaggcgctgtggtacaagtccgaattccaaaaaatgttaaatcgagtccataccagaatcggtgatctgtgtcttttcaaggtctttcgcaaggcgcaaagctacctcatcaggagtctcaacacttgtggtgttgccaacaatcttgttgttgttgttgatcttagtcattttgttcacaaaaaaagatatgattagtatattaccaaaaaattcaggtaactaaattataccgaattagttttcaaactcgcttaag

SEQ ID NO: 20131 - DNA, 530 bp, Arabidopsis thaliana columbia
taatgggaaatgattagttaccggaagtcctatgctaattaggtgtaaaactttatcgtcttttgtaaacactcttgctccaaaatgcaatcctgctccaagtataaccgcaagtacaaaaccgagaaccaatcccaactgtcacaagatttagttctttagctttaaattgatctagaatcgaatctttataagctaaagtacacataggcctccattgtttgtttgcctttgaattacctattatgtatactttctgtgtatattttcttcatataaatccaaaatcgtaaacataatgtaaacgcaaacacaaatgcataaattgtgtgtacctgcagtacacgagaggcggtactgctgctcttttgtagtcttttttggcaaacgcgctcgctagtattgcctaaaggaaaagacatttgttaaaactttaaaccacgcgcttaatcgtaaaaggatgcaatgttagagacatcattatctaaaaacctggccagctacggcgtacccgtctgcaagaagtgaag

SEQ ID NO: 20132 - DNA, 1232 bp, Arabidopsis thaliana columbia
cataccgataggattgctcaacctgatcatgttttgcagaagctcctctggtcgtgaacaatgagacgtgatcatcccggatgatgaatgtgatgtcgggcatgagccggatgctccttccgagcaagtccctaccactgaaccgaatgaaaccgagccgactgacgttaagctagagatggttatggatccctagtcgctgcgtccactttgaaattgggggttgtctcaaacttttaagaatttgaaatttattattaggataagtatgttttttggcttaaagaggctttttgtttgaacaagatttatgcctaaggaggcttttaaacctttttcactttaatccctagagggtcttgctaaaaatagagtgcgggtttgcaaattccgctcttaaatgcttttgaccatgtggctaagtttggagattctttggttgatcagacctttctctcagaatgcgagatctgagctcggttttaatgcaaattccccacctcgggtttagtcaattcggtaaacttgttgggcttgggcttaactattttactttgtatttaatgggattttcgtcttaaatgcgacggttgccatttcccttcccgttcctcgagaaacaggaaaaagcttcacgcctttgatgcaataattaccttttctccatttccaaaaatggtttaaaccattcagatacgccataattattgattttttggttccaagacaaaacctaaccctctataaataaaagcttatctgccgccgaattctccaagtatgatttcaaaaatttacttggtaaacactacaagaatggaaaacgaagaagcctccacggtctgttctctcgaccccggtagcccactgtttctgtccggcgatggtttcgaaccgaccagtgttctctttccccatgccactttccactttccttcgaaaggaaaaaaagaggcgtacgacttcatggacaaggtcgaaatccattcctctttcctctactatgcttcttcttcttcctctctttacgcttgtcagtttctatatttaggttgttgataattatcaccacttgtgcgatgagaggcagcggctaggcctcaaaaggcagactctcgaggcccgtatcgctcgagtggagatgaaggtgagggccatggaaagtgataccttccaatgggagtggaggaacttcgactgcgtacgcaggatcccgactaggcttcggatgt

SEQ ID NO: 20133 - DNA, 1367 bp, Arabidopsis thaliana
cccagatcattctgtcaaccaacctactcgaccaccacctcgaccctctaatcaatccgcactcaaccagacaacctgagcatcagaaagagaacagaagagaaggcccattcaaagtccattcgaaacccattcgaagcccatcaggaagcccactttgagccgacactcttgatcacgccgtccatgggccgttaagtgggctcgaagcccgctttcttatttttgtataaataagtctctaagggtttcgccctaagacatgcactttttagacacgaattttgcattattattcagcagccgcttttcattcctccaactttgtatttcgatttttcttttgctttcattgcttggtcatctttcgtttctatgttattgtctttaagcatgttgtttgagtagtgattaggatttctgaggatgggatagagtagttgtggaacccctggtcgaatctgttggttaagtgtaaatttattgaatcccttctggattagttgtgtttactgcttattcctttctgatcaactggaatccgatcccagacgttccagcgcccagaaaggcgtttaatggaacgttggatctactaattctagtgataatcgtttctatcccaagggattggccgtttagagcggttattggctttaacagttggttcttattgcctgcttagttagagatcgctaaagggaattaggtcagtgtctagctatgcttgaggatttctatcacgcgaatggattaatctgttgttgaacctgttattgaacctgttgtctagggatagcttaattgagatttgttaatctactgaattgattagggagaccacactattcgattaccccatccttaggagtttctcatctaattgatttctctgtttacttaccttcttcattcacttgctattgaattttagtattttcctgttttcaaccattctactcgatcacaccctgctattaacaatgagactgtgtgatagagtaaactggtccatttatgcactttcactcgaataggtgtgaggaaaccaatctgatactgaactcggagaaattccacttcatggtcagagaaggaattgtcttggggcacaaaatctcaaagaagggggtacaagttaataaggctaaggtcgatgttatgatgcaattacagccaccaaagactgggaaggacatcaggagttttcttgggcatgcaggcttttacagaagattcatcaaagacttctccaagctcgctagaccactcactagactgttgtgcaaagaagcagaattcatatttgaagaagaatgtctaacagcttttaagtcaaccaaggaagctttggtctctgctccgat

SEQ ID NO: 20134 - DNA, 913 bp, Arabidopsis thaliana
tcatattggcactcaacaatccacaagtatgaacactcatcaattttacatgcttttcctgatttattcgacattatattgtggcataatattgtgatatatagacacaatcagtataatggtggtatatagaacacaatcagtataatggaaagttaaaaatcagcaaacaaaaaataaatcaaacaaaaacacataaaacattgtgggaaaaattttgaataatcaaataaaatcttcaattcattttttgcatgtatacactcacagaggtgcaagtagagctgaacattttgggagaagcatcaatatgatagaagaccaaattattaggaatcctcttttccctacaacaaaaacagatacatcactaaccaatataaatcatggttttcttttttatattttttgggtttgtctaaaaaagtccaagaaggaactaaggtcaaaaacatgaaagatataatttacatccctttacatcaaacataatcaatataacagtttaaacattcgacgatactggacaattatcagtgaacaaatatgataaaatagttggacatacagaagtggacattaatattttgcagtttatctttttttggacttgatatgttggatactagtttttttgccgaaacaatttcttaaattttttccatacgagtttcttgtttaatggtgctcaagtcaaacctccagcaccaacctgtagtaaatgcagttatcgatggagatgatatcatttacagagactacgtggatatcagtatcgctgttggtacctctaaggtttgtttccgcaattcttttgacattgagtgataatatcatttgggcttttgagatagttttgattgattcctcttctctgtgtattttatcctagagtcttgtagttccagtcata

SEQ ID NO: 20135 - DNA, 843 bp, Arabidopsis thaliana
gatcggtgcctagtaatgaagtagaatggatcttgctctggatcttacaggtgtttttcgcgttaaccatggcagctattggaatttctcagtcgagtactttcgctccagattcaagcaaagccaaggtcgcagctgcttcaatcttcgcgatcatcgatagaaaatcaaagatagactcgagcgatgagaccagggacagtgttggagaacgttaagggagatattgagcttcgtcacttaagcttcacttatccagcaagaccaggcattcagatctttcgtgatctttgcttaaccattcgcgcaggaaaggtaaaacaaatctttggaccaaacccaaactttctattaagaaactttttcactcaagttttctgatcaagttctgtcttttttttttcagacggttgctttggtcggcgaaagtgggtcggggaaatcgacggtgatctcgctgttacaaagattttacgatccagattccggtcagataactttagacggagttgagctcaagaagctgcaattgaaatggttgagacaacaaatgggactagtgggacaagaacctgtcttgttcaacgacacgattcgagccaacattgcttatggcaaaggaagtgaagaggccgcaaccgagtctgaaatcatagccgctgcagaacttgccaatgcacacaaattcatctctagcatacaacaggtaatggaataaaaacagcacaaatttgtaagaactctgtttttcaaagtttcttacgatgcaagcaataccattttgtagggttacgacacagtggtgggagagaaagggattcagttatcaggaggacagaacag

SEQ ID NO: 20136 - DNA, 1143 bp, Arabidopsis thaliana
cataacttggtgctcactaaagcaaccaacggtcgccatgtcgtcttgtgaagccgagttcatggctgcaacaaaagctgcaaagaagctatttggctccaagatttgctaagcgaattgacgggtcagagttttgtgaagtcaaaaatatacattgataacaaatccgctattgagctcacgaagaatcccgtattccatggaagaagcaagcacatccatagaaggtatcatttcatccaagaatgcgttgagaatgaacaaatcgaagtggagtttgtaccgcgtgaagagctacgtgcggacattcaaacaaaggcccttccaagaatcaagttcaagtcaatgagaagtctatttggagttcaagacctctctaaagtcaacttgaagcttatgggggagaatgttgggtaaacttcaattgacttaaggcccaagtaatctttaatgaggaggttaaagatttagataggtttagaatattctattaagtattaggagttatctattcctaattgtattaggaaaaggcaaagttgtgcccctatataaggatctatttgtttgagttgtaaccataagagttgtgtgagaatattgagagaccttggtgcttagttttgagatagtttctaatcatcaataaaagagagttactcttttaaaagcttgtctagtgttcttaagaaatttatttggtatcagagcttaaggataatcgatcttttaaacatcgtgagagagaagtcatcacaaaacaatggttgacgttgacgccgttgtctgtgtgacgccacacaaaaggagaacgttccttcttcgtctttacaatgtcctatacttactcaatctaactacacagtatgggccatgcgaatgagggttatgctgcgagtgcataaagtgtgggatacgattgaacccggattaaccgacgataacaagaacgacgttgcaacagctttgatctttcaatcaatacctgaagcccttacacttcaagtaggtaattaagggactccaaaagatatttggaacttgattcaaagtcgaaacgtaggagcagaacgtgtcaaggaagcacgattgagtattgtgatgtcttattttgagaagataacaatgatggatacggagaca

SEQ ID NO: 20137 - DNA, 1378 bp, Arabidopsis thaliana
tataatttgcatgttttcagtgtccattcatcatcgttttgagtccagtttcgtatcattcatcactgttttatatcatttctcatcattcttgcatactttgcatgattaggatagctttgcatacatattgcatttctgagttgttttcaggtgatttggagctgtttgcaagcaaattggaacaaacgagccagaaccagaagacatactcgaccccccggtcgagtgactttggagccattcttcccacatactcgacccccaagtcgagtgactttggagccattcttcccatccactcgaccaccgggtcgagtaacatcagctcaggccacttgatgacactactcgaccccctggtcgagtatcacttcgccacaccacctgacaacactcgaccaatcactctaccaagttactcgaccccctggtcgagtatcatcactcaccaccatcagcatcactcgaccggacactcgatcacgtcttcacagtctactcaaatctgcactcaaccagacaagctgagcacaaggaagagaagaggagaagacaaagtgtttggaagcggcatggacctccatcggatcacgaagcccatgtcggcccattatctctctatgggccgagcgattaggttattggcccgtctactatcattttatttcgttttgtataaatagatgtcttagggttctgtcctgagacatctagtggacattgagtttttgcttcagttttattttctgttatactttcgtgcgctgcttttgcttctgcaacctctaattcgagatttttccaagttattcagattctgcgtttgatttcatctgtcatcttgtttttctactctctatctctttacttatgcaatattatcgtttatctgtgtttatgtctttgagcatgttgtctgagtagtgacttagaattcttagggatgggatagagtagttgtggaatccgtagtatgtagaatggttaagctttagaattgattgaatccctttaggactagttgcgtttactgcttatttctttctgatcaactagaattcgatccaagctttcccgcacccagaaggtgttcgatggaatgcttgatccactagttcctgagatatgcgtctctatcccacacccagtgtctggaaacaatgcatggacatgataattgccaatttagttcaggttctaatagataggaaatgtcatcagatgagcgagtttcgaattaaaggagtatagtcaagttgtaaattcaaagcagggtgcggtcttacttcagagaaacaattggttatgcaatagagaactaacaaactgggcattgaatttacttcattgaatcaaacatgcttatcggtttgaa

SEQ ID NO: 20138 - DNA, 464 bp, Arabidopsis thaliana columbia
tgtcctttctaaacttttagataaggcaacaggtcagcgtagatttggctaccacccaagatgcaagcaaatgggtttaactcatcttagctttgcggatgatcttatggttctttcggatggtaaagtgaggtctattgaaggaattgttgaagtttttgaaacatttgctaagtgctcggggctgcgaataagtatggaaaaatcaacggtctattttgcggggttgtcccacacttctccccaggaagtcatggctcatttcccctttgcggtgggtacacttccagttcgttatttgggtctccgctagtcaccaagcaaatctcctcgacagattatctgcctgttattgaaccgtgaagaagataattggttcttggtcagccgttttttgtcttacagcgggagattaacttaataagctcagtcctttggagcatttgtaatttctggattggagc

SEQ ID NO: 20139 - DNA, 480 bp, Arabidopsis thaliana columbia
tataccttgtttgcaggaaggagatgagagatttggtgcaaaatctccggaaggagtaaattcaacattccagcctgtgtttagatctggaagttggtctgataaaggaccaaaacaatcaatggaagatgaattcatttgtgttgatgatctcactgagtatattggatcatccactggagctttctatggggtatataagatttgcttcatcgaatatttcaaaaaagttctcttttttaaaatgattgtttgtttatgaaggtgtttgatggacacggaggtgttgatgctgcatcattcacaaaaaagaacattatgaagcttgtaatggaagacaaacatttcccaaccagcacaaagaaggcaacaaggagtgcttttgtgaagactgatcatgctttggctgatgcttcttctcttgatagatcctctggcactactgcactcactgctctcattttggacaagactatgttg

SEQ ID NO: 20140 - DNA, 568 bp, Arabidopsis thaliana columbia
ttttctttaacagagtgtgtgttttcatgtcaagcaaagcaattttattttgttttattacacacataaaaaaaaaaaagagatttattttattttatctgtgtttgttttgtcatgatcaaattatgatgtcagtactttgatgtgaaaaaaggaggctctgtttcttccccactctttcctcacgggcttagtcatcattttcctctctgttaactcttgtcttctttctttagtctaattacaaaaacaacaaaattcgaaaaaatgaaaaattttggttgctgtgcagtgaattaaatagcaccaatgtggtaaattatgagagagcacttagtgcattaatagcaacagcagtgaccataccctcttttttgtcaaagttcccaagttgaggatctgttcttgttttacagcttcttttgtcatctaattttaattttcaaaaccaattttaattttcaggtgctacatttctggtttggttcggccaactttccggttaacggtagccgatcctgatttgatcagagagatcttctctaagtctgagtctacgagaagatga

SEQ ID NO: 20141 - DNA, 524 bp, Arabidopsis thaliana columbia
cgtggtttggttcttccaaacccgggaacatctaatcggtacctagagttttttttattgtaacgagaatgtacatttttctcccatcttgaggcaatgtaaacagattcggaattttcatatcagttttctgatatgaagtaggtttaagtatttatatttcaaatttcattgattgttgatattgaactgtcatgcagtagcttataagaaccgcctctagactttagtccagtgaccaaaagataaagatgaatgaactatgtcaaagaaaacaacttctacagaaatttcggaaatcttagacttccgaagagaaatattgagtaactgcaaaaatgtatatttagatatctgtaaggctcactcacattcacatgtgactataaatatcattcatcctctgttacatgatctcttcataatccttaacctcttgcacgatccaaggaacattctgcacacaaatagtttcataatttattagatatcaattaataaaggaagtaatttgaatgttatag

SEQ ID NO: 20142 - DNA, 611 bp, Arabidopsis thaliana columbia
gtaatcattcgttagtggcatagtgatccttcattgcatatgtaagggagcacacaaatggatattaagttatggtgtaggcatcagactctgcagttttctccgacaattcctagcctctcttgtgtggtatcatatattactctctggtttttctgctgataatttccgatgatcccgacttcattttcatatgacagacttgctaaggccaagcagactagagatgcgtcaggcttgacaaagtagaacacaccagtgacatccacttcgagctcagcgttaccttggaagatcattttgataatgggaatgcttatgtcttcataacttgtgaggttaaagcaagtgtctaagattgaataaccaggagcagtaggaaacccggaaaactgtttcagaaactctatcttcacagctttgtaaatggaaggtggcaatcttgtgataacggttcctgcactgattagaatcctctgccaaagcttgaagatttcagttccacgccaccaatgctagcaccagtgagattcagaatgtataaggcacgaagccgagggatttgtactaacggcgtgtaggacactgaagttgaatcgtgtaacagagga

SEQ ID NO: 20143 - DNA, 581 bp, Arabidopsis thaliana columbia
ctagtaatgtacgccagtgtgctctaaagttggcgactggctgcagatggcaaaatcgctcgccgggagtggtaagcagattgtgctctccacgctggcgctggtgcaggcatcatctgaactgggcgaactgaaacgctatgttgagaacggtgagtttctgattgaagccagcgatctcggcgtggtgaatatgtgcgctgaacgcaaactgccgttcgtcgccgggcacgcgctgaactgctacaacgcggtgacactgaaaatattgctcaaacagggcatgatgcgctggtgtatgccagtggagctttcccgcgactggctggtgaatctgcttaatcagtgcgatgagctgggcattcgtaaccagtttgaagtggaagtcctgagctacggtcatctgccgctggcctactccgcccgctgctttaccgcgcgttcggaagaccgcccgaaagatgagtgtgaacctgctgcattaagtatccgaacgggcgcaacgtgctgtcgcaggaaaaccaacaagtgtttgtactcaatggcattcagaccatgagcggctacgtttacaactcggt

SEQ ID NO: 20144 - DNA, 476 bp, Arabidopsis thaliana columbia
tccaatatcacataaaactaaattaagactatgacaagcacatggtgtataaaatgcttttggatttatatccaagagccttttttgtacaccttgtttgcatcttttcatgttaaatccattatcataaccttgacctctcacattatctatatctagatctaaggattgtaatacttcttttaacacttcgaaaagtctgtagcccgtagtgtcatctactttcaaaaatttaacaaagtactcttctactttaaaagaatttgaagaaaaatgtacacaccttagaattattgacatttgctcttgatgattagcatcgggagtgcaatccaaaattatagaaaaatatttcgcttctttcaccctcataagaaatttttattttatttttgaagcaatcaaaagaatcaatttgttttgaatattattactaaggtcgtgattatgaatagttcacttgtaactcgaaaaac

SEQ ID NO: 20145 - DNA, 493 bp, Arabidopsis thaliana columbia
caaccctgaactcgctgcagtctccgaacttgcaaacaaccaatcatgaacatcatagtagaccattaccggtgttctatccaccatcaccatttggtttcccctaaatttccattgtagattcttcacgttcacaaccacgatcccatcaacgcttatccacatctctggctccgctgctccattagagctctccaccaccacttcatgttcctttctttgttcgtcaaaccttgcccgagtcgaaaacgttttcttcccaaatatgctttcttttttaaagtatatgaacccttccaccaatgccggtcttgacttggtccgcttataagccttttgctttaaatctcccaacaataaaacaacctcttcatcagaaactactgccacgtaatagtctgacacgggttcggggctaccgtttccagccaattttgctgatcgaagatccaaaagacctccacaaagtttcctctacgtcgaatgactttga

SEQ ID NO: 20146 - DNA, 574 bp, Arabidopsis thaliana
cttatagagtagatgttctcagtctatatgtttggtctggcttgtgtatgtttgatagtgaacaacataaaatagtttagtttcttaaagattagatagtgtcaagagatgtttcttgaaagtcttaatttctacttgatgtttgaatctgtaggtacagagttgtttctcatttgctggagatgaagattttcttaaaaacgatatccgtgtgaaacctggtcttgacgggcttggtgcgctaggagatgcggggtggtacgcgatcagagcaactcttttagctaataactttgagcttccgaaaactgtgactgctttccccggtgctgtgttgaatgaagcaggagtgatactttcctgtggagcatctttgagttgggaagatggacgaactgcaactatatattgttcattcttggctaacttaacaatggagataactgccattggaacgaaaggcacactccgtgtacacgacttcattatcccgtataaggagactgaggcgtcgtttaccacgagcactaaagcttggttcaatgaccttgtgactgcgtgggttagtcccccg

SEQ ID NO: 20147 - DNA, 616 bp, Arabidopsis thaliana columbia
tctgctatattaggctggtgccaaacatgtgtatgcggttgaagcatcagaaatggctgagtatgctcgtaagctgattgctggaaacccattattcgctgaccgaatcacagtaagacttctaattcaatttggtcagtatatagagttgtgttatatgcatttgtctgatgttgttgaagcttgcacaagtgtaggtcatcaagggtaaagttgaggatatcgagttgcctgagaaagcagatattttgatttctgaaccgatgggtatgtatctcagagacgtacttttttttttgtgcgtctttttcctttgaaaattacaaaacttggaatctttagaccagaaaaaaccttggtcagagaaaaatatgcgtaaaaacatcactagtgattgaaagttccattaatcatttgaatgacaagtcttatgttttaaatcaggcaccttattggtcaacgagagaatgttagaatcgtatgtaattgctagggatcgttttatgactccaaaaggcaaaatgtttccactgtcggaaggtaaaggcaacctttgagagccttccttatttaattcttactatgtctcactctcatgtagttttacactgtagga

SEQ ID NO: 20148 - DNA, 608 bp, Arabidopsis thaliana columbia
ggagtacaagaatcgtgagcttcaaacaatgaggctacttgaccatccaaatgttgtgtctttgaaacattgtttcttctctacaaccgaaaaagatgagctttatctcaacttggttctggaatacgttccggaaactgtgcaccgcgtcatcaaacactacaacaaacttaaccaacgaatgcctctcgtttacgtcaaactttacacttatcaggtagattaatatccacaaagtgtgcatacaattttacatctcttattggaaatctttgtaagactctactatgtttggcagatttttaggtccttatcctacattcaccgatgtatcggcgtatgtcatcgagacatcaaacctcaaaacttgttggtaaatcacacactcatcaagtgaaactatgcgattttggaagtgcgaaagtattggtgagtttgatgaatctatctctttggggaaacattttgaagcagagagatcaaccatttattgatcaatgctggttcttgaaacaggttaaaggagacccaacatttcatacatttgctcgaggtattacagagcacctgagctcatttttggagcaccgagtatctacagcattgat

SEQ ID NO: 20149 - DNA, 711 bp, Arabidopsis thaliana
agcaagtgttcgaagagaaatgtaaattctgacctccagctctttctgttgaagaccaatagcttctacatgacccggagaaaattcgcgggcgtttagtctactaaactcaagctttccgccacatttacaaaactttgaaaactcctttgacaccaaatcttttctgtgctgaaggtatctgaagactgctgctagaaactctgatcttgacagatccccgttatcacatttcagtattttccttagaaacgaacccagctgcaaatagataccaaaaaataattgtaaaccctggagaaatgtctcaccattcgaaaagaattccatgaagagtatgcagagtaagtagtacctgagctccctgagaaactagtattgcagagaaatccttaactaccctgttcagcaatgtatcaatcacctataaaagtaaccaaaaactgagaaggtgaaacacgatatattattcgagtctttaaatggttgattcaacaggagttaaggttttcacattgcgtaacttacagagcaatcaaacataactcaaacatgtcttacctaccatttcatttaaaggcatatcattgatcccatcactctccttaaggtaaccatgtagaagctgaagcgcgaaatgatcaaaaagaaaagccaaggagattgcagtttcagattcctcagctgagatctcattagaaagatgaagaa

SEQ ID NO: 20150 - DNA, 1067 bp, Arabidopsis thaliana
taaaagataattaatgcaaatatagtcttgttaatgccaaagttttgtttcatgaaataaacacgcttctagcctttcatgatcaccctctttgtctctttatgtagtttttttttgtcgtttcttattgatgtgtgtttcttctcctctctctcataagtcataatacacttaatatgtagtcaataatattcctagtttcatacattcttgtttgcaattctttaatttttttttgtcaagagtttgttattcttatatctgcgaaattgtatatatttttaagagttaaatatcatagtcaaaacccgtataagcataatagaaaagccatgaaagctatatcgggaggtggaatcttacctatgagattatgtacccaatcaatcatcattcggagaggccacaaagaacaaacccgagtccgaaaccgatttgatcgatcattgtcgatgttgtaagaccctccttcgtctacgttactctcggaaacacctaagttaacctcaaaacgacaaatgggacaagtgttgtgaatgttcaaccaagacacaatgcagcttgaatggtacaaatgcaagcatttcaattcttttccttcctctccaacttcaaattcctccttgcatatcgcacaaaccttctctttcaccaaatcttcatccgtgattatcaccgtccttacagcctcgatggcggattgcgaggctggtggtggaccgatttgtacactaggcatgacatcagcgaattcctcgtcagtattataaactagatcatcatgattgaaccggttacttcttggttcgttgataagatggagagtgatccaatcggtatcactatcccaataaggtcggcttggcctcataatgtcaagctcatcgtgaagattgatctctctagaacagaaaggacatatgggaccatatagaccaaagcttcttagcctaatggtacggctacaatggcgacaatagaagtaatggaacgttcttgttcttcttgttccattcacaataactcttggacgataagcagatgtcatgtttcaatctttttatttt

SEQ ID NO: 20151 - DNA, 984 bp, Arabidopsis thaliana
gtatacgtcagctaataaagtcagacacgtggcatgtcaccaagaaagaagagcatacgtatgacgtaccgattgtccctgagtcaccacgtcgaacatccacgatgcaacacaaccaaaacgccctccggattgaactcgctatatatagagcgagctactaatagtcttcttcgtatatcatcatcaagtcgttgcgagtttgtttggtttttacttgtctagtgttttatataaacttgtgttgtgtaagtaactaaagagccatggcgtctcaacaagagaagaagcagctggatgagagggcaaagaagggcgagaccgtcgtgccaggtggtacgggaggcaaaagcttcgaagctcaacagcatctcgctgaaggtcattctttctcttattcatggttgcgtatgtttcaagttaggtctttaggctagagtaacgagattaatgtttgtggaatatttattatatgaagggaggagccgaggagggcaaactcgaaaggagcagttaggaactgaaggatatcagcagatgggacgcaaaggtggtcttagcaccggagacaagcctggtggggaacacgctgaggaggaaggagtcgagatagacgaatccaaattcaggaccaagacctaaatcaaacttccccacacggatgtaatattaatccggtttaaatctttccatgtagttatatcttgtgtagtttcctgtgcgtacttaagttcttgtttagtttacggatggtgatgaccatgtgtatgttttcgtctacgtaaagtgtctcgtttgttttccagtaccaatttctcttctttagtaagaagttaatgattgtggattctcaacatagtgttggatcaatcgtgatgtgtgaaatttggaagttccaaagtaaaaacaggtagagctaattcgactagaattgtcaaattgcatccaaagaaaagtacgcattagaattacaaatcaaaacta

SEQ ID NO: 20152 - DNA, 742 bp, Arabidopsis thaliana
catcaagagtttgcaggaagatatggtttcttattgtcagacaaaaaggtcgctcaggatcctctgagcgtatcaattgctgttctgaaacaatatgacgttcatcctgaaatgtatcacgtgggttacacaaaattgtacctccgcacaggacatgtaagcgattctttaagcagagatttagaggcatattcctgatgttgtcgatacaattcttatgtactcttcttcaaattttcatagattgggatctttgaggatcggaggaaaaaggttcttcaaggcatagtgggcttacaaaagcatttccgtggtcacttgtctcgtgcatacttccaaaatatgcggaaagtaacattggttcttcagtcatatatacgaggtgaaaatgcccgaagattgtttgacactgaagcaaaattccatgcggattctgtttctgaagcaagcacagatgagttgagtgcagtcatacacttgcaatctggtaagccgcactatcttctttggtaaactaaagattttggatagtgtttttgaggctcatcatcatttttctttgttgcagcggttcgtggatggttggctcgcaaacatttcaatagtatgcaaagacaaaaagaactacgcaatgtggcgacaaaatcaaagaggaaagctggcaggaggatttcagaagacaaggtacttgctatcaacatgaagattgtgtatgtctgaattatattattattacactttt

SEQ ID NO: 20153 - DNA, 520 bp, Arabidopsis thaliana
aatatgaaagataagctcttcaggtaaatcctctgctgccctccacacgacccaaccaataccagcatagactagtccatacttgtgaccactcacgttgatgctcttaaccaaaggaagcctaaagtcccattctaattcaggatagataaacggagctatgaaccctcaacttgctgcatccacgtggatcggtgtgttccaaccagtctcctcgtttttcttgactagcaagtcattgagacgtttcacgtcttcgaactcaccgttgagtgtggatcccaatatggctgcgacacagattgtgttctcgtctaccatttctgctgctttgtctggatccatcacgtagtaaccttcacttaggtttacttcctttagctccacctcgaagtaccgagcgaatttctccagcaaacctgaaattgagagcaaaatttctatttattataacggtctaactagtcagattaagctgtatatatatatacttacttgaacattggctccggtgacaatg

SEQ ID NO: 20154 - DNA, 1051 bp, Arabidopsis thaliana
ccaactttcgctcggatttcttccaaacattacaagggaatccgtcaattcatcgaatttcattctcgaattaaaacccaaaacgctacttcacccaattccgccgaaacccttcactgtctttgtttctcggttccatgacgggagaccaagaggtcctctctggagaggtaagaaactgatcggaaaagaagcccttttcgtgattctgggtctcaagagattgaaagaagacgacgagaagctggacaagtttataaaaacccatgttttcagattgttgaaattagacatgttagctgttatcggtgagcttgaacgacaagaagagactgcgttagccatcaaggtgcgttctttacgtgacaatttcttctgggtctttcagcttatgtctcgcttcagctcatctttagtttgatctcatgtgctcatgaagtgttcgacgaaatgcctgaacggagctaacattagggtagttatattgtttaagttttagaccatcctttatagatcatatacgtatattcttatggttttgtgtcgtttttgttgtgttgttgatgattggtttcttcaacttatagatgtttgaggtgatccagaaacaagaatggtaccaacctgatgtgtttatgtacaaggaccttatagtatccttagcaaagagtaaaagaatggatgaagcaatggcgttgtgggagaaaatgaagaaagaaaacctctttcctgattctcagacttatactgaggttatcagaggatttcttcgagacggatgtccagctgatgctatgaatgtgtatgaagacatgttgaaatctccagatccgccggaagagttgccgtttagggttttgttgaaggggcttctgccgcatccgcttcttagaaacaaagtgaagaaggatttcgaagagttgttccctagaaacatgcttatgatccccagaagagatatttggtagatgctgaggtttgtatgcacataactttactcttctatctcagacttcaagtgtttcttcaacctgttctttatgaatagtgt

SEQ ID NO: 20155 - DNA, 558 bp, Arabidopsis thaliana
tttttcttgcttaagctctccttatattcagtcacgaatctgaaaagctcccaaagtgtttccagatcaagactatcaatatctaactcaatctcatcatcttgttgagagagttctggagttctcttctttataatctgcacaactgcctctagcttgtcataaggtaaatcctggaggtcttcacttagttgccgcttctcatcaaacgtcaagtccctgtttgcagacgcctcttctacaagcttctcggggacaacaggtaaaactgcaggtttcactgggtttgtcatagattcagctctctccaaagtcctattttcaactactttaggaggaggaggaggagacagggaaggtgtaggagcgggtaacggtaacgcctctacattatgagtgtttgtcgaaacaggagcatggaaatcgatatcacggactggttgttgcttcctaataagtaactcatactgcgtttcaagaggccccatttctcttcaaacagattcaacaaaatctcagccatatgatacacatcatgccccacaggattatacagca

SEQ ID NO: 20156 - DNA, 445 bp, Arabidopsis thaliana
gatcgatcccccttctgttgatctaaatgcattgttttgtctgccgagccgggattggaagatgtggtgaaacaatgcagagggaaaaacctcttctttagcacagacgtggagaaacatgtatttgagagtgatattgtatttgtctcagttaacactccaaccaaaacacaaggtcttggtgctggcaaagctgctgatcttacttactgggagagtgctgctcggatgatcgctgatgtctccaaatctagcaaaatcgttgttgagaaatccacggttcctgtgaggacagcagaggctattgaaaagatactgacacataacagcaaaggcatagagtttcagattctctctaaccctgaatttcttgctgagggtactgcaattaaggatctttataacccagaccggtgtgttgattggtggtagggatactgcagca

SEQ ID NO: 20157 - DNA, 470 bp, Arabidopsis thaliana
catcagatttcaaatgatatatctgtttcctcttaataccgctttcttgtttcctggctcgaattatttgaccaatatgctcctctcgcttcttagcctctcaaactcaggttgtcgaagagaatcaccctgaatatttcctggaaacaaaatttcgctttgagttactagacaataaaaattgcaagaagtgattgctacatatgaagatacagtagacacaacttcacaagccaacttaccttattatccaacattctggccaaccttttcttctccttcaggtcactcttaagacgctcaacctcacgctaaacaaaatagaagagactataaggacctttttcgcctaaactcagaaccaatatatagagatgcaaaactactgtaagaataaatttcacctgttgctcattttcataaattttcctttcctctagcagtcgttgctgatatacaacacttggctg

SEQ ID NO: 20158 - DNA, 538 bp, Arabidopsis thaliana columbia
catccaaatatatgtgacaagatcaatacaacatgttctgacgttagtgcattttcctccactttatgtgacggttctgattctctaccatttgttgcagctcggtggcccaactttctctgtgtatgctctgttttctcatccggctctgttcaaattcattggtcccagtggccttctaaccagggaagcactgcaccaaagtggtttagtacaaagaaaggtcttttaggtgcagggccaagtggaattatggctgctgatgctattataacagacagtggtgccatgcatgtagcaggagttccaattgtaaacccttcaacaattgtagtatgggaggtgaccctggccctggaaatggactccaggcgactccaaaaatctctacaggcagtcgtgtgccaccatcccttagttcttcttcttggacaggttttgctcctttagctgcgtacttgtttagctggcaagaatacttaatatccgagataaagcaagggaagaagcctcagatcaagattccagtgatgctata

SEQ ID NO: 20159 - DNA, 600 bp, Arabidopsis thaliana
tgtcggagattcaaacttggccactacatgaagattcctccgagatctatgttcatcgttcaactcgttgcgactattgttgcttcaactgtctccttcgggaccacatggtggttgctttcttcagtcgagaacatctgtaacacagatatgctcccaaagagtagtccgtggacttgccctggggatgtagtgttctacaacgcgtcgatcatttggggaatcatcggtcctggaaggatgttcacaagtaaaggtatataccccgggatgaactggttcttcctcattggcttccttgctcctgtcccggtctggttctttgcaaggaaattcccggagaagaagtggatacatcagattcatattcccttgatcttctcaggggctaatgtgatgccaatggccaaggctgtgcattactggtcgtggttcgctgttgggatcgtgttcaactactatatcttcaggaggtacaagggatggtgggcaaggcataactacatcctctctgcagctcttgatgcaggcaactcggttatgggagtgttgatctactttgcgttacagaacaataacataagcttaccagattggtgg

SEQ ID NO: 20160 - DNA, 823 bp, Arabidopsis thaliana
agcaacaaaaaaaagaatgcccagttgctgcgtggtatatgatgatgcagtgatgggtaatcagtctggggaatacatactctatcgacaactctctgcttccaacttgggcaccatttttggctttcgaattcgaatgaatgccacatgcttcatctttcgcgctagagacgaacaacacactctcaaaaacattatctcaggttttttcaaaagagttcctctgagttgaatttgttccatgcttcctgtttattgtcatgagaaaagagttcaagccagttaatatggattttgtacaattgtgcggttcttctagtcatccatgaggagacgcagtctaagtggatttccttggttcctttggtggcagctgaagtagcagtgatggatttatttccagaaaaatggtgaattcacttaccttgagcatgtcaaaaactttctcggcaatgtatttctgctggagattggctcctttttgctgaactttatcagggtgtatacatagagtggccttcctgtaaactttcttgacagacgcagccgtaattaaatcagtcaatgaaacaggttgccaaccacattctggccaaagaacctgctcatttacaacatcagaagagattatggactcataacatcaaaggtacacatgaacttaagaggtgcaaataataaggaaaacagacaatacgacttacatattgtaatgtcgaaagcagagctcgcaggtttccctccttccccgcaccccaacggttttatctcaacatccagagtcaccccaatcctctgaaatccaggataagcatgatgattg

SEQ ID NO: 20161 - DNA, 815 bp, Arabidopsis thaliana
ttatgttgattcgtaatggcgatccttctgttaacttgtttgtgtctttttaccctatcggcaatggaggccatacagagacagaggttacaaatgttgatgcagctcataatttttacgaagatataaatgtagatgaggaggatgacatagatgaaggtgatgaggatgaatatgaggacgaggataatgaagaggacgaagatatggatgtacatgacgatgacaccgatggtgaaagccgtggaagtacactcgaccctacagtagacgatagtgaaggtagtggcgaagattacgattacaataaatggggtgacatgattgtggaacaatatggaaatggtcatgttgaggagggcgtcgtgaatgacactcaacaaaccgtggaacccccaggggaactcactcgtctattggcatcgtgtacgtcgacgggtacacatgtacctcatgtagaacccactggtgttttggttgactgtacaccaacctctgctctatccccgacgtgtcaacatggtttgtaccaatgtacgtacactagagtctgtgcagaggagacaagatgcgaaggtgaattagttgagcacacggatgatatagctgagaacgtaactggagatgatggtatagtcgtcctagaaggggtttctgcaagtgggttaaatattgaatctgacgaccgtctagtgacaacaggtgaagctaagatatcttaacaagttaagagcaagtccaacggtgcatcttaacacatatcttagcataatatcttaggtttaagtaattaaaattaaatcaaaaatgactta

SEQ ID NO: 20162 - DNA, 594 bp, Arabidopsis thaliana
actgcgtcccggagactgtacctggagaccgtggggaagacttgaagcatggcgggaacgcggtggagccactgatggtctaggttacagattcgaactcatcccagacggatcaagcggtgcaggaatcgtgcttgcggaatcaaccataagttctcacagaggtgggaaattctcaatcggattggggatcgtcgccttcttcatcgtcgccaacaagtgtggtgaaccgatcgagaagccgtagaggtgggagtagtggaagcggtggaggagcatcgccggcgaatagtccgagaggagggagcggagattacggttacggattgtggccgtggaacgtgtacaaagggtttgtgatgtcagcaagtgtggaaggtgaagggaaatgtagtaagccttgtgtagaggtgagtgtgcagcacgttagctgtatggaagatgcggctgcttacgtggcgctttctgcagccattgatcttagtatggatgcttgcaggctgtttaatcaacggatgaggaaagagctttgccatgagtcactgagctgaagacaagacaaggatttttattttttgtttctgaaaatttaga

SEQ ID NO: 20163 - DNA, 311 bp, Arabidopsis thaliana
cgtatttagttgaagtttaatccttataattaataaatcagtgataaaagatgaagatgtctagtttagaatatcgatatattgagattgatcaatttgattaattgacaatgtttcatgagcgttatttattaggaacgaatttggttgtattgttgatcggtgattgtggtggctccgttgtagctcatgatcttgtagcgtcattgcagtcaagtcgtcgcggtatgtttcaggccgtttatttcttcctctgcacgcgactgaaacaatcccggatcttggagctttgtaaattgggtcagttcacc

SEQ ID NO: 20164 - DNA, 557 bp, Arabidopsis thaliana
aagaacaccgacatggacagttttacccttccggaccaccctgatgccacaatctttgacaaattttccttcattcaccatgcatccagccacacgaccacttccactgctgaaagtagctcgaacttctgctgagccaattgggatttgttcctatcaaatatctacagccacatgaatcttcagtttcaaaactccaaaaaggctcatgaagtgagactaaaacctatgtttttatgataatctatgacatgatacagaggtttccttttcaggcaattcaattattcaacccaacaataaaaacagttgttatgccaactcatgtggaaagaagacaaaacaatgatgagaaatgctgatcagattaggcaataacaaaacgcttcaaattgctaaagaaatcaatgctaacctcaacagactcaagaagtccttccattgcgtttccacatcgtcaataagctcatatataactctatatagtcggatttcacacctttgtttctgcagctttcttacagaacagacgctttgacattaaaccaaaaacgata

SEQ ID NO: 20165 - DNA, 1536 bp, Arabidopsis thaliana columbia
taagagaatagagtttagaaatattttctttaaagggttttgctccaagtacaaaagagaaaaggatattagcctctccaagtataagtctaaacaatgacctttaaaactatatatatatatatatatatatatatatgacctaaaacgttatgggccgtttttagaaataagggaaagttctgagccaaattttgaaatcttcaaaacttcaataagctgcatctttgaattgtcgtcaggtattggtgtcgctcgataccaggggtggtgtcaatcgacactgcgcgccacgctcttgtctcatgattgcttctgcagcataatttctctcttttactcaagaatgttccataatctccaaatgcatccaaaatatgtaaagacctgaaaaagattagaaaatacactagaaataacaaaaggaacaactataccttaatcatagctaaaagaagtgaaaatcgggttatatcagccatcataattctagtaccaaaatccatatgcttagcaagtctaatcaattcctaaccaaaatgtaattctctgcaagcttacacaacattctagattctatacctaagtttcacaactatatccattaggctttcatcgctgggctcatcaatcaagctaatattcaagaaccttctagactcattcatgtactataccatgataactcgaccattctcttttttattctttctctcccccagacttattcttttcggagataggacaaagtagtactcgctccatcggatagatatcctccgcatatttccaacctttgcaattgatcattccttagaatataaaataatgggatcaaaggaaacattattaaccctttatactacaggaaacactctctctttttttttatcacagaggggaagataataattctatatggtctcatatatcaggtatgaacaaggagtcaagttatatgaatattaaccgttttgaccaagggtaaggaagagcaatgagattagcgccagcctcaatggattgtattgtaaaccaggatatcctaaaatctgtcgatttgccattttgatttttcaatagtcgaacctgcagcattaatcaaccaggcaatattcttaagaaatacagatcataatttctaactaaatcttgactcaataaaacgagtcaaaaagaaaaataagagtaataataagactcaaaaagaaaaacgtagttagtaactgcgtcccctacacttaaacaacattgtccctagtggcattcaaatacaaagtaagcgagaaaaataaaagaaaaacgtaaaatactggataattaaaaagaaaatcataccagtgagttacctcccactaagcgcttatttatagtcaatagtttgactttgtagggtttacacattaagtggataagaaggtgacagtaaatgcttattaacaacacgtctcatcatccaaagtggcgtataggcagttggcgtgtgaggttgacctaggaagtgaggacatcagcagggcatgactcaggtatggg

SEQ ID NO: 20166 - DNA, 877 bp, Arabidopsis thaliana
tcccattactagctgcatccaaagccatctgataatgccaatcaactcctctgaagaagatacctaacagctgaacctcactgaaaccatgatgcggacaatctctctgatatcctctgaatctgatccaaacggctttaaatgcttcagttgcttcttgagagaaggtagagatcttcattctcagctcctcagaccttgcatcattataaaagttattgagaaaagcaacctttatttctttccaagttgtcaaagatccaggcttcaactgcttaagccaagaagatgctttcccaacaagagaatatgggaagagcttgcagggaagatagtcataagaaacaccttctgccttattgctagaaatcaagtcttcaaaccgctcaatatgatccataggatgttcttgggaaagaccatggaaaggatgcatgctcacaagagtatataatgtagggtttatctcgaaatcgcttctttcgaaggtaggtggttggattgtagaccgattggaatagaatagatccagtctgttgtagtcaccaagagtcatccgtcgtccatctgctctgatttcttcttggtgtcgatcgacaccctcggcgatttatagtatcaggtttccctgttcatctattttctgaccctcttcgttgtatgcctgaccagctctgtcgcgtaacactccagcagcatcaggtattactatcagcatcttgagttgcgtttgaattccttaaactcttgaaacacaagaagaaaaagaaataaaaacgcgtaagtaacaaaagaaaagaaaagcttagactaaattctacacctaatctaatggtgaatcgaagagaactttggcaacggcgcaaatttgatatga

SEQ ID NO: 20167 - DNA, 882 bp, Arabidopsis thaliana columbia
atacggtcataattgcgacaggtgtcacatcattaattatgggaaaattccgagatcaatacaatcacgtaatttaggcgggaaatcacaagaatcatttggtgcaatctttgcccttatagcattaaagccttccgaactggagtagcacttcgaaagacttggggggctaattgttggtgtcggatcccgcaccatgggctcggatccggccaaagattgctacgtgggtaaaagaagcccataatataaaaggccaacaagtttcctcgaagtgagagtgtggatgaggtgctgacctgcgaagtgagggaagaatcgaagtcaagattactcggattgaagaggctgaaggggccaaaacgtggagtcaagaaggcccggagtggattcaaatttaaacgttcaaataattaattcgaagattggaaacggatgtgtttaagatagaatgattgagattaaataagaattaaatgtattcttttggtatatattgtgagccaaagatcatgtaaagacacacgcatttcttggtgcaaattagctatacactttcttttacaatactcatagttatctctataatcatctatttattttctagtatatttgtcctcaagaataatccttccgactgagtaaataaatacttgagtgtgaatccgacatccacattttggcgccgtctgtggggacggaggattcttgagtcatcagattttttctgtgcattacataccagaagtgatccgcaatgtctggagaggatgctaccaacgcttcgatagccaggaccctcaagcgtggaaaaaagagttgaaacattgcaaacaaccacaggtatcactcagccaagatgttagtaccattcagtctcgt

SEQ ID NO: 20168 - DNA, 875 bp, Arabidopsis thaliana
cacagtttcttcgttgggatcgaaatcgtgccatttgagttagcctctgtatagatcgatggctagcctgagaagagctctgctcgtagcagggaagacgaagatcaacctagaaaactgccatttcatcacctgaatcaactacaacggtctcagcgtgaagcaactacaagagctccgtggaatcctccgtgaaaacacaaacacgaagctcctcgtcgccaagaacactttagtctacaaagccttggaaggaaccaaatgggagtctctgaagccatgtatgaagggtatgaacgcttggctattcgttcaatctgaagatatacctgctgctttgaagactttcatcaattttcagaaagagaagaagctctacgataacaatttaggcggtgctgtttttgaggagaaattgtatgctcctcaggattacaaggttattgagacgatgccttctcgcgctgatgtttatggtatgatgcttggttctttgcattggccggcgttagatctcgtcaatgcgttgcaggccccaccggcggcgtcggaaaatgagacagttgttgcatagaaggaaggaattttccaatttcttgctctaaaaacgcttcaatttatgtctccttttgtgtttgtgcttccggattaaacatatagtgtcctatcaaaaataatttgttggaattctcttagaaattgctattatggatttactctttgattttgagcttcgatttcggaaccagtgttactggattttgttgtagtgtattgagcttggcttatcttcttctgttgtttgctagaagagaattggtgaattagtaatacttgttgtggacttgcaatcctctttgacaccttaatgactg

SEQ ID NO: 20169 - DNA, 890 bp, Arabidopsis thaliana
aaaaagtaaatatactccaaatttaaattgagtacaaaaagaaaaaggaacttcgtggtttagtaaaatacaaaccaacccaatgagtttaatttccttttcttttttctttatgtaggatttgcacaacactactgttttatgagagaaagagagccaaacaaccactgctaaaattcaatgaaatcccatagtagctttgaaggcaggagcatccggaggcgtgtgaaggcaacaccgtcaacgccaatacaccacttaccgctgccgcaatcgctcctaacacaaatgctggaatgtttccaccaccgaatagttcgtcgaatggtccacctcccacagatattaccatctatatttaaccaagaaaccaaatatatatattagtcataatttttcctaaatgaaaataagtaaaactgattttaaacgggtttttacctgagggacgacaatggctagattcagaacacctagggaaagtcctgtggaagaaaagataaaaagctttaggaatcaagattacaaattttcgtaggctatagaaattgtaaatttggtatatcgcgtatatatggtcactcaaacgaatatataaatattggttacttatagaatcttctcaataagttattaaattacgaatctgcacgtattaaatgcttttagcttttttaggtcccaacactttaagaagattgtcgactttgattatccaaaacaaaaagggtaattttagattaaataaaaagctcaaaaatagaatatttaccttggccggcaccggaattggttgaaaatatggaagctagtgcaaaaggaatgctaaacgtaatctgcagttaataaaaatgaaaaaaaattcatcaaattaggttattgatttactt

SEQ ID NO: 20170 - DNA, 1200 bp, Arabidopsis thaliana
gactctacatgtctatccactgatccacaataactcgatggtgcatgtgtgtgtgtgtgtgtgtgtgtgtgtgtgaacttcctggctgtaataaatttaataaatacttaaatagacaggcgaagtcctcgtccacttttctacacctagcatcaatcatcaatgtgccatcttattgtttcaatttttcttaccataactttgtccttgcatgtaacttttccaattaaatacaagtctgtcttttattaacccccgagaatttactaaatgatattgacataatctattggacggaatgagttgtcaaaaaacgagagctgtcttttcctgctccactgtcctcttatatatcccacaacaatctttgctacattttcatgcatttttaatcactcctctttctaactccaataaaaacacaataatggatcttcttgttatgctcctctctcttctcgtctcttatctcatctcaagatctggaaacgcatagactccaagagagaccaaaactgctacatcttggactaccaatgtcacaaaccttccgacgatcgtatggtgaacactcaattcagcggtgatatcatccttcgaaacaaacaccttcggctcaacgagtacaagttcctcctcaaagccatcgttagttccggtatcggagagcaaacttacgcaccaaggctcttctttgagggccgtgaacagcgtcctacgctacaggatgggctctcggagatggaagagttttacatagacaccatcgagaaagtccttaagagaaacaaaatttcaccttcggagattgacatcctcgtagtcaacgtctcaatgctcaattcaacgccttcactatctgcaagaatcattaaccattacaaaatgagagaagacataaaagtcttcaacttgacggcgatgggatgtagcgcgagtgttatctccatagatattgtcaaaaacatcttcaaaacatacaagaacaagcttgctcttgtcgtgacctcagagtcacttagtcctaactggtacagcggaaacaaccggtccatgattcttgccaactgtttgtccgctctggtggctgcgctgttctcttgacgaacaagcgtagtctgagcaggagagcatgttcaagctaggtgtttggtaaggagcccatggaccagagacgattcatcacgctgtggtcaaaag

SEQ ID NO: 20171 - DNA, 1022 bp, Arabidopsis thaliana
attagaagtgaacgatgtgtacgacaatatgatagaggacactaaattaacttctgacaatctccaaattaaatgtagttgcaatcatatatctaagataggtttgttcataataattggttgcaaagaaccagaatattgttcttggacgattaaagcaagtgcacagtaccggcctcccgcttgccgtgctcgtagatgtcaaccgagtatttctgacggtagaaaaccatatctgcttctcgaatggttgtcaattccgaaaaagggtgtccaaacgcaagcaactccaagaacttcatcgtgtatgacccgcaatctcctgtagttgggttttgagcaacggtaggacaacgcacatactcaaaaggttcaactgagtacggagaaatcaatacatcctggcacatcgctctgactaagtacggtatcatttcgcaaataggagtcattctcgccttcacagccgactcccgcgtgtgcgatattaaagcgtcatacacagttattagccgttcattaaggttgattcccaaagcaacccaatgttcactcttccagttcatcggagcatacacaacatcgacatccttcatccacttcatattgggttcacggtttatgtgaactccattagcaatgtcggacagtaatttaccccatttgaacccgttcttattaatacacttcttgaagtcgcccacccgcttggtaagaagatgcgtcagcatcatgtccaatacaatacatctgtttgctatcatctgttccccgttcttgtgccacatcaacattgccatcatttctaaatgctgaaatgttcaaaaaatatatcagtgtacatacacttccacgaaaaatttaatcatctatgtacaatttataacaaggaatgtacgtatataaatgcaacgtaccgtactttcgacccattcaccaggtgttagaaggttcgcaaaaaagtcgttgggcacttttggaaacccgaaaagagtgtgaatcctgtaaaatccagaaaaata

SEQ ID NO: 20172 - DNA, 562 bp, Arabidopsis thaliana columbia
tttccctgagaagaaacaaatttgggtcagtcatctttttccccttaaacaaaagtgttaaggtcctgaaagagcgtttatatatgcaagcaggcaacttgatgtaaacttactctttcaagaaaataaacggcgttcctgggaagtgtatcgcgaagtcttttgtaggtggcttgaatagctggtactctccagagatctgcaacggtttgagcattctcacggcttgatggtggaaatatcttcaggtttccgtcttccttttctttcaaaacccaatctgaaaaatgttttagtctcgggttgatcgagttacctggttttgcactggtttcatctcccacattgcctaaatcccaagaactcgatcagtcttcctcaataatcaattgttaactgatgtttgtattagaatatgaatgcatgcacactctaatagtttgtacagtcaataataattacctgaagactggtcattgctcatctctttttcaaatctttcatgtgcctcaagaaccattgccagataggtatagagatttgtttggattatgaatttgat

SEQ ID NO: 20173 - DNA, 1084 bp, Arabidopsis thaliana
gagctttcgtcgtttttgtttaattggcttgaaggttgggtcaacgtttaattcatggcaagcaacctcgggatctatgccgaccatgtcgtctattgaccaggcgaacgttgtgacgtttctcttaagaaatgttatgagctcggtctttatatcttcagcaagatcaacgccgatccccacacaccgctctgcgtttgagtcatcgatgttaacttgaactaccaattctctggtaggagaattttcttcttctgttcttttcttagatgcgggctcatcactgctggcttcggaagctcgctttttagtggatggttcggcagattccttgggttcggcgtcctttaattgctataagtcgagctcctttcgaagtttgcattcaattaaaaagcacgtacgagctaagttttggtttcccttatggtttcgatgccgacgcttgttggaattttgatgcactgatgatatgacgaaggaatcgcctgcatgtcgtgaatccacagtgtgcccaggattatgttgtagattgctggcttatccacgactacgaacttatgccaagttgccgtgcctcccagatagatcggcaatttaattgttccgttcgtcatcattgtgttcccgtcgaagcctgttaaggggcggactgatggcttaatgtgacgttcatggacttccattttgtgcaggacgtctttgaatataacgtttactgaacttcccgtatcgattaagattcgagtgacttcactttctccaatgtggagctcgattaccaacggatcattgtgcggcagatctacgccgagaaggtcttccgaggtgaaggttagggggaccatctcctttgccgtaggtgacgaccataaagtggcggctcctgacttaacgtattccttgattgatcgtacagagtcacggcaagcagttaggcccccataatcatgttaaccttcggcggggaactggtgcgtcgttatgttgttgttgatcgttttctcggtttcgtttgggggggtcatgtctggatgacattctcctcattgattggtggtcttcttgctgcaggcggtgtgtg

SEQ ID NO: 20174 - DNA, 569 bp, Arabidopsis thaliana columbia
agacttgtctctggctgtaaatttatgaaccttgccgtccatctcaatccaactacatccagggtgtttctccattccacttgctttcatttttgccctcactttttctacatcgttccatcttccttgttcagcaaagacattagatacaagcacaagatttcccggattcttaggttctagctcaaggagcctctgagcagcaatctctccaatttctttctctgagtgagatcggcatgccgcaaggagtgcacaccagacttctgcagtcggttctgttttcatcattttaacgaattcaaaggcttccactacacaatttgcacgacccagcatgtcaaccagacacacgtaatgttcaggccatggttccaattcatactcatgttccatgatcttgagaaaccctctaccctcgtcaagcagacctgcatggctgcacgcataaagaagtgccagaaatgaaatgtgatcgggcgagacgttttcgtgcctcattttatcgaacaactcaacagctgcttttctgcagcatgcattccatatgcattgatcatacttgtgta

SEQ ID NO: 20175 - DNA, 596 bp, Arabidopsis thaliana columbia
tcttgaaaccctagatttggttgattaaatttgggggtttctcttagattgtgccttgtgttgctgctagttcatgtatctttggtgtttgattagtagaagcttgttttggtttcagttttatccgaaaagagccggtactccgagaaagacggagattgtgtttgtggctccaacgggtgaagagattagctcgcggaagcagttggagcagtacctgaaggcccatcctggcaatcctgtcatctctgagtttgagtggacaactggggaaactccaaggaggtcttcaaggatcagccaaaaggttaaggctacaacgcctactcctgacaaagagcccctcctgaagaagagacgatcttctctcacgaagaaggacaataaggaggctgctgagaaaaatgaagaggctgctgtgaaggagaacatggatgttgataaggatgggaagacggaaaacgcagaggctgagaaggagaaagagaaggagggagtgacagaaattgcagaggcggagaaggagacaacgagggtgagaagactgaggctgagaaggtgaacaaagagggtgagaaaactgaggctgggaagga

SEQ ID NO: 20176 - DNA, 592 bp, Arabidopsis thaliana columbia
gtaccctacttagacctcccgttgaggctgctcttacatacatatccttggcacaaaacatctccgacaaaaacaacttattcatcatcatataaaacttataattacgtcaaaatatatcataataaatttacgaagacccaagcttaaaacttttgacgtcgtcaaccaccgccttcttaaacaaaggcacatcagtagctccgagtatcatgtgatacccacgtgactttagatccacggctttgtcctgtgccgtcgccatccctgccaagtaagctccgccgttagccggatcagatcccaaaaccgccgtctcagccaccctcatgacagacttcactttcgggtttcctggatcgtgaagtaacccaaactagcactcagatctctcggcccaataagtgatgatggacttgggctttctcgaagagagataacgtgttttttagtaaatctacaatgaatcactaatttgttggtgttaatgtaactagtttgagacaaggtgagacaaataattcagacctaggtgcaaagttgaaactagttgtatccgtgtatgtgacaaggaaacttgacagtgtgaagg

SEQ ID NO: 20177 - DNA, 574 bp, Arabidopsis thaliana columbia
gaacctgtcagaaacgacagtatgaggaatccaagagaaaaagcctacatacttcatatagttctgaaaatacagttcttcccgaactttggtagtcagctctgtgacaagctcagtgtgtttcagcttgagatgcttgtacacaaattcagcagcatgaaacagcttcgtgcagcccttggctccacaaccatatttccaaccatacttctcatctctaatctttcggacatgtggatctaaagcttcagtagcggcagatctatcttctctttggcagccatcacttccaagggatcttgacctttcaacctctcttgccaatgagagtcgaatttactttcattctcatctccttttgcatcagaaacttttccttcagctctcacatgccgcaaacccttagcttcatttgtttcaacctttccgtaatagtccagaccatgaacacgccatagatatgtaacaagcgtgtcaagtaattcaacaccctcaaggcctttcacagatgtcacccccttatgattacaactggaccagtagaacactgtgtactttctctactgattttcag

SEQ ID NO: 20178 - DNA, 379 bp, Arabidopsis thaliana columbia
cccatcaaaccatgtcagtgttcaaagtgtataagattttgtttcaatgcattgttcataccgagagtctgttgcgattagcctgttcacccattgtttgcaaaactataatgctgaaggagattaagggtgatggagagaaaggtaagggaaatgaagattaaagagtagatgtgtatcttatcttgcatttcttgagagctttttgcgaaaaatgctgatatcataccgccaatacttaaggcataaaccggttggattgcaccaaatgtagttgctgatatgcacccgacgagagaagcttccactcaggagaaacaaatggaagaagtcgagtgaatgaagttgaagggatattttcattgatcttggttgtgtg

SEQ ID NO: 20179 - DNA, 613 bp, Arabidopsis thaliana columbia
cgtgtggagaagatatgcttctaagcattattttgttaattgtttgttgtcattaatcttatttaatatcctaaaggtattctatttttttgctctttgcagtcaagtgatgctgctaatgtagtagtagccatccttgatttttggcgttgctggaaaaatccagaaagggagagcttggtaactcgcctctttacctcggcggaaaataaaagaatgagttgtataaaatgcagaaggattacaaattatccacagcaaagttgttatggcattgttacggcagcagatacaatcagagaactgaaggtatttatcatttatcatcctcgttgtctttccagcagaaactgcaggtacttccccttatatagttgttttgtgcttaaacacatgcagtgtgctttggggaatagaaattttgtagatatcctaaaggtgatccgcttgagatataaaatggtatgtgacgcagaaggttgcggaaagacgaactctgttcagcacatttcaagtagatgcccgctatcttcacaatcggtaaggttttgcccccatgattgtgatgttttttttgtaccatatcatatatttatggtgggtgtttgtgggt

SEQ ID NO: 20180 - DNA, 923 bp, Arabidopsis thaliana
tatcgttttgctcactggtggtgccgtagtccttgcccttaactctgatagtgacaagcttgcaaacgagacacacaaggaatatgttgttgggttcatcatgactcttggtgcagctcttctctatgggtttatattgccacttgtcgagctttcttacaagaaatctggtcagcgaatcacgtatacgctcgcgctcgagttccagatggtcttatgctttgctgccacttgtgtctgcctcgtggggatgctagccgctgcgatttcaaggtaaaacatgctttgtttattttcaagaatagggtttgagaatcaataattgggatctttgactttcttgatccaaaagcaagataaagatttcatttttaagccttttaaaccaagagggtacctctggattgtttatggaaccctaaaaggaagatgtttgaattttgtttgggaagaaagagtatgctttttctaatcaagaatagggtttgagaatcaataattgggatctttgactttcttgatccaaaagcaagataaagatttcatttttaagccttttaaaccaagagggtacctctggattgtttatggaaccctaaaaggaagatgtttgaattttgtttgggaagaaagagtatgctttttctaatcaagaattgggatctttgaatttcttgataggataatgtttcatttggcaggtgatagcaggagaagcaagagattttaagcttggagagtctttgtactatgtggtgattgtgttcacggccataatctggcaagcattttttgtgggagctattgggttgatcttctgtgcatcgtctctggtctctggaattatggtcagtgctctgcttccggtgacggtgatcttggccgtcatttgcttccaggagaagtttcaggcggggaaaggt

SEQ ID NO: 20181 - DNA, 523 bp, Arabidopsis thaliana columbia
ctttggcatgcttctgaagaagttgcttatgtcgagcctgattctcttctgacatcctgattctcctagatcggatttgtgactgtacacgagagagcgtctgcatacatttaagagtaattgcagcttgccgttgtacaaccgatccttccatcagtaacttaagtctttcctgccccctcatcacctgcgattctcttcttgcctgcattggagaaaccatagaagtaaaacgttacatttgaaaaagaaaccctgttctctcacattgtatctcaaagatagaaaaaattcaaccaaaggtataatgcatgattgactaagcagacaagttctgatcaagccacaacataccaaatggcccctaaacgtagactggattaagatggcagctgcttcttcctttgacttgcctgcacatctattagcaactatagcttgatggacagattcaggagaagatggaggagaatcacaagaccatgtgcacagtagcagtccagaactgaagaaggagggtcag

SEQ ID NO: 20182 - DNA, 605 bp, Arabidopsis thaliana columbia
gaatcctcgacgagatggttcggcacgagaagctgaaacacatatttgagaagatactttatcacccaaagaaatctgacatgaataccagcttcttctgattgaaatatcatttctctctgttaatcccactctgagactctaggtgtttatattacttaacttccagctttggaacagatcactctagtaatatgtaattctgtgattcaatttcttctagttaatgaagttgtgtattttccaaggctatgctaatcgaagggaacaacctttagtttgaaagattcttttgcaggaagtaaaacttgagagatttacaagacataacaaacaacaggtacttactacaagatgggaaggaccaacataactaaaaccgcggctgcgactctggtcaacactcttgaagatccaggctgcaacctcgttgaatctcctgtatcaatcattacagggaactcgcaaagttcatgagatggatcttcatgtgtgatcaaacccaaccccaagaaatcgcagtcccatgttttctgatcgtgcatctgataatacatattaaagggatatgaaacatttcgtgtagcagtgagatggttcaagag

SEQ ID NO: 20183 - DNA, 421 bp, Arabidopsis thaliana columbia
ctcttgcaatgtcgtcattaaacttgttgcattttgagtaaaaccagtcatttctaccaatataatagtagtattctcatgtccttggtagaattttggcaacgaccctgtagaaataacgaaatccgggttaactatttgaaccaatttaaaccgaccaaacgaacagattttaatttttaacgtaccattactgattctggtttgcatgtacaagacactaatcttgcttccatcttcatagtaaattccaattttctcgttgggattcttcgcggttatggtaacgttaaatgcggtggataaactcaagtcttggtttagttgaaaccgggttagctgtaaccaggcaatattgtaatccggaaattttggtctaaatacaaggtagagtataccaacgatcgctcctacgatgaca

SEQ ID NO: 20184 - DNA, 519 bp, Arabidopsis thaliana columbia
tatcagcaaaaatatgtctgaatagcaagaccgataccttgctgcagggattcttggtgtggcccacggtttccagaagctgttgatgtagcattctcagctgggacaaccagtgctctgcaagtgggacatgtgttctgtcgttccaaccatgaccgaagacaatgtacatgaaatagatggccacatactaatttcttcgctgaggtcatttcttcacgacatatgatacaagtggcatcatttctgcaaaccccaaataaagaaatgtgattgatctagatatacaagcataattagttttaagacactgctcaaaagatatttagaatatttggaaacataaatcttgtgggaatatctggaacttacgaactaagttcttcaggagttgcatcaggaaaccgatcattcatattggaagtgattttccgatatcgaaggtaatcagtcacacgaatcttgaagtttctgaacgtttcgtagagctcccgtattagatgcaagggaaggccatag

SEQ ID NO: 20185 - DNA, 547 bp, Arabidopsis thaliana columbia
cagttcatttatgatgtctttacgtattttcattgtctactctcagtaacttgttattgggggtttagggtttttgatttagataatggatatcatttagttattattgtgattctaatacttgtgtttgtgttgtagaaacaagggatagtgaaagctgaagagtgggatttgttcatggagattcttcgtaagcctttacctgctgcgtttagggttaactccaagtaatgttctttttcttttctcttcactttggtatttgttggtagtttcaatgaggtttagggtttatggttgagttaaagtttatatcttaggattggctcaatattgtaattgctaaccagatgcttctttcccctcttctatgaattgcagtggccaattttgcgatgagattatatcgatcttggagaatgactttatgaaatcacttcaggctgaggtaaattctgtattttatagtctctgtttcctttgtaatttaaaagctatatatgtatctctcattggttttggtttccaggccatagaaggtggtgaa

SEQ ID NO: 20186 - DNA, 474 bp, Arabidopsis thaliana columbia
  unsure (1)..(474): unsure at all n locations
cacataatcaaaacttttgagcccacctgaatctctctcaatctactgctaatgtatccggcatttctctcagcgcttatgatctccttcactgttaacacaccagtatcttcagccttacctgcaagagaagaagacacaacacattttaaacataaccaaacccaataatgagctttgcagagagaatagatanaataaaacagagctagaatatgggaaattcaacaaaccatttctcttctccatttgcataagcaagggaccaattctctgacgaattgtgtacattgtcctaccgtactcagctgcaggccaaatcgctgttccaaatactgcactgcattctcaattttcaaagttccaagtcaaaactttcacagtctctcaagctaatcacattggaacatgaaggagaaagaacaaaccttgtggcaataacgtctatcgcaacagtgaactttccggttttgt

SEQ ID NO: 20187 - DNA, 401 bp, Arabidopsis thaliana columbia
cgtatgtctctcctttagctctcagaagaactagaaaggcactgatcagcgcctcgtttgcctcattcagcaaaaactcaagagatgattcagcctcagtttcagatagatcaacccgatcaatcaaggtttcaatcaactgaaagaaaaacaacagaacagagcaaacgcagtatgagaacatagtaaccccatgatttaaatctctctcttcaaagccattggaaaatcaccaaaagtaaaactcttttaaaacctataaagtagtacacttttactcaagtcaataaaacccatcaagcaattaaaatgaaattcgaagaacacacagggccaaacatgtttagtcagcatgaagccaataactcaacccaactcagaaatacagatacagatatata

SEQ ID NO: 20188 - DNA, 427 bp, Arabidopsis thaliana columbia
actctagaggtattggtcgttctataaatcatgtggagcagatagaaaatattcaacgtccaattacaatggaagctggctccattgttcttatggatttattatggttagtccttagcttctatatgttggtctgcttaatgttttggtcgagtcttactaatttgttaatttggatttgttaggtcggatccaactgaaaatgacagtgtcgaaggtttaaggcccaatgctagaggccctggattggttacttttggggtaagtaattttcttgtgttttaaatttaagttggccggatttcggttttccttccttcagaaaaacaattatccccttcctttctcacaatatttaatctgtgcaatgaggtgctgccattggtagacccaggatatatgataattttttcctggaacccaggga

SEQ ID NO: 20189 - DNA, 466 bp, Arabidopsis thaliana columbia
tcaagattttctttccctgtcgaatctttatttaacaaacctatcccatgtttgaatgtcccagatgaagaattctcatctccattggcagcagatttaagtttcctagaagccaaccttgctgtgtctcctccagaactcacagcagcctccccgttaggagatgtgctgtgattcacatcgagagtcttggggtttattacaacatcttcaacaagatctgtgcccttggccctgggaggaacacccagcactgcctccaggaaattttcccaaagcctcagaactttactgagctgttcttttgtagaacataactcctcacatgaaaactggactactttgaacatgtcttcatgaatagctctgttcaaatactcatattcgagattaggatttataggttgtctgtaaccagcagaaatagacaacagaacatcatcatcattctgagacttctctttca

SEQ ID NO: 20190 - DNA, 1115 bp, Arabidopsis thaliana
atccccgaatacacgagcagaggacacgagtgctgagaagttgagcccctttgagctaaactcaatcctttttgagtttaaggcaagttctggtgttttaactccgtagaactgcattgaagccgccattactcaataagctctgaagaagaagattgtgatagaactcagagagactggctggctcttgtgatttcgacaaataatagagtatgcttgcttagtgcgcacacctgaaacgaagatccgtagaagcaaaacagagtcaaggctaaatgcatgaataaataaaaaaatggatcttgcagagaggagattgagaattggcttatataccagttgacagggctcacgattgcttgatacaaagccggacaagctccgagctatgtatcaagacgagtatcgtagacggtcaagatcccaagctaaaaagattagacggctgcggagtgaactcggtctcggatgttaaatgtttataggcaaaggaaagaatcgaacgatcattcgacttcagtgttctttccaaaatatgaatctgcttaataataattcaaactcctggtttagcacatatatactagtcgttttaactaaagttttgtttttttttggttggaaaacgtgacatctacaaattccattagtgaacccttaggaggttgagggggtgttagcaaatggtaaatcgaaaaaacgtggacacctactcatagatatacatattttgtttgattaaattagcaataatatacaaactgcataatacgtggcatcaggtgtattgtcaacaatttccacatttagtgtttccttatgcaattacattcactagaggaataaacaatcgatatcagaaatactcaaatagataatggacgtccaatgtcaatgatgagatctaacaaactttgacggtaaagtcgagagacgaaaaaaaggaaagtagcaaaattttattttatatagtgattactgcatgaattaaatagtgaaggtaataatgattcatggcgatatgtatatagttagtatttaaacagcgcgggaacaacaagaggcagttggtctgtatgaattgagagacaagggctttaatgggtcattagaaa

SEQ ID NO: 20191 - DNA, 523 bp, Arabidopsis thaliana columbia
  unsure (1)..(523): unsure at all n locations
tggtctacccaatctctcacaatcatcccatgctctttcactctcttttcgaaccctaatcctccagttacttcttccaagtcctttctcgtgacccacaagaaattgacctttttaaaacaatcaagaccacgtaaattcacaaaacaatacttttctttatatatatatatatagactaaaaaatgttttatgggttgataccaaaaacaaataaaaggacatgcatggaatttggtggaataataaaagtgattggtcaactgtattaatatgaggttttaagttggcattaatccattctttaacgtaccttggaatcttccaaccctaatgctatttccttgagctgctcgttcgatatctcagcctgcgttccaaacgccatacacataancggacatctttcctctagtttccggtccaaccaatgaatccaatccggtttatcactctccggttttggaggatttccaaacacaaaggcccaacacaccacggttttggttcatcgttatcacgg

SEQ ID NO: 20192 - DNA, 521 bp, Arabidopsis thaliana columbia
gcgctgcatgttttagagagagtgtttgcaaaagtcgagtctaatgaagagtctgggacggtaagtctagccttgaaggaggagcatcgtgcaactcctagggtatgtgctcctatatatatatccccacaaattattaagttaaaaccaaattagattatcacacacaatacacatatattagttctttaaagaactgaccagagagagcaacaacatcttgtggagtgaaacacgttggccaaaagtttgaatgagttgagaggcattaagaaaaggtgaaggtagatttcttgtatcttctatctttgatcttttaccatcaaaccttcctttcggtatgtcataatatggaccaccagcctaacaatttcaattactaattatgttaagtacactaattaatcatatttactataatcacataaaggtaattcaaaaacgtgatcaaataaattaccaaaagacagcatctctagcagccatggcaactatatctgcgcatgatacaactcctggac

SEQ ID NO: 20193 - DNA, 603 bp, Arabidopsis thaliana
tacgtgtatatactttgtttatacgtgtgtttgtgttaattgtgttgtttaatcttaatcccaagttagtagaaatggcgggaaacggaaacgaaagtaccggtggagacttcagtttctcggctgcggcggcccgtgatgcgcttccgaggatcacgactgagaagggcggcaaatctccagggccggcagacgtctgccaggatgacatcgcaccgcgggtcaactttcagaccatcgacgagcttcacagtctccagaagaaacgatctgcccctaccactcctcttagagatggcagcgccagcggagtcagcggaactagtggtccgactactcctgtctccagcgagaccatgcttcaatccgtcaggtatatttacatttgaatatagctcaacttccaaaaaacacaatttattttcaataattaatggggaatgtaaaaagttattaggccaatctatgtttactaattttacaaatcacaaaattataaggaatcgtgatttaagcaaaaaaagatctttgatttgaagattaaacatgtgaaatagcgtaatgatatatatagtggttcccataatcgtatgattgaatttt

SEQ ID NO: 20194 - DNA, 483 bp, Arabidopsis thaliana
caacgtatataattgcttattcttcttctctggaataaatatcacctaatgacctccaaatttataacctatgatcaaatgtaactataaatagagagttttactcttatggtcggtcttaccattacgaacttccttttgcattcccgatcaagctctcactggcttttgcagaacagctgagagataaacttgtgcatcagccttctctccaataacccatttaagcttcttatacccaaacctctcaatcatacgtgtaagttctttcttcttctcatcattagcacaatagaagttatccaaccagaacaatccacggggtttcaaaacccgatcaagatcgaacatcaagaactctagcttctccgctttaccctcaacatctaatccgctagaagcatgaataagatcaaacacattgtcaagaaaaggaaatgtatggtctaagctcaagaacaacggaaagagccctctcgcagc

SEQ ID NO: 20195 - DNA, 560 bp, Arabidopsis thaliana
atatattatgtccaaatgcatcctgcaggacctccacagtaaatagctcttaaccaaggatccttatcatcatgaacatatgtgactttgtaacatttttttgcagttgagaatgagatttttatttttaatgtactttaaggtgagttagctatcaatctatgctcaataaactatagaaatttgtgctgaaagttgtgaatttctaatactttattattatttattagagcgcaagtaatgcttagatatatttcaaatctgttgatttttcctatagcctgtgtaaaattaaaatcttatgatattgttactctttatctcgtagatcaattaccctatgcaccctccaggacctccaaagtaaacagattttaaccaaggtttatcaacatcatgaacatatctggctttgtaacagattggtctgctctcatgtaccttcactgtcccgcgtcctggattataaactttcccgtgaccatcgaagagtttgaggccactaataaaagcagctttatgaaagccctcactaggccaatgaccacttcccataggtg

SEQ ID NO: 20196 - DNA, 289 bp, Arabidopsis thaliana columbia
tatttattcgatttatgtaatgtgttgctgttacacgatgtttgcttgtgagattcgattgaaacttgtgttgttgcaacatcaattctgtataagaaaggttcttaatttgactctgtagctttactttttttttagttgtctagggataaacatggcaggagaaggtgaagaagatgtacctagagatgctaagattgtgaaatctctgcttaagtcgattgggtgtagaagactacgagcctcgtgtgatacatcagtctctggagttatggtaccggtatgttgg

SEQ ID NO: 20197 - DNA, 1026 bp, Arabidopsis thaliana
cccaatagcttcagggaatactgcttcccggtaactcgaaacccatgcgtggggcttgaaacagtcatcaactaaagccttgtaggaaattttaaaactattcgcagccaccaaagcatgactgcaagggatcttgagtttattatacctcttgcaagtacattgcttcttctcaagatcaacaacatttcttccacctaacatgcaacttatctcgtagctccagttggtgatcctcccaaccttgctcccattagttgttaacatggtttttgttatttgcttgtcaacttccggagaacgggacctttatgttcgagagacttcttcggacgcgcattaaaccatctagttaacatagacctgataaatcttatcaactccacaatatgtgacgatcgacctttgtttaatgccttgtttaaggtctccgctatattgctagtcatcagattgaaacgttgtcccctgaaataatgccttgtccaattagccatccctatatcatgtagatacttaccgcaattctggttcgtggtttcaatctgaccataaaactctttaaactttgtaccggtaaacgcatatcctgcattttttactaactgcgtcaaagctttgttcttgtacttagtctggatattcctacaaaggtgaataatacaagccccatgatttgcttgcggaaaaactctcttaacagcaacaaggattgacgagtgtctatctgataatatagtcagagttttgctgtctgcaatgatacgctccaacttcgtaaagaaccaagtccaagactcgtcattctcactgtccacaacagcaaatccaagtggatagacttggaagtttgcatcctgaccactcgatgttagtaaaacccctttgtactttcctttcaaatgtgttccatcaacaaccaatatccttctcagatgcctaaatcctgctatcgaggcaccaaaagctaaaaacatatacaaaaacctctctttgctctcatcttcaacatctctttcggtttct

SEQ ID NO: 20198 - DNA, 1301 bp, Arabidopsis thaliana
caagctgaaccagctaggtgagctggacaaactaggatgaactagctagctaagctaggtgagctaaaccagatggaagactagctagctcagctaggtgagctgaccaacagctcgactgagctcggtgagctgatcgagtactgacccagttgggtggtccggtcatctgacactcgagctagttgactgtggtagctcacgggtgaagaggtgtctcggccaaaaggtgtaaggtcgagcgggtaccaacgaacagttgcatcaccaaaggatacaaagaacggatgtgacctttcggaaggatgcaaggaacggatgtgacctttcggaaggatgccaggaagggatgtgatgcttcgggaagcatccattcgccccctatataagggaggacgcccaaggcctttggaatcatctcacaacattcaaaacaccacaaaacattcttaaaagagtcccacacatcctgaagttgttggtcggaaagggggtgcggctcggcgagtataactcgaccgaactgatgcgcatactacctcccggtccaacggttcgatggagtgtagaggatggagagggtagaccgttcgtcttagagacgaatcggatccggatagaccgatcgttggatcggatcggccagaccgatcatcagacggatcggatcggccagacggatcggacagaccgatcgtcggacgggtcggatgggacaggccgatcgtctgacggaacgggtcggacagaccgatcgtcggatgggatggatctaattgacgtattggccagtcgagaccaacatgaacattgagaacagttcgtattgtcgccggcttgaccatcggactgaacgtctctgtgaaatcaacaccggcttcctgtgattttccattagcaactaatcttgctttgtgacgagttatgctgccatctgcatcatatttatgtttaaacagccacatagatcttacaatattgaccttaggaggtctaagcactaaactccaagtcttagtcttaagcatagcatctatctcatcagtcatcgtctggtgtccaatttggatcatgatcttgcatgaatgtgactttttgggagaggcgatgttgtggtggtggaaggtgaggtggctagtgatgggagacgaatctcggctgttggagacatgatggtgaggacacgggtcttggtgtacataaatggtgattgtggctgggttctttgagcaggtacacgtagtaggtgttggttttgagtaggaaatggagtttgaagaataggttgcaattgagaagaa

SEQ ID NO: 20199 - DNA, 517 bp, Arabidopsis thaliana columbia
ctactatacataaaacacacaagtcataatcatcatcctcaaaacaagcaacgtcaagagatgaatcataatttgtggagaaagacaatgcaatttctaacttcaaaaaaaaaagaaaataaaacaatacaaatcctttgaattaccaacaccattaggccttgagaggctttgtagacttggcagattttctcttgaggacaatgacccaagtaacaacttccaagagtaacgtgatgcctcctaaggtcccaatcacagcgatataagccgtcttgtaagtatgctttggattcaagatgctaagacctttgaaaacattgatgattccaaggatgaggatagagtatccaactccgtggtggtaaatattccaaacgaatctaaacttgtggtccttccttggccgcaacagcatcgcaaacatctttaaacacgcgcaaaaagacacaaagcatcgtttcaataacagaacaaaacatatctttttaaatggccaacttgcaatatccactaa

SEQ ID NO: 20200 - DNA, 965 bp, Arabidopsis thaliana
cttcatcatttatgataacaggatgagtgtcattaggaccaagagatgcgtatctcagacctatttgggagacgcttaaggtcaacctttggagctttgagttcttaccaatcatcagagatgctgctcaatcgagtgtcctcggttgttccaaccgagtttggttcctctgttatcttgttcgattgactgctagagtacacaggtcgagtagaactttcttcactttttgtgactgaactgacctcctctgaacagatattcaactcctcaaatgtctcccatgcttctaccggtctatgggagtctaataaatctgtgtaaccctgagtttctaggtataggtatccctcttctccatccttggtaagagcactctgtaaatgatctttctcattaagttcctcaagcaactcatctgccaatctatcaatctcttcaatatagaaaacttgacctggaatggttggcttcctcatggttttcttaatatcaaaggtcatattgaggtttcctcaaaggtttagatcaattttaccttttctgacatctaagaagggtcttcccaatatgagaggatccttaggttcttcatccatttctagaaccacgaagtcagttgggatttctactgatccgatcctccacgggcaaatcttccaacatgccatgaggtattctcactgacctatcagcaagaactagctgaatgtagcatgctttgtacttggagaatcctagcctttttttactttggacgagctgctgaaatatagttgtaaagtctggatcaggtggggttggtattggtggagttgggatagggtgtgaaccggggttgaaactattggggaatggaacgtagggcggaggttgatgctgatacggaggataaaccggaggatgtcggtgaccacagtgttgttgcggtaggggttgtcggaagcaggtcgcttgtagttgtt

SEQ ID NO: 20201 - DNA, 1220 bp, Arabidopsis thaliana
tgtatctcggactttcttggcaaccatatgaccaaatggtccatgtccatcgaatacaccacaaaacactgtatcgtctctcgaacaaaagttctggaaagtgaagtagttttcataagttagaaacttgtcttgatatgtgaatgtaacacaaaaggaagtaagcagaaatagaatctaagtgtcaagtaactagtggtccctgtagaaacaggtcaaagactcaagacagcacaagaacaacacaaatggcaaaacaaagccacctcaatcttcaaagcactaagctttgtaatggtcccagaaaagtgatgaatcattccaagtttctctctctcttactaagcactagcaacaaaagattaatgcaatcatgttctgaagatccatttgatctgtaacaaaacacatccaaacaaatcaagtagcttcctcatacattgaacaacatttctccaccaaaataccctgaaattgtcctcttgagtattgataaaatccaaatgggttgcaaaaaagatgaatttttggaaagataaaagaaacgaacctcaaagacgagcatggcgtcttggttagtccctttcttgccttgctgtgtgtaaagacatgcaatcttacttgaaccattcgaaaccaaacgacccaaaacctgtggaatcccttcgatatcgccgccaccctttaaatctctcggccgccgccatcttccggagcctgatctctcctccacagtctccgccgtagtggcggtggagcttgcttctccaggttccttcccagtagtcctatctactgaataacacagacccattttgaaaataatccgaagaaaaaagagctcaaagcttttaaagaaaaagttcaaattttttaaatcgccgattgaagaaatctacgatttttctgggggttgtcggcaatgattacttgctcggcgaagaatagagcgaaacgagaaaaacgaaatccagaaaagagcttaaaaggctcaaaaaacgaaacttggcatctagaaaatccacactactttagcttttagttttagctttagctttagggacctctggtttattttctcgggaaaactgctattttctcgggtaaaaagactcatacttttgcatattgcgagaattaaaaggaaaaaagagaaagacaacagaacatcacaatctgttcaaatcagattcttgtgaactgatttaggattacttgga

SEQ ID NO: 20202 - DNA, 992 bp, Arabidopsis thaliana
gtcgcgctacctgcgagtaagcgcgttcggacggatgattcatcgtccaagaagaagagcaagaagaaggcctcgagtaccaaggcgggaaaagagcaccccatttttgaagatcgggtagtctctggaaacctcctcggggtgtgtgctggtcctttgctttctctccggatactcttttggagtcgcggaagtatgctgaaacggtgtcccatttcctgcgggtaagtgcctattcaactttttcatttttcatcagtctggagctccgatccgtaattttctttctctgttctctaggttgtcgcctcgatgaaccgaatggtgcattcggacgattcggccatgaggaataacatggaggcggccaacaggttggccgatgcagatgctcggatccaagctgtcgagcgagaaagagatgaggcgctctcctaagctgccgcggcaaagatggcgaaggaggaggccgaaaaggaggccttcgtgaacaaggcgaatgccattaagatggccgagctgaatttgagggcggactccgaggtcgttcgtctcaaacgcatgctagccgaggcgagggggctccgcgatagcgaagtggctcgggcttctcaaacggctaggcgcgagaccttaaggccgctgagcagaaggtgtcgctccttgacgggatcaacggtcagtttatgtacttatcccaggcgcgggctaatgcgcaactgatcaagacacttgaggaaggtggagtgttggcgaccgagaaggaccaggttgaggaatggctgaaagacttcgccaatgccgaggtcgatttcaccaattttatcgccgagctgaaagaggaactcaagactccttctctcgaccccactcctttaagtccgggtggccacaggtcggtcgagactcttgccgacgaggcgggggtcaccgatcagtctgggtcacttctgcctgccgaggatattcgcccgtctgaagagctcgactaa

SEQ ID NO: 20203 - DNA, 973 bp, Arabidopsis thaliana columbia
atgttcctaaacctcttccataaatgtccccgaacttgctacttacttttttttactttttttttaactcgttatgggctccggctcatttttaatttatggaaacttttttatttccttgatctcaaaatactcgttttggagatatgttttaaatgcagggccaactggaaggcgtaggtctttccgcgaatcactccggcctcaaatagaattgcaatcttcaaaggtgccaagtccctataaattgcgactccaagttttctttattttttattacaactttcttttccttttgcagctatggagtttaaccttcgatgttcggagtccatgccagacttttctagggtcggaatgatggatgaggacatcccaaacgtgcggggaagagggccttctcaacctcgtggcttcttaaggtcccaaatccgagctccatgtgcattgatgaagggactttctgacatagaccaagaaatcacgatggcattcatcaaggctcttgcggttcagcaccagaagcgttcgttggaaaggaggaaaatccgaaaaaagattaaccgaatattacgtagggttattgcgatatcgagggaacttcacaccctcaactctcaccccggggactggattgagcttggaatttccgaatttgatcgcataccggattgtatgatgccgattcttgaactcgctggtcaaggagtccaactgttctacaagtcgagaagagtttcttaatttgaagtgctagcgtgacgaaacttcgtcttctttgcttactgcttgaatactttcgttttgtttcctgtatttgcatgttcgcgtagtcgaacttttcttgctttgttcgttcgcacagtctgaactcgttcccaagctgcgtacgtacctatttcaagatcaagcgacaccgtagttcatgtacataacaaaaaacgcgtgtttacttaaacataaaacttcttta

SEQ ID NO: 20204 - DNA, 477 bp, Arabidopsis thaliana columbia
aatcgatattgtgatacagtcatcaccagtctagtttatgaattttattctttattatatatatgttcaacacatctgatcaaagatataaactgaagtgtaaaaatagtatcaagtactatgattaaaagaattatgtgaatggtaacattaatggaaaaattaagaaaaaggtaacaaatgaatcgaattaaatacaagaggaagggatcccaaatctctccagtgtcaatgccggcgcgtgaagccaaactcctcctcaatgacctccgtgacgagacaccgcgacgcttccatcaaatcagggctaagcctaaacatcaacacacaaaactccatctgattcaacgcaccgtcgcagtcaaaatcagcttcattaatcatacaccggacatcttcatcagtcaaatctcctaaacccagaaccgccgcagcgttacgtcggagctctcgaacgtgatgacacctttctctctg

SEQ ID NO: 20205 - DNA, 560 bp, Arabidopsis thaliana
  unsure (1)..(560): unsure at all n locations
nnnnnnnnnnnnnnnnnnnnnnntaaagtgatcatgaccgttctgcacgcaggcggtaaatttgacgataactcctataaagtgtccggcggtctgcacggcgttggtgtttcggtagtaaacgccctgtcgcaaaaactggagctggttatccagcgcgagggtaaaattcaccgtcagatctacgaacacggtgtaccgcaggccccgctggcggttaccggcgagactgaaaaaaccggcaccatggtgcgtttctggcccagcctcgaaaccttcaccaatgtgaccgagttcgaatatgaaattctggcgaaacgtctgcgtgagttgtcgttcctcaactccggcgtttccattcgtctgcgcgacaagcgggacggcaaagaagaccacttccactatgaaggcggcatcaaggcgttcgttgaatatctgaacaagaacaaaacgccgatccacccgaatatcttctacttctccactgaaaaagacggctttagagnnnnnnnnnnnnnnnnnnnnnnnnnnnnnnnnnnnnnnnnnnnnnnnnnnnnnnn

SEQ ID NO: 20206 - DNA, 1477 bp, Arabidopsis thaliana
gctcacaattccagaaggtcttaaacaattcatggcatttgcgacaaaccaaccagtaaccatcaaatcaaaacaaatgtattgtccgtgttctacataactaattttaagagttattctggtatcttaagtttggatgcatttatatggggatgggtttatgccggggtacaaagcttggctcatgtatggagagaatgagtcaatcactacaagaaaataggcaaacgacgactacgcaaggcgactaacaatgtattcgtccttttttgcgactatattacgactgatggacgacgacgttacgacaatagacaaattggtcgttccatagtcgtattttagcgactacaagctttagtcggtaaatagtcgtccaagtacgactatttgacgacgacattactgaaaaaaataagtagtcgtaaagtagtcgtatattgacgactacatatccgactttaaacattagtcgcaaaacaggcgacgatactacgactattttcactttgtcgtccaatagtcgcatagttgtcgtataataccattggaaaatgtttttcgcgttgctgggtaggtacacctaatttctgagcgtctacagtgtttagtcgtaaaatagttgtaaaaaatcctctatataatccacgacactcttcattctcattcaccaacaaatcaaaacaacatcaaaagctgtataacacgatttcgaagaaaaaaatataagtttagtttatggtataatggcgggaaacttcaataatggcggtggtggcggtttctatcgagattggatgtacaagagatttgatgaagtaacgggaaattagtcaaccgaatacgttgcaagagtagaagaattcatgacattcgctaatagtcagcctatagtacagagtagtcgaggtaaatttcattgtccttgtagtgtatgcaagaatgaaaaacacatcatctcaggtagaagagttagtagtcatttgttagtcaaggatttatgcctaattattatgtttggtataagcatggagaagaactgaatatggatataggaactagttacgcggataggacgtattttagtgagaatcatgaagaagtgggtaatgttgtagaagatccatatgtggatatggtgaatgatgcatttaattttaacgtggggtttgatgataactatcatgatgatagttatcatcaggatggtagttatcagaatgtggaagaaccggtccttaacaattcaaagaaattctacgacttgttaaaaggtgcaaatactccattgtacgatggttgtcatgaaggccagtcgcagttatccttagcatatcgactcatgaaaaacaaggcggagtataatatgagtgaaaagttggtggattccgtttgcgaactgtttacatattttttacaagaaggaaaccaggctaccagttcacattaccaaactaaaaagttgatgcgccattta

SEQ ID NO: 20207 - DNA, 840 bp, Arabidopsis thaliana columbia
cgtttgtgattcatttggagataatagagaattctggaggaaaacagagaacttatgctgtagaagaaattcggagactaaaaatcgaacgactgcacccctggtgtctagtgaaccaatacctgacggcatttcgaagacgcaacttattgaagttttgaagatttccaattttggcccagaactttctcttatttttatagaaggcacatcacgttttaggtcatatatatatagtttttaaggtcattgtttagacctaagtgatataaccctatttttaccggttttaactatgttttaggtatatgttttagagtctatttgttatttctagagtcttttctagtatttttcaggtctttacatgtttgagattcatttggagataatggagcattctggaggaaaacagagattttatgctgcagaaaaaatcctaagactaaaaagcgcgtaggtgtcaaaacaccacccttggtgtcgagcgatacccatacctaacggcaattcgaagacgcaacttattgaagttttgaagatttccaaattcggcccaaaacttttccttatttctaaagaagacccatcacatttttaggtcatatatatatatatatctatagagggtcattgtttagacctaatttatgttttgttctgagatacacttttggaaagaagaatccaatccctatagagaggattctgaactccttttactcttcttcttattattcaatgcaaactattcagactttgatgtgtgttactttaatcatgtatgagtaacactttgttgggtttagggagtccaatagggatttagatggattagta

SEQ ID NO: 20208 - DNA, 533 bp, Arabidopsis thaliana columbia
tcatgagagttttgaaactcggagagtctgcaataagtctaaaggatctcccagcaccattgagagtggcaatcgcctacatgccactgtacagagagtgtgtggatgcgggtggccggctgctctcacaaaagctaagaggacagctcgtggaagctgcaacacagcttgaaggcttcgatgtagacacagaagaagtaaagaaaggtcatcatcagctcatgaccatcttggagcatcaccttcctctttttttggtcaaagcttctttacactgagcaacaatggattcagcatctgagttaacacaactcgttttaaatagttgataaaataagaactgaaaaacaaccattccactatagttatggattctgatccaggttgtgagatgatgaaaaagggttcttgtagacttgtacaaacttgctatgagaatgtctttgtcaaaagtctctctatctgtcttttatgcatcctaaaccatgggagagataatcaaagccttttatattatttcatctacatattat

SEQ ID NO: 20209 - DNA, 722 bp, Arabidopsis thaliana columbia
cttttgagttacatttgctgactacttactcgactatatatttgttagttatctaaaaccttatttcaagcgtgattgatcatatcgatctatccaagttctctctggttttcaactgtggttgtgttgtcattatggccatgaaacttatactttatgttgtattagttattgcactaagtcttggcctttttccctttcttcgtatatgtttcaatttgttttagaaccaaacatttcatatagatagaggatttcttaattatttaataaagatgattcaaatgtatataattgttcaactagttcagttcgcttccaaaaaaacagcgacgtcttctctctcacggcgataaaaacagagaaccttccatttgtttctttgagcgcgtgaccggcgcgtggcggcttagttagcgccggcgtcggtcctccagtctggttttctttagggtttcattctctacttagtctggttcgtttttagatcctgatttgatgttggcaaggtgaagaatttttggatcttagatctgtaagagccatcgttgtgggctttgattcgtcgaaggttttgtgcgatcggaactcccttttctctgttttgagaaaattatgggtttccctttgttcttgcagatcttgttccgacgaaggttcaaacgaaagttatgacggcggctaatgttattggtggtctggctcattctttgggatagggt

SEQ ID NO: 20210 - DNA, 498 bp, Arabidopsis thaliana columbia
aaaaccttgaagtgcaatatgctggtctgcgttcttgtggacctatggtttatgcattggctatattctgcttgactatgtgcctatttgttttttgcttctcatcttcttacctttttcttcctgtaaatgtttaggctgcaatcctaggagatatgataggttcagggaaggcatctgatcgattgctaatgatgtatgtgcctttcatgggttttgggattctggctgttcttcgtggcttagtttatcgatccaccaaaaacactggatcttctggcaagagatccactatcatgcccagaagaaagctggcctgagattcaaaaaaaaaaaaaagcagttgattgttctatgtggaagacttactcatccttattctgtatatgcctagaaagaggtgtttatttttccttgtgaaaactttattgctttctgatttatgtggaattcttgtttgttgactcagcaacaatgaaatgtttacttggttgatat

SEQ ID NO: 20211 - DNA, 581 bp, Arabidopsis thaliana columbia
gggtaccgagctagagaagcaattgttgaagaagaagaagaagagatagtctgcttggagtctttcttcatcaacgatgagtaattttgttacacaaacaaatgtttgttttatttggtttttaaacttagatcaagtgtctgcttttggttttctccttatacatgtttgttttgtctttgtcggatgcagttatcagttgacgaagtttacgtttggttctcatgttcttgagctctactgtctccaatcagcttcaagtaagttaatttcacctttatcttgtatcaatcttgcattgtatttttgtttttacattattgttttcaagattttaattgtatttttcaattatattttgaccccgataaaaaattatgggtccgccactgactccaatgcctaaaaccacaagtgacgatttattcgaattgagttgcaatgttgcatatcaaaacttgaattttaagctttttaaatactggaaaacaaatcatgcaaactgaaaataattaatgaaagaattaagtaatcgtaccacgacatttagatgcgattatttatgttcacgttattattga

SEQ ID NO: 20212 - DNA, 450 bp, Arabidopsis thaliana
ttttagttccatgatatttttttttgtgttccctatatatttgtatgtaatctcatttattaactttatgaaacagagctcagaagaagatttcttcagttggagcttgggaaaacagcaagaaagcttctgtggaagctgagctaaaaaagatcgaggtaaaagtgtaattctttattctttcaattttgttgttttatttttaacttttacatgaaatgctttccacttttcacattattctaatttatccgctggaaatatgaatgataacaggagcaactaaataagaagaaagcacactacacagagcaaatgaagaacaagatagctcaaatccacaaggaagctgaggagaagagagcgatgaccgaagctaaacgcggagaagatgttctcaaagccgaagaaatggctgcaaagtaccgtgccaccggaactgctccaacc

SEQ ID NO: 20213 - DNA, 842 bp, Arabidopsis thaliana
taatatttacatagtagtcttgacgaccctttgtttttcttaaacctggatgaaactttgaattaagctcaagttatctttgtggcatgtctattacagtagtaataagttaaaattctacatgtattttttatttacttagagaaaatcaaagagagaggaaaaatgagtggaggtggtggagaaatggaagagagactgttaaatgggtcagagacagaacaaaggagagagagtctctacttgagaaaaaagatttggagtgaagtaaggaagatgtggagaatagctttaccatcaactttgttcagagttatgtcgtttggatgcgtagtggtggctcaagccttcattggccactccagtgaaacgggtctcgctgcttatgctctccttcaaagcactttcattcgcttcatctacggtattatggtacgatccatcatatattatatgttaaaacaatagtactataattttcgtccaaaaaaaattcattacaaaaatagatattttgttctcgctaaagactttttggtactaatagtaaaatgttgtggtttcacactgtttttaacatttaagcagaaagctatatgaaaaagtaatgaatgatttttttttctttctgatataatgtaatgaatgagtgtttattgtattttcaactcataaccaattatatggtagagaatatgaattgcatggtaatattattattacaggcaggtatgtcaagtgcgacagagacgttatgtggacaagcatacggagcagaacaataccacatgatggggatatacttacaacgttcttggatagtagatcctttattgcaactc

SEQ ID NO: 20214 - DNA, 1616 bp, Arabidopsis thaliana
tattaaaagtaaattacctccaattcccagtcagttttgtaaataacataacacaatatcaacgtttggataccaactccagccaacattccggaccagagtccctgcatacaatatcatttattcaagttaaaattctaaaagttctaatgattgatcataatgaagtactggataccagttttcatatatatgatgtaccttaatcccaaaattgaaaacgtaaacaaggaggacacctaaaggaacaccaattgcataataagatgctaagttcactaatgctaccatactctgcatccctgctccaattgctacccctgtttatatatgttcaaacaaatttagtggttacaaattagtgaaatctaaaagtttatgttataatttatttatgtctaatataagggttttattttgtaaccagatagaatgggctggatgatgttgaagagtatagatatgctaaggacgatggagagatcagctactgcatccgaaactgcttggctatcagagaacaaatacgaaatctgaccgccaaacgctaggcaaagagcggaacatatcacaccgatcaccgctgataccacaagcaccacttttatcgagaatctcaccgcatccgcatcgccttttcccaattcattcgccactcgtacactacattttcggattcatagatagagaaacattcactttagtattaaacaaataatatatgtatacatcaaaaacaaaatactgtgaatgagagtacgtatatagttacaaaccatgctgcacccatcaagccaaagcatactgtcatctcccatgagtagatatattggctgcaaattttgaattaagtatttagttttcatatgtatatggaaaaaaaaacttcttcggatttaagtaataccatatggagaaagcggaaattgcgatattcgcatcctttgcatatccagacatcaagacaatgatgctcatataccagtactctaagctgtttgaggcaataaataaacaagagaagcaaaagaagagtcattagaaatttgtattagcctattagtagtggtccacgcttaataatcatgttttaatcccgcgaaaaaaattaacaaataaaagcaagttaccaaagcatgaagccggagatatggataacttgagcatgggaataagatcaagaaaagcagcagtgctaaagccggtccaagtatgcgggcaccaccctccaaacacatatacaaactcggctatggccaccgaccatgagcttatattaagccctagaagcgcaccatggatccccatccccatcacgcttacgcaccaccacgtggccgcaatgtccaagaccaaggctagggtcgaaagaatgcctatgatggcgtttttcatctgcgcttggaggtacatttgcattgtcatggtgaacacgatgctgtagagataaggaatgacccatgggtaaatctcgtctactgtctcggagatcacaacgttttggcctaataaccggagaatgggacccgctaagacgatgaaagggacgaagagagttgcaataaaggtatctactatccaagaacgttgtaagtatatcccatcatgtggtattg

SEQ ID NO: 20215 - DNA, 600 bp, Arabidopsis thaliana
tgtcacaaccttcaggccaagaaaatctcgtcacttgggtaagtagaaagttcttgtcatctcctagatcttcctgcactttcattgtcgaaaacttaagcttttgaagtctcgaatgtaaaaatttgattctggatgcagacaaggccagttttaagagacaaagaccggttagaagaactagtcgattcaagacttgaaggaaaatacccgaaagaagatttcataagagtatgcacaatcgctgcagcttgtgttgcacctgaagctagccagagaccaacgatgggcgaagtggttcagtcacttaaaatggttcaacgggtggttgagtatcaagacccggttttaaacacttcaaataaagctcgtcctaaccggagacaatcatcagctacgttcgagtcagaagtaacctcttctatgttctcttctggtccttattctggtctaagcgcttttgatcatgaaaatattacacgaacaactgttttctcagaagatcttcacgaaggccgatgatagaagccagggttttcttctttttatttgtttttccccacttacggtgagaaaatttcaccagagaacttttgagtt

SEQ ID NO: 20216 - DNA, 539 bp, Arabidopsis thaliana columbia
gggtaaagaccatcgcagaagtaacagagacattatcatggtaccttatgtttttttctttccataacaagtagatagttgcttgtacagcaattcgcttcaagtttgaagagagattgggagtcgttgacagcagccaagaaataagagaggaccagtcggcaaagatacatggagattgacctagtcttctcatcatagaataccaaatctcctctgcaaagttgcagtgaagaaggagggatctctggattccacatcagtgttacaaactccacaaagaggagagatttgcattccccaatcatggagccttgatttaacaggaagcctatcaagattagcaatccaaaaggtgaaagcatgttttggaacagcattcttaaaccaaaccggtagaacccaaggtttttcctcttcacgggacctgaagtagtccaagttaacttcattgagaattgtcggaagagaggttgtctctcccaagtataagagtcatgctgctggccgaagtaggcaaaggtataccaaaagattgc

SEQ ID NO: 20217 - DNA, 524 bp, Arabidopsis thaliana columbia
cttgttattatctggaccttttgtattatgtaatttggtagataagagtgttagtcttgtgtttctgatcagtgtagatttgtattttatacaggtctgaagttgatcagtgtagagagatcttttgctgagaagcactacgaagacttatcttcaaagtctttcttcagtggactcgttgactacattgtatccggccctgttgttgctatgatctgggaaggaaagaatgttgtcttgaccggaagaaagatcattggagctaccaacccagcagcttctgagcctggaactatccgtggggactttgctattgacattggcaggaacgtgatccatggtagtgactctgtcgagagtgcaagaaaggagattgctttgtggttccctgatggacctgtcaactggcagagcagcgttcacccttgggtctatgaaacttgatgatctgttgctttttcagtagtgtgttttcgacattgcttgtcttttgaacaagacttctatatttaagttgagtttga

SEQ ID NO: 20218 - DNA, 431 bp, Arabidopsis thaliana columbia
tcgataaattgatagtggatcgcaaataggcgtgcaatgagaagaagaataaaataaataaatctataatggtgatttatgttggatgattaaacaaataaattggaaggtgggagaaggaagtaaacaaataatataagaaaaccaaaaatggatttaaaataaaataagtcaaaactcatattttacaagtcaacggaggagagttcataatttattttagaaaaaggtaaaaaagtaaaaaacgtaaagagtaaaaaattagaatttatcctttctctaatctaagcgttaggactcgtcacaagattctcgtacgtgtcaacagagcttgacggaacggcgaccattactttaacggcgtcattttgttcaggaatcggaagcagcgaacagtaacggtcgcaacagaccgatccaacatgaaccgg

SEQ ID NO: 20219 - DNA, 598 bp, Arabidopsis thaliana
gccttaaatggagagcaatatatggaccttctatccacattcttctcgtgagtttgttcccgagattctcaattggtgccgcgaatctcagtgcatggaaagcaacctacaaaccaacaaattaaaccttcctctagagactggaaaacaaagggttgattgaaaaatcttaccttgcatcgaagtttctgcagatccggcggtagattcttggctaactttgagtccaatcctttcaacaccaaaagtccttcctcattcaactacaacgtagttaacattcaaaattcaagaatcgatcagagaaaacataaaccctaaactagtaaacaatagaatcaaacctgcttgaagtatttagcacggatccaaaccggagaaacatcccaaggaatctgattctcaattgtttgtctagacataagatgcgttgacggtagagaagaaacgatacgaacatcagatctcagcgttttcttgaaatgctctacatcgaaaagatctgagaattcactgagaaaacacaacaagagatcatcagtaactcgaatcataacccagaaaagagagatgatcaagttgtgtttttgttactttc

SEQ ID NO: 20220 - DNA, 640 bp, Arabidopsis thaliana
gtgtagtgtgttactatgtacttgctattacgagaaagcccaaagacagccctccgacgaaagaagcaggacaatggaacttcccattgacgttttgtcgaccccaaaacctcggacattatataatatgtattaaaggaataatagaggaataactaagtgatgtaaaatatatatatatatatatatatatatatatatatatatatatatatatgagtgtaccaaaacgacgacttcacgagtggcgagagccaaaatgtcagcacatgagactttgttgcggcaattgggattgctatcaacggcttgcttcgccttcaccaccgtgtcgaatccgtctccggccaatgacatgtcatctggatggtctctctccgatggtgatgctatcattattgacgcatcacatccctatacattcatacgtaaagataatgttttatttgaaaatgatacatagaagataaacatcgtaaactctaaatctagatgttttggggatacatttcgatcagaaataaacttcttatattgtacgaaaatatcaaaagaaaattgtaacgtacacgaacgaagcaatcgtggaagaagaggcgaagagtggccggagcggtaacgaaagtctgctggaatttct

SEQ ID NO: 20221 - DNA, 529 bp, Arabidopsis thaliana
  unsure (1)..(529): unsure at all n locations
nnnnnnnnnnnnnnnnnnnnctaaaggacttcttacgggcgtttacccagcttaagttacaacatattcagtttaacgtggtgaacgccgacacgttgcgggaagcgcaacagccccacaagattatgccgggctggtggtgcgcgttgccggatacagcgccttctttgtcgaactgtcgaaggagatccaggatgacatcatccgccggacagcgcatcagctgtaacgttgtggaaacgcgccgcgatgatgtggcgcgcattttcaacattcagcgttattcactgaatgacggcgagggcattcgtacggtggtcttttttaaaggctgtccgcatctttgcccgtggtgtgctaatccggagtcgatctccggcaaaatccagacggtacgcagagaggcgaaatgtctgcactgtgcgaaatgtttgcgtgatgcggatgaatgccctccggcgggtttgaacggattggtcgcgatatcagccttgacgctctggaacgggaagtgatgaaagatgacatt

SEQ ID NO: 20222 - DNA, 526 bp, Arabidopsis thaliana
gagatagcaaaaatatcatcaacacgacaatccgaatgtgaggttttgtttcaccttgactaaaaactttcctcattaaatgacatagtgatgtctacaaatacaatattcaaatcacaaaataaccttttttatttttagagaagaacaagagaatgagagacgtctacaaataagattggattcataaaatgacatgtgagattttaatcaaaaaaatttcaagatttaaacaaaacaaagatataaatatgacaataatgtcaaatagaaaacaaagcataaacgttggaatgcaagtaaagatgtttttcaccaccattagtctctctctcattatcgaacccaacctgcttcgatgttttcgaagctaccaacgagaccgtcatcaatgaaatcccctcctcctcgtttcaccttaacttctgttggcttcacgggatagtcacccgtgaacacgcatagcagaagctcttagagtctttcccaagtgtttcttcacgtatcgacgatagaacgcaagaga

SEQ ID NO: 20223 - DNA, 517 bp, Arabidopsis thaliana
gaatgaaagacaattccgaatcagctttgtctacgaagaaggaagctataagtactgcaactatgaatctcatggagagtaccatcctggatcaggatgaaagctgacggcatgattagcaaatcgaagtcgacgcggtcagtggtgtttcgactgcagcactagtgcgtcccgcatcagcagtagaagctagctcagaccaaagcgatcgactcgaagtgttaccaaatctgtgctgagtcattctagaaggtaccatgtgccaatctttgagatcaagattcttctgcacttcgtctagaaccgctctacctcctgcgtgaatacagaaatgctcgaaagctagcttgaaatccggaatataaggtttaacttttaacttgaacatcttccttttgaccaaggaaatcaagaacatcaactgctctgacaatggaagaaccatcggtcctaaagtcgtgatgtttgttttcagagcgtcccggcgacagacatgagctctctagctagagagaca

SEQ ID NO: 20224 - DNA, 1353 bp, Arabidopsis thaliana
tttgttttccttttatcgcttgtatggcgagtaataacatataacttcaacaagcagatgctagccaaacttgctagtggatgaacaaacctgcgcagcagacagttgtaccatatgcagctgtacaggaattactaagttccttgccaataaagaaaatgtaagtaagtttcaatagtgtattgatcacaacacatattttcgtaggagaacttttagtatttgtcacattctacggaatacacttaaatatttgcgtcagtatcaacacagctgtgttttataagatgtaagacagtccaaagttgtgtattgcatcttttatcgctgtcccaggatcataaaattttcagttagtgctggtaatcattgagctctaattagacataacgtgcaggaaacaactgggaggaaagctgggcactagcttgcaaactgacttgggagttgacacagtaggggacttgctgcaattttctgaaacgaagctacaagaacattacggagtaaatactgggtaatagctttggaaaagatagaatttttgttgtcctggactcgtaggctattgtagattgttcattatttgattagtaccttctagcatactaaattcccaatagttgcttatttgcttgataatagaaatttaaagacatgcaactcgtgcttgtttgtctattaatacgtttttctgatttttcccccgacttgtagtacttggttatggaatatagcaagagggatcagtggagaagaagtgcaaggtcgccttctccccaaaagtcatggattctggaaagacatttcccggacctcgtgctttgaagtcactctcaactgtaagagtagaatctcaacaatgcacttcttttccctttgctatcagttgctctagttgataggtcataactgaaagtgcttatagaggtgaaacgttttggaaaaatagtagcaaaagtatcccctttttatcttcaatcatatcatagaactagtttttagaataagtgttgtgttctcttatatttctaggttcagcattggctgaatcagctttccgaggaactaagcgagcgcctcggttctgacttggagcagaataagcggattgcaagcacccttacccttcatgctagcgctttcagagtacctacttctcttgttatatatcatttttctctgcgaagactacgacttaaaacatatttttcctgaaaaatattgcagtcaaaggattcagattctcataagaaatttccttcaaaatcatgtcgtatgagatatggagtaaccaagatccaagaagatgcctttaacttgttccaagctgccttacgtgagtacatggga

SEQ ID NO: 20225 - DNA, 1034 bp, Arabidopsis thaliana
cagactactcagacatattggatgaagcaaacaacatatttgagtgtgaaggcataaacacagtaaatagagaaggggaaagaagggatattttcactgtattaagatctgaattaaactctgaaaacaatcgatgaatagcttatgtctctctgtaacaaggttttgcaaaagcttgataaattaaacttaggtctaaaaacaatatataaaaccgtaaaaacgtccagggactaataatacaaatagggaagtcttctggggcaaatttcctcttctgtaaacttgaaagcgtcatggacttctgctgggccaaaactggtgtcgatcgacaccaagagtgtgtcgatcgacactcctcgctgattcctgaaccaaaattgtctttagcttccttttccttagcttttgctccaaaatgtctctttatctccattgttgtctcattgcatagaatacctgaaaagacactaaaaagactcgagaaataacataaagactcaaaatcctatatttaaaacatagataaattcggtgaaaatcgggttatatcactaatactcaaaacgacatagtattgggacggattaagaacggtactcaacctaggtggtcgagtaatgcgtcgagtgatgagttggagtcctcttctcttccttgtgctcgaatgtctggttgagtgcagaattgagaagactctgaagctggcagtcgagtatgatgtcgagtggtggatgatggtggaactcaacttggtggcagagtgattgatcgaatgaatgatgatggtcggactcgaccacaaggtcgagtggtggtgattgagtaaatgacgagaggtggtgatgttgttgctcgaccagggggtcgagtgaatggcgataggtggtgatggaggtgccctccagggggtcgagtgatggtgagaaatggtgatggctgcactcaacctcgagatcgagtgaaggataaagtgtcgttgtcaagtgattagctgtagaggttgtggccgagtaattcagaaagtccaggat

SEQ ID NO: 20226 - DNA, 1690 bp, Arabidopsis thaliana
gaggaccagaggatcccctgcggattagttaaagccaactcgctcggtaatgtttccatctctggcctaatcatatccagtaaaagttgaaccagatttgctcttgtaaaactgtgagcacatagatttaaaagaagcctctgcagaaggccttttcccaacggctggtacattaaaataacatcattgttagaaccaacagaagtataagacagtacttatgatacttcaattagaaaagtcaatagataagaacaaaaatcattgatttgtttagttgctagaagggggtagcgtaaaaacagaattactctaacctgtgcaagtcgtaatagcctgattagtgatttcaaggcatcagcattcacaagagggtctccttcaatctcttttactttcaagccatctgcagaagatgaaacagccctctgaccaatagtgactccaacacccctgtccatccccgtcagcctattgtatcccaaaccattcctccgattattcagcctgtgactacttccaaaaacactactacgagcttgatagtgactcattgctcggtctctgagcatctgggcttccgcaagtaaaggggaaggcaaagctgccaaaactgcttctgaagaagttaagagaacctgaaaatagcatatttcagattgttataaacatttgacaattcaaattacctaattcaaataaagagatacaaacctcttctcgtaaatcagcaggtagagtagcaataatcgaagcattatccatgtcaactggctgtccttgtgactgctgtaacatcctttgtgctctttgttgagcaagaacctctctttggatctctgggggaagcgcacgcaaaaattcaggatctatgtcgtctactgaaggtggttcataagttggaggctggacggactgagcttgctgagaagcaaggacttctgcccgcaaatcttcagggagcgcttccaacaatgtaggatcgatggcattcacttcaggtgccctaccatccaagctaccatcatcaacttgttcatcaatactcacatcgtgtgtagcttccatggatgagagctcattgttgtcaccgtccaaaggtgaaggttgtacactttgatttccctctgcaccatcactactcatatctacatcaacacttggttgaaaattagaatcaggatcatctactggaggagggatagcggtaacagacacattttgaataccggaagtatcagattgaccctgagcactggagataagatgcactgcttcacggtctacttgctcaataggtgctccacccccttccccaacttccattctatcaatctcattcggtgtactgttcaaaggaagagggtgcataacttcattgttatttaacagttcatgttcttcactttgttcaccaccttcgttaccatcacccaaaacagtttcgcttccaacagatggaggaacatccggctgctgctgctcttggacttctgtggtattagtctccctttcaacaacagtatctactggagcagaagcacgcaagttggtaataaaatgttcttctatcaactgggcaattgaagcagataggctactaggctgagggtgactacatcagtccacgactatcacaaccctcttcttgatgaaccatcccacaacagaataatcagcaaaggaggag

SEQ ID NO: 20227 - DNA, 1017 bp, Arabidopsis thaliana
tgttggtcgagtaatatgatgatttaaaatttttcaggttttaaacatcactcatactcgaccaatgtactcgagtgcaaggtctccatgtgcaacagataatttacaaaattttgcactccaacgggctatatactcgatctccaggtcttttgtaaagtaaaagttttgaattattactctatctccaccttgttcctgtgttcctgagaaccataaacacaactaagacaaatcgataataacaacaatagagaaatttatttacagagatagtcatgggaccttcctcccaagtgagcttgtataaagtctctagcttgactcctctcacttatcaagaagaaaatgaatgatagagagggtctgcatagtcctctctgatatcatcatcatacccagcgtcctccctggagaggtctgcagcagaatactcaattcccctttcttcaaaataggcttatttctcttctggagggtaatctgtctctttagacaatcttgaagtgaacttttttctcgggatagtgttaatcccgcctttaggttgagcttccttctgcatctgattcagcttactcctaagttcctcgacagagtgagctagcttctctatagcttcttcttgctcatcagacctctttttaagctcttttactttctcagtctcatatccttctcctcggatcactctatagtcttcagagtttttttcatcttctgttgacccttgtggaattttgttgatgccaaactgcaacttgatgtgctttccaaggttgagacttattttccctttcctgacatctatcacggctcccactgaagctaagaagggtcttcccaggattaagggatccttatgctctacttccatatccagcaccacgaagtctgtaggcacttctactccattaatcatgactggtagatctttcagcatgccgaagggttttctggaagatctatccgcaaggatcaaagtcaggtcacaaggtttgtactgaataaactcta

SEQ ID NO: 20228 - DNA, 963 bp, Arabidopsis thaliana
ggagccattctttccttctactcgaccccctggtcgagtgactttgtagccattcttcccttctactcgaccccctggtcgagtaacctcagcccaggccactcgatgacgttactcgaccccctgttcgagtatcacttcgccacaccacttgacaacactcggccattcactataccacattactcaaccccctggtcgagtatcacttcgctacaccacctgaccacactcgaccattcactctagcaatttactagaccccctggtcgagtatcatcactcaccaccatcaccttcactcaaccagacaagctgagcacaaggaagagaagaggagaagacaaagtgtttggaagcggcctggacctccatcggatcacgaagccaatctcggcccattatcattctatgggccgggcgattaggttattggcccgtctactatcattttatttcgttttgtataaatagatgtcttagggttctgtccggagacatctagtcgacattgagtttttgcttcagttttattttctgttttactctgctacgccgcttttgcttctacaacctgtaattcgagatttttccaagttattcagattccgcatttgatttcacctgtcatctactctttatctctttacttttgcaatattatcatttacctgcgtttatgtctttgagcatgttgtctgagtagtgacatagagttcttaaggatgggatagagtagttgtgcaatccgtagtctgtagaattgttaagttttagaattgattgaatcccttcaggactagttttgtttactgcttatttctttctgatcaactggaattcgatcccaagcattcccgcacccagaaggtgttcgatggaatgcttgatccactagttcctgagaattcgtctctatcccaagggatttgccgtttagagcgtttattaactttagcagtc

SEQ ID NO: 20229 - DNA, 691 bp, Arabidopsis thaliana
gtgatccataaatccttccactcatctctgtcatacttgggcttggttcccgttccactgggaaaccaaacaatccttccaaacgcttgattgacatcatataatcctgaccatacacagagaatctcaagaatcccaatccttcactttccaaatcattaaaggtcataccttggtggagctccacttgtagtgtggaaaggaactgaattgtttcttcctcgtaggctacatatgggtaagccatcagagtgtccaggtgacaactctggtacatgtgctgaaatcctccagtaatccaagctgtgctagggtagttgagcagggatactttgtgttgtagaactcattcagcttgaagagtctgatatactcctcagctggcaataacccaggcttgtgtagaggttttgtggctctatgagaatgctcaggcatatactcgacctccatctcctcgtctatcagctcatacctctctgtcactgctctcttccctagagctatctcagctcttctcctgaaattctcatattccctctgttctctttccggtcttaaagatgaaaactcagcctcatccaagttatagtcggaatcaattgacgaaccgccactatagttgctcataatgatcctgaaaaagattgagaactcaaaactcaaatgtcaataggttagtctcaaaaaa

SEQ ID NO: 20230 - DNA, 1171 bp, Arabidopsis thaliana
taacaacaatagtcgcaaatttagtcatcaaaaatgtaaccaagcagtcggtttttgataacaattcagtcactaaaatttccgactaaatgatatttcagtcgcaaatcagtcttaaatatagtgacattttagtcgtaaattttaatgactaattacctacaacgactacataaccctcaagttaatcgttaatttgtcgtctaatagtctctaaatttaacgaccaaaatgtcactaaaaaagcgtttacttgaacttagtcgtaacttagtcgctcattgacgactaaaatacgactacgttatttaccgactctcgattagcgacaaaatttaatagtcgtttatttgtcgtaaagaggtgtttaacgactacagtgagggtgttcattctcgtgagcgactaaggtagtcgtaatactgaagtcggtaaatggcaattttcttgtagcgcaaagaagcagaaagtctctcacagtgagggtctttattctcgtgagaaagatgcacaaaagaagaagaagaataaaaagaaggaagtagctgtcgaaactgatgaggacgaggacgagcaggatgttcagggagaacagcagtcgctcgtggatgtggtgtccaacttgatctctcccttaaactcaaggtttgacaccgttgataatagcatcaaaggaatgtcctcccgtctggatgtgattggagttcaagtagaatcgaggattgatgcaaagtttgaaaaaggtttgcatctattgagaacgaggtcaaacagattaaagagcatctgaagggcatagcttagtcagaattaaactctactagttatattagagatatgtttttacccaaaacgcagctaggctaccctaagccccaaacccaacagacaccagaaggtccaaacaaacctacaaataaccaatctgctactagtcctcctccggtaagctaatcgctgagttattacttttatttagttacgactgacttatcttcatattatacgaccgagttataacctttatttagttatggctgagttatcttcatattatacgactgagttataacttttagttagttatggctgagtgatcttcatattatacggctaagttataacttttagttagttatgtttgagttatatttataaataggtatgagtt

SEQ ID NO: 20231 - DNA, 514 bp, Arabidopsis thaliana columbia
ctcatcgacaatttttgttttttctgtctagatttctcgtttcttcactgttatctttgatttcaaagtctaaattcattagaattttgctctctattcattcccagtattaattttattgatctgaagaatggttggcgagaaaaagcgacaaaagaaaggtggcagtgcaggttcttcttcctcctcccagccatagtggcgcaccactaccgccggcgactcaccaccaccgcagacccaacctcctgtagcttttcacggtcgttttcacgtttcccttgcccaaaaatggagaatgagcgaattcacaaaaagtgactatgttcatcaccctttttctcgggattgagatgaatatgatacattgttctacaatgcttggttgaatgtggatacccacctactcggtttgcggattcggatttaatgcattgtatgcggatggagaagtctgcttaggattgctagatgatataggcttgagaacgatttgtactaggcagtatgattt

SEQ ID NO: 20232 - DNA, 562 bp, Arabidopsis thaliana columbia
taggagcttcgatccaagcaaaggggaaaagtgttggcttcatgaggcttcgatgcagccttaaacgctaaaatccaggccaagcaagatggagatagagagagatgatgggcaaatcaggttcgcagcagctgctgatggatgagaagatatatgttgcagtggggagtgacttggggaacaagtccactcttgtttgggcgatacagaacactggaggcaaggagttctgtatcgtccacgttcaccagccactctacagaaaagaaaaggaaaagacacaaaagatcctggacaaatacctacaaaaatgcaggcaaatgcaggtatgtttttgttacttctattgcgaataagtgatttgatgatacaagagataaagagagccgattgtgatattctaggtctgtgctgagatgatacacattaaaatggagtcggtagagaaagggatcatccaattgatctcagagcgcaatgtcaagaagctcgtcatgggagctgcgtcagacacacgctattcaatgtacaaagcacaccggcataactaaatagttttgga

SEQ ID NO: 20233 - DNA, 572 bp, Arabidopsis thaliana columbia
atcactacaatctccctccgtggtctataagtattctcccagactgcaaaaacacagtttacaacacagccagggtaagaataatcaatattcgcttcaagttgatataatgatatgagcaaaagatggactttttgttcttcttggtttttcctgagtactgacaaagattatactggttttggctgtaggttggtgctcaaacttctaggatgaaaatggttcgggttcctgttcatggtggtttatcttggcaagcatacaatgaagacccatcaacttacatcgatgagtcattcacaatggtcggattagtggagcagataaacactacacgagacacttcggattacctgtggtacatgactgagtaagtatccattgaacttgcaaatatgtttctatcatcaccgaatgcatgtggaagacttctctgaatgcattgtgacttcttcactaattgtctctttcttttgtttacagtgttaaagttgatgccaatgaaggatttttgaggaatggagatttgccgactcttactgttctatcagctggccatgctatgcatgtgt

SEQ ID NO: 20234 - DNA, 604 bp, Arabidopsis thaliana
tatgtttgtattctatataagtatcatatctctctgcgactctagtggttatgtagattcttgttcataatatatgatggactaatctcaccataaatcttattgcgttcttactaaattcatatcagtgacttacatttgtttcctgtctaagaaatcatagaaacaaactcataaaaagaagaaaagcttgtttcttcttgttgtcactgccttttacaggccttgcttaaccctggagcaatcttatcgaaaatgaatttgttagcagcctgcgtgaagtgtacaccgtcccacacaacagccttatcaggctcatcgcacggctttccaatgtaaacctctttacctttcacaatcttcttcatcccacatccgatacccttgttgtagttatacttccctccatgtccacaacacgaaaccaacgatctcttaaacccgtgaccctgagcgtgaacaaacaactcatgcttgagagagtagacatctacataagtgatggctgcttcagatagagaacttcttagctcgatcacagcttgtttcaaagcgtgattgaattgttgagctaagtggttcaaaggagaaacacatccatgtg

SEQ ID NO: 20235 - DNA, 557 bp, Arabidopsis thaliana columbia
gactctatacctgaaagacaagatgtgaaacattaatgccaataattatgacagaaacatacttcaatagttgaaaattaaacatatatagaccagatctgaaatgtgtgtgtcaattagagagcagtgtgtaagataatgaagtgcttccaaccaccataaatgctttgactctatgggtacatgaaaagatctaaaatttctgtcaaaaactactaatctataacataaatggaacaggtcaaggcctttaatccacactgaaacaagtggaaccaaccttgggaagaactggattgattttttgaagaacctcatcgacccgttcggatacatctctctgcaaaaccaaagaaagaatatcaaaagcagcaaaaagattttggtataaaacatgagaatcgaatcaatcaaaggagagtgacattacctgtgtatgcttagtagcattgattctggtaaagctctcaaactgattccaaaagaaagaagattcagaacaaaatcaaaacacaccacaacaaacacacaaagaaccgagaaattgcttactgaag

SEQ ID NO: 20236 - DNA, 686 bp, Arabidopsis thaliana
cgcaccgtcgtcgtcataggtctgttttgctcaaccggattgaggatgaattagagtcctaaactcacgccctactcatcattctgggaaggacaattttctttgaaaaagaaacaatggcactttcgagaatgttttcatctgaagagaaacttggcatgcgatacgacaacatatacaatatgtgaatggtacaaaggtgtatggtttcccaaatctacacctaagtactctttcatagcatggatcgcagttcgtaatcgcttagcgactggtgacagaatgctcaattggaatgttgccgtaagtggtaattgtgtcttgtgtcatgaggatatcgaaacaagggaccatctctttttctcttgttcatattcgactcaggtttggtccgctctcacccggcacttgcttggacaacactacacaactcattgggagtctctgatttccattcttacgactttaccaactccaaagctccatctctttgtcttgcgttatgtgtttcagttatctatccatagtgtatggcgggaacgaaatgggaggaaacatggggaaccactaactccacccaacatgctagcaaaaatggtcgataaaaatgtctgaaaccggcttagtaccttgctggactcccctgcatacgaaggcgggctacgatattggttccatactcatcc

SEQ ID NO: 20237 - DNA, 503 bp, Arabidopsis thaliana columbia
tggcatttcggctgtaagaaccacccattcttgatgaatcccactgaaaattatggttaacagatgttgcaggctctctcctataagaagaaccatttgagttcttgttcgacgcttggtttttggaactccggtgatgttggttagatgagatgttgactgggggcttcggaatatttgtaggcggagttttctcttctgcaacgaaaccatgatggcagtgtggacaaagcaatgtttggttgagataaaccctctggtactcatattgtgtgtcgcatttgttgcacatggtccaaaaggtactactctcctgtgtcggataaacaaaagcaggcgaacccgtgcgagatctatccatacgggcagcaggcttacgggtagcaggcttatatctagccctagcactcgaaactacatgctctcttacatttggaatcccgttggaagttggctggtgtgatggaactctctctgtgttgttgggatctttggtgagctgc

SEQ ID NO: 20238 - DNA, 543 bp, Arabidopsis thaliana columbia
gttgtgtatataatacatataacctagtcacaaatcatccaaaaagtcataagtaaacctaataaatctatgttaaaagcatatatgagatttttcttattaaatttaataaacacttccaaaattttctctctcattgtgcccttaaatacccctccatattcctccccaccaccttcacatccacacctttcttcaaacataccaaactctctctccctcttccctcttctctctagccaagttagatttcaataaggtcaaatcatggcgataaagaagtcgaacaaagcggcgttgtctcaagcagcatctctaaagcaaatcttgaagaggtgctcaagtctaggaaagaagaatcaaggtaattgctacttcaacgacgtgccaaaaggtcacttcccggtctacgtcggtcaacaccgaagtcgctatgtggtcccaatctcgtggctagatcatcatgagttccagtactcctccaactagccgaggaagagtttggtttcgagcacgagatgggtctcactatccttgtgatga

SEQ ID NO: 20239 - DNA, 715 bp, Arabidopsis thaliana
aagactttgtttatttattatggcaaacaaaacgaaagatagttttcaaatctctatataaacaaagtaaacaaaccccaaaatcataacacaaacaaagcttggaaatagccattatttcaactaagaaaaatgaaagtcacaagctactctcgaattctaataatcttggcagcacttgtgggtgctcttgttgttcccttgaaggctcaagacagccagcaagactatgtaaatgctcacaaccaggcacgatcgcagataggcgtaggccccatgcagtgggacgaaggacttgcagcctacgctcggaactacgcaaaccaactaaaaggagactgcagactcgtacattcccgtgggccttacggggagaacttggcaaagagtggcggtgacttgtctggtgttgctgccgtgaacttgtgggttaacgagaaggctaactacaactacgatacaaacacgtgcaacggagtttgcggtcactacactcaggtcgtttggagaaattctgtgagactcggatgtgctaaagtgagatgtaacaatggtggaaccatcatcagttgcaattatgatcctccggggaactatgcgaaccagaagccttactgatgtgtgatcatgttacacatatggcatatacacacacatataaaacacggacctgcacaaaggacgtgaatatatatttcaataagaagcatcatat

SEQ ID NO: 20240 - DNA, 569 bp, Arabidopsis thaliana
cttggattaacaaagtagctgatgctttctctattaagtccattagtttcttacccatcaatgctcattcgatctccgtcatgtgggctcaagaagatagaagcttcttcaacgatctcgagactgccacaacggaaagctacgggctcgtcatcaacagtttctacgacctcgagcctgagtttgtagaaactgttaaaacacgtttcctgaatcaccaccgtatatggaccgtcggaccgttgctcccctttaaagctggcgttgaccgtggcggacaaagctcaatcccgccggcgaaagtctcggcttggttagattcgtgccccgaggataactccgtcgtatacgtcggttttggaagccagatccggctcacggcggagaaacagctgctttagcggcggcgttggagaaaagcagtgtgcgtttcatatgggcggtgagagacgcagctaagaaggtgaactccagcgataactccgttgaggaagatgtgatccggcgggatttgaagagagagtgaaggagaaaggactcgtgataagaggatgggcccacaaactatg

SEQ ID NO: 20241 - DNA, 650 bp, Arabidopsis thaliana
attccagctaaggcatcgacagcaaatacatatcattgtttcagcttggttacaacagaatttataaggaatcttaagatactatattttagaaaagacatatagtttggttgaagttggcaccttcatgccacagcaggcatatccttgagccatgaatcaagcggtttaccaatggagtagacgatgaaaccgatctcacgcagcttcactgcatcaacaacattcctaccatcgaacacaaaagctggtttctgcatattgtcaaagattttcttgaagtccaaggatttaaactcatcccattcggttaagacacataggccgtgcgcatctttagttgcctcgtaagcatctgagacgacattcacttgctctgagataccttcagctttaatctgctgaagaggaacagggtggtcccagtcaaacctagccatggaaagatctcttctgatctgttcttcaagaacttgtgggtcgtatatgctcagcttggccttgtctgcaactaatctgttacaaacatcaatcgctggagtctctctcgtgtcacctgtgtccttcttgaaggcaaaaccgaggatcgcgattttcttgcccgagactgtgttaacattgaagaacaaccggtttcaaacgtatttctg

SEQ ID NO: 20242 - DNA, 545 bp, Arabidopsis thaliana columbia
atttccaagacattctaatccaggtcaaatctatggttatagcgagaagaggactaaccaaatgcctggttggagagggagacagtctgagtcactacgaagaatgagactagaatgttcaaccggaattcgtgggtgagtcatggatattgtgttcagtgctccatcattgtcctgccaatcttcatctctgtaataccaaatttgaacaagagattaatatagtatggtgtagctttaagtggtgataccaagttcaaaaagtctgacctgtagcctttataaggcagaggaatgtcacgaggaaattgccactgactcatctgcaacacgcggatgaaaagcagaggatgaatccccatcacacctgaaggaacagtcatcattccaagaggtttagtggtacgcttagtcgcatagctgaagtagaacgtgtttggcaaagtctgcagactagcgtttacgtcattgatccctggattgagaggtccggcaagatccaatctccacatgcagcaaaaggacctgcgtttccaagcagaaga

SEQ ID NO: 20243 - DNA, 476 bp, Arabidopsis thaliana
caccgagcaaaagaagcaaactcatcatcaatactttcatcaacagtcacccaaatagcttcctcaaggtaaaaccgaaatgggttccaattgttcaatgctttagtataaggacgccactcaaaatcatcaaaacagaaccacgcatccttagatcttcgatgcaaaccatgccactgagctattctaggttcacctttgggaatgtcactggcttttggtcttatgttcctgaatctttcccatgtccaaacttgtactaacttaaacaaagattccagatggaatttgtcaacacaatcttctctagatacctcatggattcgatccaaatctctgtagaggattgcgagaatagcaggggcaagagctatcctttcccctctagctaaacgaacagctattgggaaaacatgattcgagatattacgacgagatttaactggaaatacgaaaagcgaaagcgacaataccag

SEQ ID NO: 20244 - DNA, 601 bp, Arabidopsis thaliana
aatcccaaactgggaactctcaggctttgtcgagtacattccctcaggacacaaacaaggcgacatgatccttgtcgtgcctaaaggcgcattcgcagtacgtctaggcaacgaagcctcaatcaaacaaaaaatcagcgttaagaaagggtcgtactattcgataacgttcagtgctgctcgaacatgcgcacaagacgagcggttaaacgtttccgtggctcctcaccatgcagtgatgccgatacaaacagtgtatagtagctcaggttgggatttgtattcgtgggcttttaaggcccaaagtgactatgcagatatagtgatacataatccaggtgttgaggaagatcctgcttgtggacctctcattgatggtgttgctatgcgagcccttttccctcctcgtcccaccaatagtgagtgctcttttcttatacttaatttggggtctcgtttgaataaaaatattcttaatggggcaaatacggaaatatctaaaacatgttgggtttatttatgtgttgcagagaacattctaaagaacggaggattcgaagaaggtccttgggttttacaaacatatcatctggtgttttga

SEQ ID NO: 20245 - DNA, 504 bp, Arabidopsis thaliana columbia
gtttagttcatcaaaaaagacatgactgataattatattggttggcttaatgtgtaggtgaaggggcataaattgaatgacaacatccaagtactttccctcaagccttgttttctccgcatgattccaggtaattcaaaattcttcttcttcaagagtagtatcgagaccaacacaacattcgaattaactataaacacaacattcgcatttctagaagtggcacagaaagtgtcagtgacacagtgagatatatcactactaaatcattgtttaattgttaaagagactctgtactttactaactgatcgatgcccttagagtttgtaatatttacgtttatgccacagaggagtatctagaggaaagtcaggcgttgactcaggtacggagagtcatcgacattgtagcatgcaccaccaggttcttctccaaatctcccaacaaatccatcgttgccggcaatgcaatccgacaccggcgccggactggctcgacatggt

SEQ ID NO: 20246 - DNA, 612 bp, Arabidopsis thaliana columbia
tttctttctctatccatctgtctctaatcttttgtgcggccaagttcaacatcttttgattgtgtagtttctacaccttccttcaaaagttcaaactcttcctctgttaagctatgtttcacactgtttaaagcctttgctgcaataatcgactgtttctccaattccattgcccaactatagattaccatcccaacaatcgcaacaatcatccccgctacgtttttgaaagtcattgcagaatcaaataggagccatccaagcgtgaggatacagacggttttcatgtgaccaataacttggaacgatactgctgaaaaccgcccgatgcaaaggtactggcttatgttgcagaacacagctagaccacatgagagaagaatgaatagctgcaaattgtagaacattagccaatgataacataacaatactagcagagccatgaagagagatacttacaaagcaaccggaagacatattatacttcataatgaacttccactaagaagataatcaactaaaggaccgacaacaagaagcgaaaaagcttgaatcggcgctgttttactcaaactcaaaggcccaattgaatatttctctgtagagacctat

SEQ ID NO: 20247 - DNA, 668 bp, Arabidopsis thaliana
taagctatatttataattggagaaatatgcagattggttattgtttgttgtttaatttttcaggacaatcagaagacgaacatattggcggtacaaacactgcgtaacatagtaatgggagctacactgatggccacgacctgcgtgcttctctgcgcgggtctagccgcagtgttaagcagcacttacagcatcaagaagcctctaaacgacgccgtttttggtgctcatggagatttcgccatatccatcaaatacctaacaattctcacaattttcatcttctcctttttcttccactccctctccatccgtttcctaaaccaagtcgccattctcgtaaacatccctaacttagaccctaatccttctggttgcgtcttcctcacgtctgagcacgtcagcgagatgttcgaaaagggtatctttcttaacacggtaggtaacaggttgttctacgcaggcttttctctaatgttatggatctttggtcccatcctcgtgttctttagcgttttggtgatggttcttgttctttctcacctcgatttcgtgtcacgcaacaacaataaagaaaaactacgtatagtggatatacgtcgttcctctgattttacgaatggtggtgaagactaggaatctaggacgcaagatgacttttttggtta

SEQ ID NO: 20248 - DNA, 595 bp, Arabidopsis thaliana
attggaaaaaagggaaggattataatgctgagaatcgaattaagaggttaaggtttgaattggatgaagaaaagagttaccaatttccgtgttggaacaagatttctgttattcaaaatcagttgggtattgcctttagagaggaggaatctttctggagattgaaaagtagggataaatggatggctggtggggataagaattctaagttttttcaggcctctgtaaaagctaatagaattaaaaactgcttgagttttctggtggatgaaaatggtattgagcacactctcaataaggaaaaaggaaaaatagcagaacagttgtggatctgttcacctcttcttatcctgcaaatatggattcagtcttggaaggttttcagacgaaagttacacaagatatgaatcatgatctcactcagaaaattacagaacaagagatctataatgctgtcttttccattaatgctgaaagttcccaggtcctgatggcttcacggcgacttttttccagctcattggaatttagttaagaatcacattattgcagacattatgggtttctttgaaacaggcatcatccctgaagattg

SEQ ID NO: 20249 - DNA, 1036 bp, Arabidopsis thaliana
ctcgcaaggtagggtaacaaagaaggtccaagctccagatgtttgaacttgaagacgtagtgatccgtcggagttgtcttttcaagataatcctttcccttgaggtaatcgaggtcgaggaacttggtgttaaggaccaccaacaaaaagactttcgcaaatccccaagcgatggatggttgcagcatattctctatagctcaataggtggtctacaagaacaacagtcaacaaagtatctgctctatcacccgcaatcttcctcgcatccttggtctctctcaaaatgaagaccaaagcttgatcaatcatacatagctctccttcaccaacatctccagtagtcttctttggaaaaagggtgttggcgatacatttgtggaggtacctaatcacgggacttcgaatcgaagaactattgctcttggcgggcgagtagggctttggaccaacgattgttgcgaaagagagagtagctcatcttggtcataatcttggcagatttcctctccgcttggaaacccaaaaatagtatcaaggtggttgatatccagggcatactcgacacccttaaccttaaacgtaacgtaaccgaaacctcctctttcttctttctccgaatcattaacatgaatgtggactttgagggttgcaaggagttggcagctcttctctttaattaccccaaattggcagctcatgaacgttgcaagattggccaattccattaagtattccacatctccacaaataccaagctcttgcatcgtttctttatgtagttccttcaaacttcaattccttcaagtattgatagtactcgcttggggttggctatctcttccttcttgccggtttcttctcccaacaggggctggtgtatcatccccgatgatctcaacctcttcttcagaaactgcttcttcaaagactacctcttcttggtgttcttccgcagcctcaacaatcctcttgcccctagctacttcctccctctacattcttgagcgactagaacttcccccttgaatcgagc

SEQ ID NO: 20250 - DNA, 564 bp, Arabidopsis thaliana
gtgcaatcagattggaaggctcatgctaagacttgtggcactaaagaatacaaatgcgactgtggaactctcttttctaggtaacgacactcttaattatttcaacttgatttaaacatgttcttgatgaaacttaatttgtgcattgatacttaaagctaaggttaattatttactaggaagtagacaagagtgaatgatgcatgatgatactttggataagtggtgtaatgtgaaaactagtgacacatataatatatggtacaccatctgttggggtttttgactagtttcatttaattttgaataggacaaacatggtaattaattgtaagtagctcaaagaatctacatttaaacaactatttattattgtggtacttctttctaagttgttgtatttttaaatttcttgagtcctaaaatcgaaatcctttatacggctacacatttattgcatattgatctctcatcttattattcacacgtgacacaccccacacaaataatgcatatgctttagatggtcctccaaaacctcaaaaaaagtcatagttttgttga

SEQ ID NO: 20251 - DNA, 1325 bp, Arabidopsis thaliana columbia
caatggtttataggagctctatggataagcataaataaagaagctctaatttctaagtataaagagaagttgatatcaagtagttccccaaaagaaaagaagcttgcaaagctataagtatttgagaacaaagataaacttagaaaaaagattggaaaagagcaaagtgttaaaagaataagtctttcctaggtgactaacaaaagaggatttatcttgaggattgtggttcaaaaagaccaaagtttctaatgattggggttgaaaagaagaagaaaaaaagtttgcaagaagggtagaaataggagtttacatctaagacgggtagaacaacaagagctagactttgtatgcataaattgttcttggtcttagatggatttcatgattgtctagcattactattttttttagagaaacccaccaaaatgtaaatcttttgaaaccacctccaaaagccttcaccaagaccgattgagaatgatttatcttccatttgcgagaccgcgccaaacacttaaatgaatgttaaagagatgtttcaacttgattgtgagtctttgctaatagttggagatttgaaattgagctatgcactaagaagagtatggagaagtacgaaagagtatgatgattgattcaagcaaatttgaactatctttaaggactttgagttgaatccttcgtttgatattttgtggctatgaatccccaccttcaaacctctttcttttctatctcttagttcttgcttgaggactagcaagaaataagtttgggggagttgatatctagtgtttttgggtgttttaaaacctctttttctcttagtttttgttgctttgcattcatattttggcatatagtattgcatttgcatttgcatttggttttcttaggtacatgagtggagtttaaagttttggaagtaaaatggagcaaatggagcaaacaaatgagctacaagaatgcaaagtggccaaagaggagaagctagtaggacaatctaccaaactggtcgattgcgtggtcgattggtcaggaccagagctacggaggaatacgaatctaccaaactggtcgattgggtggtcgattggtccggaccagagctacggaggaatatgaatctaccaaagtggtcgattgcgtggtctactggtcaaggattaatgttgtggacgatattgaatctaccaagtgatctattgcttggtcgattgccttccttaaccgggtcaaaaccggtttgttctaggttgatcaggtttatttcatgttactagaaatactcttaacctagttttagagaaaaagagcttttg

SEQ ID NO: 20252 - DNA, 1000 bp, Arabidopsis thaliana columbia
tcatcaacaatctgtttgttgtgacagtttcatgctgagtcttgacaattgattgcacaaaacacacctcagagtacaaggaagaggtaaactttgaaatgagagttggaaagctattacccacatgtgtcaattgtctgtttgggtcactaaactggttcaggatataaatgtttatctgaatgttgcttgaaatttgatgctaacgaaaatcatttgtttgattgaggaatttcttggcaagaaagcacttatgagtttgttaagtgttttgagaataacaaaacagtttaagcccaaacccgtttcgaggttcagaagcccatgtgaattcaaggacgattgttcgcgtattggaaggaaaaagaggagttaggggtttgaggaatcaaatcaactatctttggaagtcgagaaggcaacccactgtactcaaggcaaatccttcataagtcgagtgaaagagagcttgaaatcgattttctcggctgttcatcgtcttgttcaacaacaatcagagtccgaatcatcttcagatctgtcagtctcaccgcccggtgactcgatgccagaaatttcacagcggagtgaaccaaaaatccaagaggtgatgttcgatgaagagctcactgtgccgaacccaaattggactatgctacctgtcagagatccaccaccgctggtaatcgaaattgaggacgagactccattgtcaactgatagagttcagaagtctgaaccaaagggtccaaaggctgctccttctcagccatctgtggcatctcgattgcgtaagcgaaagcaatctgctgcgggtcagagtggcaagcagatgaagcaggacaagggcaaggggatcgccgcttcatcttcctttgatggcatcctattcgtttcagcggaggctgaaaaaaggtatgccacttctctcaccgcaatttcaaagaggaagtagaactatctaggaagacagatgaggcggctagggagtttattgaga

SEQ ID NO: 20253 - DNA, 1192 bp, Arabidopsis thaliana
ttgtttgtgcccaaggtgattattgtgatttatgctaatattattttgttgatgtttctgcagatcgcccgatcaggtttctcgagccgtgtcccgatgaccttatttcctgtcatcgagagctgtcggcccgcaggtgtcactggacgaagcacttctcccgagatcgagtcgaaagagcactcaagctatttcacggtgtttcttgcccatccagttcagaatcctccgatcaccgaacgcagtttttcgtcgatatgcagacttctaagcccaccatccgagaagtttacgacaagaagagacttgccgctgagaagaaacgtgcggccgaggagagacgcgtcatggaagagagcggcgctgctgaaccttctagggctcgggaggttgttccagaggttgctgcacctgccgcgccggatgttgtcgaccaagtcccggctgatcctccgaccgaaactgccacacaggcggtaatcgcgcttcctgcgcgcgataagaccttggggaagcgtcctcagatcgacacctccgaggagaagaggtggaagaagaagaaaaagaagctggcgaaggaggataaacctcctatttttgaggacagagctgcttcggcgaaccttgtcgggaagtgcgcgggttgcctgcttccgcctctggacactctacttgagtccagaaaatatgacgagacgacatctcattttctctgggtaagtatttttcgagccgtttctgaaaatagttattttacgaaccgtttttgagtatgattgcctatgtaaatttcaggttgtgggttcaatgaaccggatggaagcctatgtgaacaaggagaatgctctcaaattagctgagagcaatctaaggatagactccgagtttgtccgctgtaaacgaatgcttaccgaggcgagggggctcagagacagcgaggtggctcaggctgcgcagaaagcaaggcgagaagcttcagaggtcttcctcgccaagtttaaggtggccgaggagaaaatggctcttctcgaggacgccaatgatcagttcatgtatttgtctcaagctcgagctaatgcgcagtgatcaaggtgcttgaggaaggtgggtctttagaagccgagaaagcccaggttgaagagtggctgtcagacttcgcaaatgccgaggcgaaactggtgcaagttacgtc

SEQ ID NO: 20254 - DNA, 1483 bp, Arabidopsis thaliana
cctacactaaaagacattattggaattctagcagggggggggcgctgaggtctgcctcgtgaagaaggtgttgctgactcataccaggcctgaatcgccccatcatccagccagaaagtgagggagccacggttgatgagagctttgttgtaggtggaccagttggtgattttgaacttttgctttgccacggaacggtctgcgttgtcgggaagatgcgtgatctgatccttcaactcagcaaaagttcgatttattcaacaaagccgccgtcccgtcaagtctagttcacgcactgggtacgctattatagtacaccaagtgagaacactagaacagtacaccattagtacacaagactagtacaccaaatgcgtacactatgatagtacacaaagtgagaacactagaacagtacaccacttcggtacactagactagtacactagccaagatagaatactaaaaacatttaggaaatgcaatggaattaaaaactataccctaaaatccaagatagattactaaaccccaaggaaatgaagaggtcggagaacatgatgcgatatcggatgaagaggtcgagtgactggctctcccggggatcgacgttgtcgttttgcttccagagcctgacgagtcggtatcgaatgctccatgtagtccgtttgttgtcactttggttcgtcgcgggttcgtagttttgagagatatcttcgagctatccccctacctggcgcgccaactgttgatgcacgaatcacacaagtacgaaaatgggatctctagggaaggaagaagaatctttctattaatgacgagcccgcgacttaggcgaattggacggattacaaaggatgatttcttcaacgagcataaatggagtaagaacgagccgattgtagatgaaagacgagcttgaggccggaagacgatcttgatgtccgaggaagaatagagtttattcgtcttatagctgaaccttgtaaaaggttgcctacgtacccttagaaagggatcaagctacacgttcatatcgtgataaacgagctaggccattactggaggaaggtcgtatggtagatgacgagccggcagatgtgcgacgagctggatgaaccgtggtagagaggcgaattggacaaaccgagttgtctgctgaaggtttagacgagctgggcgacgagttaggtggactctgcagtcaatggacgaactgccgctaggcgaggaggtagatgagttttgcagtcgagggatgagttgatagctagacgaggagttggacgagctgactagctgacagctaggcgaggagatggtcgttgagtgatgggaagagcttgaagacgagctgagcttgaggacgatctgatgagcttgagaacgagctaaggagcttgaagagcttgaagacgagctgagggacttggtgaagagaacgagttgagaagcttgacgaagaggagcgagctatgcggca

SEQ ID NO: 20255 - DNA, 804 bp, Arabidopsis thaliana columbia
  unsure (1)..(804): unsure at all n locations
gtataataagatcaactgatgtttaattttataggacggggttatatggtcagaatgatttgggtcgatattaatacgggatgatattatacaagtgaaatcttagatataacaatcaaaagggagatttgcaaaggtgccctttttctaataaccttttgcaacaatgccattttctgatggccatttttaaaactgtcccttctaatgtggaaaataacggtcttatcctcactgaataattagggtttcactttcattttgacaaacctattcaaattcgccgaggaattattctctctgataaaactcaaattcgacgaagaattgttctctccgcaaacctcaaatgtgccgacgaatagatctctccgacaaacctcttcttcgccgacgaatagatctctccgacaaacctcttcttcgccgatgaatagatctctccgagggaacatgaccaacacgctattccgtcgcaaattttgcgacgaatatttccctcgcacgtttgctagacaattgcgagaaaactgtgtgtaagtcatgattccccgcaaaaacgtagcaaatttatgagggctttgcgggaaacttagttccccgcaaattgcgacgcacttgcgacgataacttattctgtagcaatttttgcgacggagttgcgagtcttcgcgggttagggtctaggatgcgagtcttattataaatatttgaagtttataaaactaagacaagatgatgtttaattcataggacggggttatgtggttagaaatgattgtgtcgatattaatcngagatgat

SEQ ID NO: 20256 - DNA, 1300 bp, Arabidopsis thaliana
ttttggcaaaaaacagacttggaaacttggtaaagaaatacaaagaagcgtatgacaatctttgtcttttgcaacaagaaactcatgcaaaaccttctcctcttgtgatggcagcagaaaatgacgcttaccaacgttgggaccctgtagcatagctggaggagaaatatcttaaacataaatcgaagctccattggctagacgtgggtgacaggaataacaaagtatttcatcgagcagcaatgatccgtgagtctacaaatggtatcaaggaaattttgtgtcaagatggtagattggttgtgggagaggatgagaaacaagccgaagcagagcgtcaatttagagatttcatgcagtttattccgagtgattttgagggttcgtcggtggagtaaccaatcaaactttaatatttgtacatgtcagaaaactaaattaaaattaatccaacccaatttctttttaaactaaactttcaatgttataataaattttacattagcccagcccaaattgtttaaaagctatttttccaatgttattacatgggtctatactttctatattttgttttgttaacctgtttcgtttcaaactattgtttaacctgtattgaaatgatcgaagaagagaaagactcgttcttaaaactcgttgatgttcatcgaaatttgaattcgtcgaatcaaatcgactctgtttggggatttaatctcacgaaattcatgaagatgcaatcgaaatcgtcatcgtctgaggcaatttggtggaagaagactcatcgagcttacaacgattcgtcgtcgttgaataactcgaccgaacacatggctcagtagtgggtttcgacgtgactgagttggatcctgaaaactcgctacccgggtttgtggatgacgttccgataagcttgagaagatgggtgtgttacccaatgctgctaggtcgagtaaggccatgttcgtttcaccagtcagatggatcatctggatggagatgagttttgatgttcgtttgatgccaaaaacggttcattcagatgatccatccaaatgaatcatctggatgagttttaaaatttagacttaattttgaaactcatttggctgaactaaattggattatttggatggagatgattcagtccaaaacaaaaaatgacaaaataccctaattatttcaattgattatttagatgtattttttagataaacaacaaatagacttaaatcttattttacaattatttttaaaaaaataaaataaaaaatttcgatagaaccgcagtatcgaattt

SEQ ID NO: 20257 - DNA, 542 bp, Arabidopsis thaliana columbia
ggtacgagttacttgatgaaatgggtttggatatgaaaagcgaagacatgaacctaatctattacgcaaacaagtgaactacataacctaaaagcttgaacaatgattaaaaacctgaattgaccagaaatcgaaaattaaagttaccggagaagtgacggagagggaaatcggggaaattaaacgctggccgaggaaggaagagctgggagatagagaaagagaagtaaaagagctctgaagagcagacatggttgccattttttctcgctctgcaactttcactcttcttctttttccttcgtcctatccgttccacagatgacgataaaaattggataaacgattaaacgacactgtattatcactaaaccttaatgggctaggctaggttttaattgggccttgaattcaattcttttcatagcccaaatatataatatggttcccagttttgaactcgttttaacacgaaaaaacaaagaacaaattttcattcacaaatatagacaatctagcgtctaaaaacccaaaagaattga

SEQ ID NO: 20258 - DNA, 494 bp, Arabidopsis thaliana columbia
ctgctgctgaagcatcattccttcacgacgcttcttgagaagactatcctcacgcttgtttttcctaatctcgacgagattgtcctctctcctccgcctggcctcatcggcatcgacgcctgtcttgtatatcttcttccttagctccgcgcgtgtgctcggcctcagcgacatcgtttgttaaaatctctttctctctctcgttccctgaaggcaaaccacttcgtctggatcttcttccttctctctcgctctttggcaaaattgaaattggagaaattgggatcgtggaggacgagtcgtctggtgctttcgggttcggatccgggtcggagttttattggttgttggatccttcctcctgacagagaagtattgccacgctggcgcaaaatttttgttttttcagttaataataatttcggattttgttggatcttccttcttttcgaatcttttctcccaagaatcagagacttttttcgcaacatatt

SEQ ID NO: 20259 - DNA, 1362 bp, Arabidopsis thaliana
cacaagccacccaattgacttaagtctcttctcctctctcaaatctttgttgctcctcgatctttccggtgattggatatcaaaggctagtttaactttggattcatacattccatctaccctggaagtgttgcgtttggagcattgcgacatcagtgagttcccaaacgtcttcaagacccttcataatttggagtatattgccttatccaacaatagaatcagtggaaaatttccagagtggttatggagccttcctcgactgagctcagtgttcattacagataatttgttaactggctttgaagggtcatcagaagttttagtaaattcatcagtgcagatcttaagtttggatacaaacagtttagaaggggcacttccgcatctaccactctctatcatctacttctctgcaagatacaatagattcaaaggcgacatacctctttcaatctgcaatagaagctcgcttgatgtccttgatttaagatacaacaacttcaccggtccaattccgccatgtctcagtaacttactatttttgaatctccggaagaacaacttggaaggaagtattccagacacttattttgccgatgcacctctacggtcactcgacgttggctacaatcgattaacgggaaagcttccaaggtctcttctaaattgctcagctctacagtttcttagtgtggaccacaacggaatcgaagatacatttcctttttaccttaaggttttaccgaaattgcaagtccttctcctcagttcaaacaaattctatggtcctctatctcctccaaatcaaggctctctgggttttcctgagctgcggatacttgagatagctggtaataaactaaccggaagcttgcccaagatttttttgagaattggaaagcatcatcactcacgatgaatgaagatcaaggtctatatatggtatataacaaggttgtttacgggacctattacttcacctctctggaagctatagatttacgatataaaggtctgtctatggagcaaaatagggtccttagttcctcagcgaccattgatttttctggaaatagacttgaaggagaaattcctgaatctattggtctcttaaaggcactgatcgcactcaacttatcgaacaacgccttcacaggccatattcctctgtctttggccaatcttaagaagatcgagtcagtagacctatcaagtaaccaactctcagggacaattcctaatggaatagggactctctcgtttttggcatacatgaacgtgtctcacaaccaactcaacggtgaaatgcacaaggaacacagataactgggcaactaaatcgtcatttgaaggaaatgc

SEQ ID NO: 20260 - DNA, 527 bp, Arabidopsis thaliana columbia
atgtgtgcattagtacctccattgtttccaaactttgggtggccatcaacgggagagtacgacagctactacctcgccggagatatcctcaacaacggcgggtttcttgattttccggtaccggaggagacttatggagctgttacagcggtgactcaacatcagaatagctttggtgtttctgtttcgtcggagggaaatgaaatagacaacaatccggtggtcgtcaagaagcttaatcacaatgctagtgagcgtgaccgtcgcaggaaaattaactctttgttctcatctctccgttcatgtcttcctgcctctggccaatcggtaagaagctactccgactcattgattagacccgttatagtttatgcatctatacaatttagaagaagaatactgcgttaaaccttttttctttcctttcttgcagaagaagctaagcattcctgcgacggtttctcgaagcttgaagtacataccagagctgcaagagcaagtgaagaagctaataaaaaagaaggaag

SEQ ID NO: 20261 - DNA, 944 bp, Arabidopsis thaliana
cccgttgatccaactacagacgcattaatggccattatttggtccatatgtttttatgtaagggttataattgttatgtgccacagctgaagatgtaatacggcccattactaggcctaagtatcgtggtgcatatcattatgtatgtgtttggtttggccgataggtagggagatagacgttggacacatagtgtacgtgccaccgagaaacgccccaacactgtgggagatcggacaaccggaccgaaccgcggcagaattctatatcccagatccggacccaacccttttcaccaaactttatctaaattactcaaatcctcaagataggtaacatattaagcatctaattaaatattatttacaatatactttcctctcaataaaatacatatgtgttttacttaatttatgtaatactacagatttagacagtatggtctatgggatcgttacagtgttttgtatgctcgaaacgatcttgtttttactgctggagtgagtgactataaaaaagactggttctatgcccatgtcaacaggtaataatttttatttttatttttttgatgattcaaagtgttgttgtataaatcactgatctctctcgatacaaaaactatatattttataatatataggaaagctggaaatgggacatataaagcaacgacatggcaaattaagtttaatttgaaagcagtgattcaaactagaatatacacacttcgaatagctttggctgcagcctcaacaattgatctactggtttgggtcaacgaagttgattccaaacctctattcataactgggctaatcggtcgggataacgcgatcgcgaggcatgggattcatgggttgtacaaattgtacaatatcgatgttcatggaaagttacttagggttggtaataatactatttttcttactcatggtcggaac

SEQ ID NO: 20262 - DNA, 236 bp, Arabidopsis thaliana columbia
cacggcactgaattgagaaagagtactgcctaccacccccaaacggatgggcagacagaagttgttaataggtgcttggagtcatttttgagatgctttgcaggccgacgaccctcttcttggatgcaatggctaccttgggccgagtactggtataacacctcttatcacactgcaacgaagacgaccccattcatggcggtttatggaagagagcccccagcaattctcagata

SEQ ID NO: 20263 - DNA, 477 bp, Arabidopsis thaliana
cgctcacgagccttatggttctggaaccagtaaaagacgttcttgccctcaatctttccgaactgtctcagccttgcagtgatcttctggatctgatcggctgttggtgaccggattgcattgttgtagtaaagttctttgaggattctgatttgctccgtcgtcggtgtccacctcgtgctggtctggcgacacgtgtaaccaccagagccggacttgttgttgttgttgttgccgctttcttggtcggcttgatgatgatgacgctgatgctgtggcggctccatgtgtgtttgattcgacttttgttcacaaagttaacggtaaataagatcaagacttagagaggaacaagagaaagagaagtttgaagttagcaagaaaacaacttgctggtagtaaagagattttaggttttgtgtgagagagaagattatatatatatagagcgatagtaaggtattgagttatatatat

SEQ ID NO: 20264 - DNA, 567 bp, Arabidopsis thaliana columbia
  unsure (1)..(567): unsure at all n locations
actgttcaaagccatcaaccgaaagcagctcaaagcttgctcatttactagtgtttcctcgatttggtcatcctgataagtttctcttcaacacattgcttaaatgtagcaaaccagaggactcgattcggatttttgccaattatgcatcaaaaagttcgttgctttatctcaatgagcgcacttnttgtcttcgtccttggcgcttgtgctaggtcagcttcgtcgtcggcgttacgggttggtagaattgttcatgggatggtgaaaaagcttggctttctatatgaatctgaattgattggaaccactttactccatttctacgctaagaatggagatttacgttatgcaaggaaggtgtttgacgaaatgcctgagagaacctctgttacatggaacgcaatgataggtggatattgttcacataaggataaaggcaatcacaatgcgagaaaggctatggttttgtttaggagattctcttgctgtggtagtggagttagcctactgataaaccatggtttgtgtctttcaccattctcagacgggtttgctcgaaatggt

SEQ ID NO: 20265 - DNA, 565 bp, Arabidopsis thaliana
accgagctccatgcttttattaaaaaaaaaacgaatagatccaaaatgtttttttttcctttctatttgtcttctcataaaaaagtagcctcttttttaccatctcagccgctccacgcgatgttttcagagtctccagcgcaaaaaacaacacgcatgtcactatctctctcttcatttgactctgttccaatccctcactaactcgctatataaatatgagagccgccccatgaatttcatgcatcattcaacccccataacctacatgcaaaccatcgtcttaaaaccctagttctccataaaaaaaatatccttgaacacaaataaatggaaaacgaagtaaacgcaggaacagcaagcagttcaagatggaacccaacgaaagatcagatcacgctactggaaaatctttacaaggaaggaatacgaactccgagcgccgatcagattcagcagatcatcggtaagcttcgtgcgtacggccatatcgcaggtaaaaacgtcttttactggttccagaaccataaggctaggcaacgcgaaaagcagaaccaggagcgca

SEQ ID NO: 20266 - DNA, 929 bp, Arabidopsis thaliana
tgacatatccatagggtgctcaacggacccttttttataattaaaaaaagttttagcgcctttacattggtacacaaagagctttttttataacctaatcgagtgtattcatatttcaattattaagttccgaaatgtagcctattttttttatagataatattatcctatttcaataaatgcttattagtcattactaagaaaaagtctagtattgatatttagtcattttgaaatatcttttattggttttagttttaatagtagaaaataacaaatagaaaaaactaaatatatagatattctcatattcatgtactacttacccctagagactaccagataaaatagaacgatttgagaaaaggatataatgaaatttttgtcttttattggttcttctaatagaaacaaggatctgttttatttgaccgagaggaccaagaaaccaaaaaacaattaattataaaaacaaatagcaaatattatagaatagaataaaaaaaaaaagaaacaaagggaaagttcttattcgaagcgcctcgtgatcgtcaaccaattctgtgcttcaatataattaccaggagtaagcgttatagcctgtttccaatactcagcggcttgagcgaaccaagcctccgccatttcagaatctccttgttgaatggcctgttctccacggtcggaataggcggatcaattccctccctgagaaccgtacttgagagtttcctacctcatacggctcgacaaccaactcttttgttttggtgtaccagttttttaactttaacctactttgaactttatatctaattgaatgtctaattgaatgagatttcttatagattttttgtttttcttggattaaacaaaagagagtaattacatgagttcaaactttcattttgatttaattaatatattaa

SEQ ID NO: 20267 - DNA, 545 bp, Arabidopsis thaliana
ttcacttgctggggaagcagcttcttggctgaaacaacttaaagcaggttccctcaagacttggagaagcatcaagatagccttcttgaacaatttctacgatgatgctaagtctgaggagttgagacacaagctgtctaccttcacacaaggtccaactgaagctttcaaggctgcttgggttcgtttcaaagagtaccatcaagattgcccacatcatggtttcaatgaggtacaacttctaggtaccttcttcagcggagttgattggagataccagatggctctagatgcagcgagcaatggtaacttcaacacacgttatccagctgatgctacaaccctgattgagaactcacttgtagcacagtccaagaatgcttattttgagaggagaagatgctggactattcaggaaacagatgcataggtgaatctagctggatcggtcatacttgctccagggaagaacatgtcactttcagatgagttagagctattgacctgagctgagcagaggaagagcttctcatagatggcaggga

SEQ ID NO: 20268 - DNA, 612 bp, Arabidopsis thaliana
tgtccggcttatcgtttttgctctaataacattgtggtggtcaggatatacgaaaatggtctcatctcttcctgggagaatgttgtaaaaaaatgtggccaacataagcgattgatttgcctcaaataatcaaactatatgatttgtaattcatgacttagctaccacaagaaacttaactaatcaaattcaagaaaacgatggaagaaaaaaagtcacatacaaaggaagagatctagaatcgaacagtggttgggccaaagcagctaagacacataactctttccatggaagcttcagatttaggcataggatgattctccttgactaaatcagccgaagaagaagaagaagaagaagcggaggaaggtggacgagaagtgacagcgatggcacgaagacgagccctcacatctttgttgaaaaaacggagaggatagttcaacgagtttccacggcagcgatggccgtaccaccatccacgaggtgtgtcttgtgcttcagcacactcattactgctagtgaagttaggctaaagcgttccacagtaaaatgttttcttattcaaggttttggtggctgcgttttacgtaggtttttttttggagatgg

SEQ ID NO: 20269 - DNA, 944 bp, Arabidopsis thaliana
  unsure (1)..(944): unsure at all n locations
ctaaagacgctgattccgatctatatcggttatgagcacgtcatggaagtgggtacttacgccaaagaactgcgcggcgcgacgaaagagaaagagagcctgccgcagatgctgcgcggtttaagcaagctgcgtaatctcggtcagggttacgtcaactctcggtgaaccaatgccgttgatgacctaccttaaccagcatgtacctgactggcgtgaatctatcgatcccatcgaagcggtgcgtccggcatggttaacgccgacggtcaataatattgctgccgatctgatggtacgcattaacaacgcaggcgcggcaaacgccatgaacctgtgctgtactgcgctactggcatcacgtcagcgctcactcacccgcgagcagttaaccgagcaactcaactgctacctggatctgatgcgcaacgtgccctactccacggactctaccgttccttcagccagcgccacatgcttatcgatcacgcgctgcaaatgaacaagtttgaagtcgagaaagacacaatcggcgacatcatcattctgccgcgcgacaagcggtgctgatgacctactatcgcaacaacattgcgcatatgttggtgctgccttcgctgatggcggcaatcgtcacccagcatcgccacatctcccgcgacgtattgatggagcacgtcaatgtgctttacccaatgctgaaagcggacgtgttcctgcgctgggatcgcgacgagttgccggacgttattgatgcgctggcaaatgagatgcaacgtcaggggctgattaccctgcaagatgatgagttgcatatcaacccggcgcattctcgcacgctacagctgctggccgcagcngcgcgaaacgctgcaacgttatgccatcaccttctggttgttgagtcctaaccgtcgatcaacgcggtaactggagaaagagag

SEQ ID NO: 20270 - DNA, 537 bp, Arabidopsis thaliana
tttccaattccctgtgtatggctaattggctagtcatgttagcctttttatactgctcctgcaatttttaagtcaactataatcgtggaaagaggttgagaaatatgcagaggacattgatcatgaatttgcttcggttaaattaaagttaccgacctctattgccgcctctctggttccttggaaagagcaaacggtgaagcgaacggcttggagaagcaggggagctggaagaggatgcgaagtcacttgattccatatccagaaaccgaatatgatggctttgtccttgccatgatgattctagatccagtatcccgttgcttagagagtcatctgagctgtaatcttcatcttcgtcttcttcatcatacacacctcggttatgcggctctatcacataatctcccaacacaacagcacatggtgtcgatgacattatcgtgcttatcacgtctcttctgtctctttcctctcaagcctcttccatttagtttctaaagctggatcaatggctcttgggcaagcatgtgggtg

SEQ ID NO: 20271 - DNA, 463 bp, Arabidopsis thaliana
aatgtgttcaaagataagtgaagcaggctgtgttatacttaccagctctactgtatccaaaatcttttggaacttgtttccagtatttggacgacatggactttcttattcttcgaattgttggagacctatacgacttaaatttattgctaagtttatggtaactatagaatttttcatcatcatcttttctacctaggttagtatggttcccatgtctagcataggaaccattaggggtcatatccaaggtggatggtgattttaaatcaccacccacacagactgatttcggaaactgcagacctaacgcagttgcatcctctaagttgcaagtatcagtgactaagcctccatcacccacgcgatcggttgcttctccttgctcgaacccattatttacattcttgttttcacacctacatccatcaaaccatgaatcttcttgtaatcagacatcgga

SEQ ID NO: 20272 - DNA, 901 bp, Arabidopsis thaliana
taattgtatacaccttccgtcggagtgtttgtaccatggataaagcttgggtctggttaccaaggtaagacgttgctctcgttctctttactcttttttaatctcgttctcggtcggaaaaactttaagttttctaaaagaatttcgattttgattgcttacaggaattgccttgagtatgaggaaggagcgactaagtttctatttgattcagcaagctgtttgggtaatgtatgagatatgttttgcccttgtcttgattgccgcaatatggttcatccgtcaaatgagaaagtgttagagcatctagtgattagagggatggatattaagtataagagaagtaagtgttggagtaaacatggggatagaagtaacaatactgcagaacagacgtctgaatatgaggcttatgatttgtttagcacagcttttatggcaagtgaggagaagctaccatcgccgcaccataatgttgaagagtcagaaacaatggacagtaaagaagaagttgagttcagaaagaagttagaggatgcagaaactccattgtattcgacttgtctgaactacgcaaaggttagcgcaatcaagggactttacaggataaaggtcaagagtggtatgtcagagaattttcttgatcagcttctgagactttttcatgatatgttaccaggaggaaatgtgatgcctaagtctacagatgagatgaagagatttctgaagatttttggttttggttatgatttcattcatgcctgcagaaatgattgtatactcgaccggaatcaatatgaggacttgatgagctgcctaagatgtagtgaatcacgatgggaaaaggacaagcatacgggtgaggagaaaaaagggattccagctaaagtgttgaggtact

SEQ ID NO: 20273 - DNA, 641 bp, Arabidopsis thaliana columbia
gtagagaataataatcacatcaagattgattaaaaccctctcactaatcaccttcttaatcaccaccctctccggctctcaacagaacaacaacaaaaaaacagcttccgttgtcctgttccggcgaaatcggacggtcgagatcaatcatgcatcgtagagcagcaattcaagaatcggatgacgaagaagatgagacttacaacgacgtcgttcctgaatctccttcttcttgtgaagactcaaagatctcaaaaccaactccaaagaaaaggtttgtgaacttttttttggctattattacgaattgttttggaaaacaagataaatgatctgaaaatgttaataattgttgtgtagtaggaggaacgtagagaagagagttgtctcagttccgatagctgacgtggaaggatctaagagcagaggcgaagtatatccaccgtccgattcatgggcctggagaaagtacggacaaaaaccgatcaaaggctcgccttatcccaggtaaacagactctttttttaattaccgttgtgtcctttttgtcgttttaatcagcggcggcttagaaatgagaaagcgtagagtagccttgacggtggttgggctacgtacgcatctcgtagagttttgttgaa

SEQ ID NO: 20274 - DNA, 1420 bp, Arabidopsis thaliana
tgatttcatttaaacaaattggacgcaacatcaaaactcctaagagatgtcctcggttcaatatagtttacatataatttaaatttttaacaattgtttttatttttctaaaagttatttttaaaattatatatatatatatatatattgctattaaactataaggtttttttggataagtgttaacattttaaattttgtgtaaacaaattggacataacatcctaacccttaagatgtgtcataggttcaatatggtttagatgttaaatttgtaacccttattttattttattaaaaatgattttaaaattatatttttatattactattaagactagatttttttggataagttttaaatttttaaattttgtgtatggtttacacataattttaaatttgaacacttgtttttctttttaaaaaaatgttttgaaattatatttttatattactaattaaagtaataattctaaaaagaaaaattttaaagaaaaaaaaaactagcagaagttttgattatatgatttgaattttgatcattatggatattcacgttttttagtacataggtgataggactagaaacacctaaaacacttatgattaattaaagatcatggtatgttttatattagtctttcatttatctttattatgcttttttattattattcaattaatatttgttcaaatttgagtgagactgataataaagagattcaagcagaagaaaataaagtcaaacaaaaatggcggagaaaaagagagtcaagtacttcattgttgatgcattcgctgaatctgccttcaaagggaatccagctgctgtttgctttctagaagacgataacgagagagacgacgcgtggcttcagtctcttgccaccgagttcaatatctccgagacttgtttcctcactccgatcatcggagacttgcctcgcttccgtctccgttggttcactccagtcgctgaggtttccgtgttttcttttggttttggaattcggaattgttcggttgacttgttatcattgacttgatagatcctgataactagaacttgtactcattcactggctcttgtgaatctctctttgctttgctgttattgtgcaggtggatttgtgtggtcatgcaactttagcatctgctcacgttctcttctcaactggtttggttggttcagagacagttgagttcgacacattatcagggattctaacagctaaacatctcaaaaatgatgatgatggagaagaatcaagtatcgaattggatttccctgttgttccaacatatgaagtcaactacattgatgatgatctctctttgttctccaaagccttgaatggagctaccattcttgatgtcaaagccacaaagaaagacctcctcgtaactatatttcacc

SEQ ID NO: 20275 - DNA, 528 bp, Arabidopsis thaliana columbia
cttattgagacggtcaacaatccaaccaccagagtcttgtcttttaatcctcatgtaagctccacaacccattcttgaaggatgctgaaacccttctcttgaacaaacaaaccgtcttgatgtgatcgaaccgtcaactttggatcgaaacaactgacctatacgaactctaaacccaacaacttccgcatacgcctgataaaactggcacgcttcattagctgaaccaaactccaaccctgcatacggctcagtacccgtaaccgctttagcttgctgtgtttgatgatgatcatcactcacttctccttcaccaccaccacctttaaaccgcttaaaaccaccagggcaggaccgtgtttctctatcagactcatcaacaactttcattttgggtctatgtggattgacagtaacacctagctttgtaggagctggagctctcgaaggtcgcggagtcgtttcctcaacactaccttcacctccaagctcatggttatgctctttttgtatctggtcaagaaccat

SEQ ID NO: 20276 - DNA, 562 bp, Arabidopsis thaliana columbia
tcatacataaacccctaattactacatctactaaaagcatcgacacaaacaaatctgatctaacttctgagctctttctcaccggccggagagaaacacgggttcaaggttattatcaatcgactctttcacagcatcaacaagcaactgcgtattccggctaaacctcatccaaaacccatccggtttagctcctctgtttttgatttctccaaccaaccgagcaaattccataaccatacacgcctcttgtgaaagctcagtcattactttatgttcactaacacaacctccaccacttgtagtaaacacagcctcggtttccatatacggtataacaaaatcatgaacacgaagactacctttcgtaccgatcgcagttatctccatcgtcaaattcgccaagaaagaacagtaaatcgttgcattgaccccatcttcccaatcaaacaacgcaccacaagaaagaacaatccccgcatcgtttaaaacagaaccggacaaagcagtaacggtcttcggaagtttaaagttgttacaagaagaacgcttggatcgtata

SEQ ID NO: 20277 - DNA, 576 bp, Arabidopsis thaliana columbia
ctgcttgatttttctacgttgagaagctgtcgaatttcgctgtaaaagagcttggttccatcaacatatgggtaaagaaacatatttctttttgtacagtttgtaactttttttgtatctttagtcatatgtttgctcactgtctatattcatttggatagataaacaatgctggtactaacaaaggttttagaccgctactcgagttcacggaagaagatatcacacaggtaaaatcctttttgaacctaaagcttaatttcagcttgagcttatggtgaagttcattagtctaattgtaactattattttgtagattgtctccacaaatttgattggatcaattctatgtacacgaggggctatggatgtgatgagcagacagcacagtggtggacacatctttaacatggatggtgctggctctggaggttcaagtactcctctcactgccgtgtaagagctcaaatcattcgttactagtctctaatgaattagaacacatttctgagtctgtgagctctcgcagatatggttcacaagatgtggacttagggagtttcatgggctatagtg

SEQ ID NO: 20278 - DNA, 613 bp, Arabidopsis thaliana
ctaagaatctgtctttgcaggtttaaaatatataaataaacatctagtaacagataagagaaagtaagaacgtaccagcaatggcctcagctgcagaagaaatagcttcggcgatatgctcctcatcactcatcagtatcaactcttctgtaatcgtactcaagccagatttcaggctcagggcaaggagttctctgtaatcgcatcacaagaggagcccttgtgcaagtcctttgtcctcgaggcaacctgattccagccagagactcaaaaatttattacatttgattattcagaccaacgaaactcttgtaaaggtttaactttgcttgagttatgtacggactttcttttactgtctattttcttcttccaccgagcaaaaccatcatacgaagttattggttttattccacatttcctataaagaaattcgactttaactttttgtttttgatttgagataaatatcgtaattgagtgaatctgtgccaaatggttctttggtctagttagttactgtggattttaaatctcaaaatatgtttctttgcgactttgctactgaattaaaaaattaaaatagtcaaattctgtcatttaaatggaataa

SEQ ID NO: 20279 - DNA, 382 bp, Arabidopsis thaliana columbia
tgtgcgctaaagggagttttgggatgtttgacgtttcgtatcgagtagaaatcagagtgtgtgagaatgggatcaaaaaagtatccacagcaagataaagttgcgggtgataacaatagaccagctacgcacaattgcagcagtcaagctacccgacctgaactgcacgaccattgaatccgctatgaggatcattgcaggaactgcagctaacatggggatagacattgaccctccgatgcctgaacccagaaagaaagcagttctattgtagaagcctggtatcgtagtttctactccataatgccttattcgtttcacagtgtaattctccagcatgacgctgtagagaggtcgacatcatgatgcaacatgtatgtgt

SEQ ID NO: 20280 - DNA, 1614 bp, Arabidopsis thaliana
ttaccagtagattcgaaacacaatgctcaaaagttttgtgattataccgagcaatttatctccctggccttgtccacggcaatctgatgcaactgcgatacgtgcaacttctccacatttttcttcaaagaaagggaacaaagccgcgcaacgataatatgtccttccctttccacaaccacaaacgaatccaaagctcgcagaagctgaataccaaaaaccaattatcctttgatgctaacacctaaacaaaaagaagtagaatctaagctagtgatatggctaaaaggcaaacctcctcatcagttctacgaactaaagccccagattcttccaggggtttgattatttgtcttattccagcaagatcttccactttcgcctcccggtttccttcatatacatcactgtgacaagaatggtccatagttttgtaagaaaaatcaaaactttgcatgattcgaaagtgaaaacagttgtgtataccttgccaccatagtccccattccatctcttttgaaaagctccaacaatagcactccacttatagtaccatccaataagtgaactcttttgacaccacccttcaacaaatcaacgaatcagagctggatgtaaaaaagaggcacaagggttagctcaaggactcactctgcaaacgaacgctgctgcagccagttcagagagatatccattcaaacggctaattctctcctcaccgccaatagcaaaaccttgctccccagaccacaacccatttccgttgtcaaatccaacaccattctgaaaggtcggactgagtttttcccaaatcggtctcccaatatgattgttgggagtcgtcaccataccattgtaaccaagaggttcaggaaaactacttatgcctccatccccaacagccttcacgtaattggcagcgatctcgctttgctgtgcccgttttctgactaatgtatctgcttcctgaagagtcaagaaccgaacaagatgtccattctcatcaagaactggaccatccattatgcaaataagcttatctgctcctatagctaaagcacatgctgtagcaacctcataggtactgcagtgtagaagtaatgtcccaatatcagggtgacaaaaacctaatgtcgtcaagatttagcaagtaaattattaccaataaagagagcatacttgcaatttaagacttctccggtgctggaatggcccaagttcctcaataaaactacagaaccactatcaagcctctcacggattcgatctacatctatcttcttcactaaaccagttgctccaaaatcaacaccatcaacaacacctcttctctgccatgacaattaattagatcgaacatgacaagaatctacatccaacctaacatatcaacaaagtgaaaaactcacctttgctgcaaagaagttaccagtatcgaccctaacgcctgtttcatgcaaacgactactatcaccatgtcggcgtatattgtaaatagaaggtccgggagatagtttggcctcaatcattacagatattgctccgcagcttccttagcagcctgaagagatgctgagtctgtgactctgtaacgacctacatatgtaggctcgc

SEQ ID NO: 20281 - DNA, 866 bp, Arabidopsis thaliana
tctcaattcacgttatgacttcgttgtttccgatcatgttttgatagcagaatgtatccttctttctaggctgggaatgtactggttgactcagaaggaactgttaagctcggtgactttgaagtttcagcatccatgtttgatagtgtggaaaggatgcgtactagttctgagaatacttttgttggaaatccacgccggtgagtgcttaatccgactatagagagtagactttccattctaagctgttttctttagcttgaggatatctttgctctttctaggatggcacctgagaaggatatgcagcaagttgatggctatgatttcaagtatgtctgctgttttctagtgtagctgtactgccatcttaaaggagtgacttgcctaggacttattagttttctattcaactttttagagtggatatctggtcgtttggcatgactgccctggaacttgcccatggtcattcacctaccacggtgagtcttaccttataagattaaagttccatcatgcactgtattttcccctttatagtatctgtttctagaatgctctgtttttcatgattgttttcaggtgctaccattgaacttacaaaattctccctttcctaactatgaagaagacacgaaattctctaaggtcagtggaatggaatgattacacctgagaaatgttgatttcatctttcactcattaagaaagatactatatattgttgcagtcttttagagagttggtcgcagcttgcttgatagaagatccagaaaaacgtccgaccgcttcacaactactggaatatccgttcttacagcaaactctttctactgaatacttggctagtacatttcttgatg

SEQ ID NO: 20282 - DNA, 629 bp, Arabidopsis thaliana
tgcacctctactccagtgtttgagggctaatgtctctttaccaaagaactttcagatcatcaatttgggttcctctgccaaactagatattggtttctataatagccatgcgacatacaataacacgattcctgacattctcagcgacatatccagggttaaggagctagttattagtaatgatatttggaaggtatacacctcaaattttgtgctgatatgtatatatatgaatattgttttacaaaagtttctcaccataacattccctttttacttgtttacttctaatcttttaatactcaaaatcagaaccgatgcatcagtttcgttacctatccagcttggatgctaaattttctggaactgatatgaaaatattgccaacccttcttgaaagctgcccaaaactagaatctctcatattgataatgaatgactttaagcctctaatttatgcatattgtttgtgaaaatattttatgtatatttctctatgcaatttgttttcttctgtttttgcagaaattggttaagtagtattgcattcgtggtaagaagaagaaagaaccaaaggtgatgttttctaaagtgcctcaatgttggtacatcgcacaagtttgtggaat

SEQ ID NO: 20283 - DNA, 2106 bp, Arabidopsis thaliana
tgtgggccttagacagcccattttatttgacgagcaaaaagtaccggcaaaatgaaatgaaattgaacggacggcgaaaaccctaacaaaaacctccattcaccggcgaaaatgcgagctccgatctccggaattttctcgagatctctcggttacctccaccgtacgacgccgctatcctccgctactcgtcacctatgcgccgtcgcttctcccgaagctcgaacgaagaaactcgagcgaatcgccgacgatttactcaaactgaatcggattgagctttacgattactcactcctcttcagccataaaataggtctcaatcgctacggttccgccgtagctgttaccggatctgtcggcgacgcgtcagcttctacggagacgaaaacggcggagaagactactttcgatgtgaagcttgagaaattcgaagcggcttcgaagattaaagtgataaaagagatcagagcattcacggatctgggattgaaagaagctaaggctttggttgagaaagccccagtgattgtgaagaatggtcttactaaagaagaagctgagaagatcatggagaaactcaaagcggttggtgctattgtagctttggaatgaaactgagattgagatcaaaataagtattttgaatttttcgaaatcaaacaatgttgaaagcttttgagaattatgaatattgattttacaatatggttctgtgtgtttgcttaatgtgtgtcatcttcttgcttagattctcataactgaaatgccacttctatcagggattagcttcttcatgtaatactttgaatttcttgaaagattgattctttgtcttctactctctggtatgatctctattgagcattcttggaaccctcgtctcacaaaccaatccgctgttcgcgttgtgagtaggaacagcttctctaacccgagagatgaagctttcttctctatgtaatctgcagaaatagattgtgttgttgcattgaggttctctggctttgctttgcaaatgtaacagaaagggtttgagtttattcaccgagcaatttatcgccttggccttgaccgcgacaatctgatgcaaccgcgattgcagcaacttctccgcatttgtctttgaagaacggaaacaaagccgcacaagcgatgatctgtccttccctttccacaaccacaaatgaatccaaagctcgcagtaactgcatttaaagatcaaaccctttagcagtgtttttaaaccgatgaaacaatgagatgttgaagatagtaagggttgttacctcctcatcagttctgcgaactaaaatccctgattcctccaagggtttgattatatgtctaattcctgctagatcttccactctggcatcacgggttccttcgtaaacatcactgcacgtaacaggcaatatagaattgtaagaacacgaaaaagccaggagtatatgcgagtgaagacgaaaagaatgaatgtacctagcaaccatagttcccattccatctcttttgaaaagctccaacaatagaactccacttatagtaccatccaacaagtgaactcttttgactccacccttcataagggaagcaaagcaaacggtttcagtttaatggtggcaagtagaatcaagaccaacgtttaaaaagcactcactctgcagacgaacgccgcagcagccaattcagaaagataaccgtttaagcggcttaatctttcttcaccaccaatagcaaaaccttgctcacaaggccacaatccgtttccgttgtcaaatccaacaccgttctgaaagatcggagtgtggtttccgtttccccaaaatgaaacggctctcccgttttgagcagaagtaatattaccattggtgttgttaggaggttcgggataagccatgcttccatctccaacggcttttacgtaatttgcagctatgtcgctttgttgtgcccgttttcgaactaacatatctgcttcttgaagtgtcaagaaatgaataagatgtccactctcatcaagaattgggccgtccattatgcaaataagcttatctgctcctatagctaaagcacaagctgtagcaacctcataggtactgc

SEQ ID NO: 20284 - DNA, 522 bp, Arabidopsis thaliana
ccttttatgttcttcagcattacctttgacatcaagctgatcaccctctccatgttcatcctcttcatacgctatttccattaatattacttcagcagcaacaacaggaggatttgattgagaacccttgctaccattatcactttttgtttctgtctgatcgtcataatctgctgctgccccgtgatgatcagtcccagaataattcctccttatagactgtctcatcctcgaaaagctttccatagaatcaagtttccagaaaacctgcatgttaaatgatatcacattactaagaattttcttaacatgtttcaatttttcttttgttaaacatggcttacgcgttcaggactgcatattccatctccaaaaggcccaaaaaagcatcgcatctctgccaagtaacgaattagttttcgccaagcacggcttcccaagcatagacggtttgccgctatgatatcatcttgcatacgcctatcaatctggtgagaagttgaacaaaaatgagactcagta

SEQ ID NO: 20285 - DNA, 618 bp, Arabidopsis thaliana
ttcgatgatgaggcaaaccatctattgatgcacaggaatttgcctgctgtcagatgggtagggggtgttgaattagaacttatcgcaatagccacaggtaagtaaagtactcttaagcatctaatgctagtgtttgtatcagttatgcaaagctgatcagaaatttttctttttgtaggcggtagaattgttccaagattccaggagttgaccccagagaagttagggaaggtattttttttactttcactaggttttgcttgtaaaatgttaattagattttaaacagaccattgaaacccaacatttcctgatatatttcggctggcgtggttcgtgagacatcttttggcacaacaaaagaacgaatgctgtatattgagcactgtgcgaactcaaaagctgtcactgttttcatccgtggaggtaatcgccttgtcttttgtacttattagcactttagcagcactgttttgacttttgaatagctgatgagagataaacatcgatgtactgaatctaatgccttctaagtatatggtggacaacgatattgtataactgattgatcaacgatttgttgcggaatatggtttaggtaacaaatgatgatagaga

SEQ ID NO: 20286 - DNA, 640 bp, Arabidopsis thaliana
ccatttaattatattgcagattatgtggacctgaaaagcaaattaacataaatcaaataggaaggatctagaaacccttataggttcccagtccccacaccactatatataataacatccttccccaaagtctcgtatcaatcaacacttctctgctctctaaagaaaattttgctctctttatctctcgatttgattcataaaccctagctcttagattttttttccgatcaacgagaatggcggaccagaaacctttgctttccaagctgagatcaaccagttgctctccctcatcatcaataccttttactctaacaaggagatcttccttcgtgaactcatcagtaactcttctgatgtacgatctctatctctctacaccttattttatacttgtctgtctcgtttgattgatctggctgttcgatctgtagatttaggattgattagggtttagtgttctagccgattttagaattttggttggtaattgaagttgcgaacgtgtttgtgttcaaatctgttgattagttttagtgttgatccaacgattaagcagactcttgttagattacaaagtttgcttatatgtaatttgtatatacgtctgtgtattggttggttcttacgattgtga

SEQ ID NO: 20287 - DNA, 983 bp, Arabidopsis thaliana
cctttatcctgaggataccacttggttttcgatgttgttgtagctgtcttggtgcagaatagcaagctatgatatctcgctttttgtttattgtgtaagtctaaaacctgacttgctctccatgtattatgaatatattcagctctgaacaaagacaacgagatgatggagcgctgctggtctgtgtacactctcttcttgtcctgtctcttttttagcctcagcttgtgtatgtaaaatgctcctgttcttgcagctgttaaagaaggcgagattcgagagaagatactctgaatcattgcagagcgagtttgagagattgtggcttgttaacgagtaatacaactcatcagcatttccctcttcttctctgcaagagtctcagcttttcaatttggtttttttttttcccatcctcacaggagaatgaacggtagagagctcgagggtatgtcatctcgtgacctgctctcacttgacaatcagatattaaatgctttgttgggtttgcttgtccaaatgaatagaccaagggaggaacaagttgctgcaaggcacgcgagaaggtatagatttatcaatgtatacatgttccaagtagcaaatcgaaaccacttcttttagtctctaatcgtgtcgtactttgtttaccagaacaataaggaatcaacctcaaggttagctgaacaagagaggtattcatcggacaatgataaagatgatgacacttcctcgccatttctgaagaggaggcgcagagatttgaccaaggatgcgagattgctctgcgatttctgcggattatccagcagccgcaggtatatttctagagttttgttgttgaattatagctcctaggtaattggtatggaatccgttgcaaaatctgattctgcagtttttttttcttggtaagctattactgggctttgtagaagcagagataatctatctatagagatcatctagctctagcttctaag

SEQ ID NO: 20288 - DNA, 550 bp, Arabidopsis thaliana columbia
tgtccgtcaccttttgtaaaggcttgaaggcattctgtccattaacctcaaagttgctttgctcacgactggcggtgggagataattcaccctcttctagctcatgcttttccaccgatgctgcgttaaccatatgattcccttcatcctccattatctggtcatttttgggtgacacaaatttggaagactggataacctgtggaccataaaccaaaattagggtaatctatgtaaagtcttataaatagatacaatcatgactggtctctaatgattactcatcaagttttcaatttggtaactaagaaaggtaacctttcatttcatttcatcacaactgaagtgcatacgaactaagttataaaaagctccacacaaggagttacctcattagtcatagctgcatcatcctgaagcttatcgggctgggcagttttcacttttatattggctgagacatcttcccgagaagaacttccttgcatttttgtattatctttgctcagtcgtttcggggatattggatgtttacggtttgcccagaagc

SEQ ID NO: 20289 - DNA, 532 bp, Arabidopsis thaliana columbia
atcatattttcataccagtataaggcttttgcgatgaggctctggtaagctcaagcaataaatcgttggtggacttcacaatctcaagagctttgggtaggtatgcgtcagtggggacttgccggatgcacttgtagccacttaataaaaatgccaaaggcgccgaatttaaacgatgctgcattttacaaacaatcatcagttagatgtaaagagtacaacaaatataacagaattcgagaaatgcaacaaataaagcaaaaatccctcaaagtttatatgttaccttcaactcaaaacgtttcactagcgtctttatggagataaataaaggggaaagcatattgtcccaaatgccatcatctggcgaaatttcattatgtctgaaacagaaaggaatttttggtaaggtcgtttccaaatataatgcagtatatttctctctacataattttaaacagaagtgaacacagcttccaaaaatctctttaatgccacctgtggagaattttgaacaggtcccaagacagag

SEQ ID NO: 20290 - DNA, 500 bp, Arabidopsis thaliana columbia
agccacaacaaaatacaaaacttgatactttttaaagcaaccattttgaagtaaaagtgggaaaaaaacaacgagcatccttgaaaagtattttcgaggtcctggaagaagcagtaagaagttcaaccaattggaccacattagcagatcgaaaatggtagacgaagacaccgctcttgttagatacattccatagactattctcattgtatctatgaaactgatcattactaaaatatatgcaatttttcatcactttcgcctcaaccgttattcctagatctaaaatcaatgcttcgcctgctagagacttaatcgtttcccatcttgatgatttaggatccatcttgtagacggcgaagaagcataatctcgtcctaggatatggttccactttagctacaatgatcaaaacttctccagacaaagtgacaacaactttatgacccttccgcaatgggaagatggcaaagttgcacatctcactggagaatcattac

SEQ ID NO: 20291 - DNA, 689 bp, Arabidopsis thaliana
gcctttgagcagcttctgccttcttcaattgctgctccatttctgaaagagtctcctttttccctatttgtcaacacaagttaccacaatacattatgacccctaattgctaaagatttatgtggcagtagcaaaggattaaaatcttacttctagatgtaggaggtaatccatctgaaaaatcaatcgcgctggatctgccagaagcaagggctcgctgacgactagtcatggttgattccctcttattatcattaccaatctctttttcatcagacgccgtttcaatttcctccgcacaatccatgtcttcggacgcctgttcggacacagctttcttcttgccggaattttctccatttgtaatcccagatggcgtcaactgcttccttccagactcagtatcctcattacacacagagactctcttatatttcaacttttccaaataccggatctcatcatcgctgtcgtcatcgctatcgaaaactcgtttctttggggctcgtttgctcttgcgaaccaagccagatggttcctcttgttttctcctcctgtcatagatccgtctatctcagcatcccaagtaactccttcaagatcagccttcttatctagaggggaattacaatcttctgaactttcctgcaattaaataaaatttaatgtaagaagatacaaagttgaca

SEQ ID NO: 20292 - DNA, 1077 bp, Arabidopsis thaliana
gttttctctgggctgctccaatctcgctacacttcaggttacatcgcttatcaccctaaaacctcccagttggaaatctctcacctaatgtttgcagatgatgtgatgattttctttgatggaaagagttcgtctcttcatggcattgttgaatccctagaagactttgcgggttggtctggtcttctcatgaacacaaacaagacgcagctttatcacgcaggtttgagccaatctgaatccgattccatggctagttatggattcaagcttgggtctcttcctgttagatacctgggattgcctttaatgagccggaagttgactattgctgagtatgctcctctcattgaaaagattactgccagatttaactcttgggttgtgcgtctcttgtcgtttgcgggccgggtccagcttttagcttctgtgatctctggaattgtcaacttctggatctcttccttcattcttcctctggggtgtatcaaaaaaattgagtccctttgctctcgcttcttatggtctagcaggattgataagaaaggtatcgccaaagttgcttggtctcaggtctgcttacccaaagctgaaggggggattggtttaagaaggtttgctgtctcaaacagaaccttgtacttgagaatgatttggctgctgttctcgaatagcggctctctgtgggttgcctggcacaagcagcatagcctcggcaaatcaacgagcttttggaaccagcccgagaagccacatgactcctggaattggaagtgcctccttcgccttagagtggtggctgagcggtttattaggtgcaatgttggaaacgggagagatgctagcttctggtttgataactggacgccttttggcccactaatcaagtttctgggcaatgagggtcctagagacttaagagtgcacttaaatgcaaaaatcagtgatgtgtgcacctccgagggctggagcattgctgacccgcgctctgatcaagctctcagccttcatacgcatctcactaacatctctatgcctagtgatgcgcaggacttggattcttatgattgggtggtg

SEQ ID NO: 20293 - DNA, 999 bp, Arabidopsis thaliana
atctatgtatgagctatacaaagctcaatatccactattgtattgaaaacaaagaaaagaaacaaaactcatttaaggctcttacaaaattttaggcatacatatggaaggaaacatacttcctcacaacttggccgattcatcctctgacactcttcaacatttctattcttagttccttactaagcagggcctcaagaaacaaaatggagcttctttagcttcttcccttgcttatgtcccgaatatatgtctgtgaactggttgtgtatccaaattcttgataacctccatccatggtttctctataaccaagattgcactttttgatagatgtcgtaaatatagaactgggtgctttgaggttaccatttcaaacttctttctcttattactcttactctctttttgatactcctctaacctacgtttttgagcaccattccccaatttcatactaatgcttgcaagtttaccttctagcttttcggacagattgcatggtgtatccgtgtcttcgtcttgttccgccggcttcccaaattcaatcaaacacttagctctgctatgcaaccaaagatacaagtattattatcacaagggttttttcatttagtgaaaattttgaaaaccaataaagtacctggagctgtaaatgatgacagatgatgaacatggtgatggagagaatgagagtcctacgacctcaccaggaaaattttggtagctctttggcagacaaaaagtctgcagcaatgaccacttgctcaactctctagcctccacatccaatgcaaagacctggtttgaagaggtggagatcacaatcacattgttgtccctcggatgaaaaccagcggctgcaacagatgcaccatcaagccttgatatgaaccaatgctgcctgcaatcagaattagagcctgactgagaaaaatatacaagcaggtgcttaaatatatgcaagccaaacttgtattctctcagcacatattattt

SEQ ID NO: 20294 - DNA, 536 bp, Arabidopsis thaliana
gatgtataaccttcaagaacaataagtaaatctgtatctactgtctataatatatttgcgaggtgtatcattatcttaacaatataaatatatttgtttttgccgtacttaagtaatagggataattttccgatagagatgtttctgtaatgctttatattttaaaaaattcgtttataacaataaatattacaaatcaaccttgatgaacatgaaattaacttgctttgtccaagcaagaaaacaaacaataatatctagaaaagagaaacaaatcaaaacccattttacatcaatgggtttaaattaattatcttctctttcctaaaaaattaattacccctcccccatatatttaaccaccaaaaaaacggatttactttacttttttttttacatttcaaaacctccttcgtcggtccatgaactcatgtattctcttcaacgcaatctccaaagtgttctcactcatattagcaaaacaaaccctaaaccatccgacctccgagcagtggcacgaagatcccggagatata

SEQ ID NO: 20295 - DNA, 588 bp, Arabidopsis thaliana columbia
aataaccaatcttttcttatctcttgaaaatggaactattgttttgtagattttaacattcgatcattaatttattcatgggtatttctgtttcttctaatgttacaagctaacaacagagattatgagagtgaggtcagtttgcaagatatcaaaaatggctgaattgtcccaacaataactcaaacatgtcgtcgggggttagaagtgtcgttcctccaataaccaagttaatgtctggtcttccgctctctgacacagcctcttgagcttccaaaaccttaacaatggaggaaacatagacagttataaaaaatatagccctacaacgtgaatgcgaggtgacttttgtgatgaagaaactcacctctataccgttgatacctccaatgacaaagacaagaatgacactctggtctgccaggcttggttttgcctgcaatagcattgccaaacattaatgtatatcttgtgtaggaaaatgaaagtcatgggtagagagaaaggtctaactaccctgaccaagaccaaccttccaaatctgcttttaataaatcttccgacagttgaagaatggtatctaaccgg

SEQ ID NO: 20296 - DNA, 738 bp, Arabidopsis thaliana
atatctcttggagaacaattgagcgactcgcaccgcatccgttgcgcgttacgcggaacaaagtgtgccattttagagaagcgatcatctacaacaaaaatagaattattacctttttgaatcctaggaagacccaaaataaaatccatactcaagtcagtccatggttgcgttgaattggaagaggaagatataacccagcgttggttgcttgaccctttgctaattgacaagcacgacaatgttccacaaacctctcaacatcccgtcgaagcattggccaaaaatatgtagctgaaacaaattgaagagtgcgatcccgacccacatgtccttcggagtggagctcttgaatgacccttaatcgcgaactgcaattcggtatacacaattggatcccacggaacagaaaaccgtccgtaagtgagtaatctgttcttccactagctgcaacatctgccaaaatgggactaaaaaaggggtctgccttatataattcagaaaaagaagcaaaccctggtaccgccacatgcatcgttgttaacaacgaatgacgtcggcttaacgcattagccactcgattcaatttacccgctttatgtcgtatagataacttgaattgttgtaagaaagcaatctatgatgcatgatcagatgacaccttatcttgactatcaagatgttttaatgcatcgatgatcgtgaatatgataaaatcacggtgaaccaagtagtgac

SEQ ID NO: 20297 - DNA, 505 bp, Arabidopsis thaliana
tggtcgacgattttaattcttgctcatcgattatatcgaaccggtctagattcctcattgatctctccgatttatatcttagattcagtaacaagtaagccctgttcagctccgatctcgagcacccacgttcaattcccatcaatgagtaataatcctcattgccgttttctctgtttgtaattttctccttcatttgtttgatattagtggtcaatacacataattttcccgggatttctctgtaccggacattatgccgtttccaaaccgggccggttaatgaccggtcacgtaaaattgaattgaagaggagtttcaagtgttcgagatcgtgaagcgagtcggggaaacaccgtatcgatcggaacaattcagctctggtttctaaagcttctatgcacgacggttctagggctaggattaagttgcaatcggcgatggaatccgcgattcggccggcggatttataggcgaagcgcgacgaattaagcaatagacgagg

SEQ ID NO: 20298 - DNA, 1334 bp, Arabidopsis thaliana
  unsure (1)..(1334): unsure at all n locations
aagtagtgtgttgttatgttctctaacgaattttgtgagtgaatttcaggatactagttttttggacttcttatggctgccaataagactccctctccgcctacagatttagcactgtggataatagatcttttaaatgaatttgcggatgtgtttccacacgagctacctcagggattacctccaccatgggatatacaacaccaaatcgatttagttccaggagcagcacttcctaatcgccctcattaccgaatgagtccacaagagcatgaggagttacgccaccaattggaagatcttgtggctgcgtgagagtttgagtccatgtgcagttcccgctcttttaatccctaagaaagacggttcatggagaatgtgtgtagacagtcgcgccgttaacaagattacagttcggtatcgctttcctatcctcgtttagatgatttacttgaccagattgggaaggcaacaattttttcaaaattggatttgaagagtggctatcatcaaattcgtgttcatcccggtgatgaatgcaaaacggcttttaaaactagggaaggattatttgaatggttggtgatgccttttggtctctcaaatgtacctagtactttcatgagagtgatgaatcaagccttgcgaccatttatttgaaattttgtggttatgtattttgatgatattctgatttttagttcgtctttggaggagcatcaagatcatcttcgtcaaattttagtggtgttacaccgtgaagtttttttgtggcacaacaaaagtgtgagtggatcgtgttctttttctcggatatgtagtctcatcaaaaggcttgtctatggatttgactatagtctaggcagtaagatcgtggcccgaaccgagaacaacgtcggatgtgcgtagcttccatggattggcgtcattctatggacggtttgtacctcattttagtgcaatcatggcccctctaaccgattgtatgaaagacactaagctggtatggacgaatgaaactcgaggggcatttgaggagattaaacggacgcttacttcagctccaattttggcgttaccaaactttgaattaccatttgagcttcattgtaatgcttctaaattgaggataggagctgttttgagtcaacaatctaatccggtggcatatnttagtgagaagtcggcaggagctcgccatcgctatagtgcgtatgatatcgaattttatgcgatagtgaaagctattaagcgttggcgtcactacttggttcaccgtgattttatcatattcacggatcatgatgcattaaacatttgatagtcagataagg

SEQ ID NO: 20299 - DNA, 515 bp, Arabidopsis thaliana
ctaatctctcccacacaagagagatagagagaaacaatgaaactttttcttctccttctttttcttctccacatttctcataccttcaccgcaagccgaccaatctccgagttccgtgctctcctctcactcaaaacctctctcaccggcgccggagatgacaaaaactcgcctctctcttcctggaaagtctcaacaagcttctgtacatggattggtgtcacgtgcgatgtatctcgccgtcacgtgacttctcttgatctctccggtctcaacctctccggtactctttccccagatgtttctcatttacgtcttcttcagaatctatcactcgctgaaaatctaatctccggtccgattccgccggaaatctcgagcctttccggtcttcgtcacttaaatctctcgaacaatgtcttcaacggttcgtttcccgatgagatttcttctggattggtgaatctccgagttcttgatgtctacaacaacaatctaaccggagatttaccggt

SEQ ID NO: 20300 - DNA, 557 bp, Arabidopsis thaliana columbia
aatatttggcttcggaaaccaacaagtaagaataagataggattacttacgattagatgagccaaacatcttcctctgtagtttgacaacggatggccaagccaaaagaaattatattatcctgtagctggaaaaaagaacaatgattaggagaagataacaacagaaccaaatgcacataagcagcaccataccggtaaaagctggttttaaaaattcaaacacaataaacatccgtaaattatactatgaattcaacatcaacttaagaagttggttcctgcgctacagagagtagtagacaaaggacctagaaagtgtattgtaagcaggtatgactgagagaaagagagatgaggaacctaacgaacctctaaaaccattgaactaagcaacatcacaactagaaatcatcgggaactcagaaattgaatatgcaaaatgaatataaaacttgagcaaatccagcaataatatcagagctggaactaatcgaaatgaaactcgaagaaatacctatgaatccgatgtcaaagagagcagaacaaggacacacg

SEQ ID NO: 20301 - DNA, 590 bp, Arabidopsis thaliana columbia
tctttttactcattttgttcaaataccttatcttgcattactgtgttcgctgatactgctttgttattgtaaattgggaatgcatttggaccgtgtagattgcagaagatgtgagggaaaagtgggaaaccagtgataatccgattgttcacaagattcaggagtatgctaattgttctcttactatatctttcttaaaattttacttatttacagcagcttagagacatatgcatgcttttgtttggcagcatgaatgagaggatctttgaggaaacaggttctgcatcgacttacaaggagatccgccgccgagatccgtaagttatagaggctgattattggtatgaagatatgactctggtaatcatatacttatctctttcatggtcagatcattctccttgccggactttgtttcagaaattcaggaagccatcagaccggtcttgaatgcatatagtaaggtatatctcagatttttgaatagatcatctcctcccattctcgtttttgttgccctaattagtcccatccttgtacagggagatgctaagaccttgaagaagtattgcacaaggaattgattg

SEQ ID NO: 20302 - DNA, 507 bp, Arabidopsis thaliana columbia
cattgtatcatcaaaagtagtaaatactcaagaaggaagtccactgttaatacgtatattcaacaaacaaaagcatcttcaagcctttcttgctgtaaattgattccctgacttggaattatcttcaagcacgtccatggacagctttgtccagccatactgatccttaactctctttctttgagtcacaatgtagaagctcataaatatacacataaacgccaacattgcgataaatatgctcaggtttctcctatttgggcaagtactcagaatcatctctgttgaaacatacccatcaagactacccatcgagttattcatcttcatgatctcaacaccgttcaatatcgcatccactccatttccatcaacactagtcttgtttgatggtcaacactaacggttatcgacgatcctgaagggttgttgtcatcagcagtagcatccaccacgaaatcaatgtaatactggagaagctaaggacattatccgcagcgtatgaga

SEQ ID NO: 20303 - DNA, 544 bp, Arabidopsis thaliana columbia
gatctcgaaggtagttgagcgtcccttctcgtccagtggaactcatgtttctttctatctatctacatttttgggaaaagaaagcttttagtatgtgaataggaatgtatttcggcatttggctcctaaaagttattacatgctgcagtgatgtgggaaaccttttctatgggtagcgtatgagatgttagaagaggtttaaggcttgtttgtaaatccctaaaatgttttcacttgcagtctccaagtatcagagccaagacatgaaaagaacaatcataagacttgagcaggctgctcattcatatatgcaaagagccattgcttcccgtggtgcattcgctgttttatatggcagatattcaaaacactatatcaagaagcctgaggtaatattatcttattcgtttaatattccttgtatgatttgataagcttcttaagaattatagtagcacttgttgatatcggggttcttttttcttaacataggttttggtgggtagacaacagaagcctcgctgtggcattgatttgggagaga

SEQ ID NO: 20304 - DNA, 513 bp, Arabidopsis thaliana
aaagatggtgaatttgatgacccttcgttgtacatgtatttcacactcaatgatctcaaactaggaaccaaattgctgatttacttctacaaaaacgatcttcaaaagcttcctccacttctcacaagacaacaagccgatctcattcctttcactaagtcaaagcttgacttccttctcgaccacttctctatcaccaaagactctcctcaagggaaagccataaaggagactttgggacattgtgatgctaaagctattgaaggagagcataagttttgtggaacttctttggagtcattgatcgatcttgtgaagaaaacaatggggtataatgttgacctcaaggtcatgacgactaaagtaatggtaccggcccaaaattcgataagctacgctttgcataactacacattcgtcgaggctccaaaggaacttgttgggattaagatgttgggatgtacagaatgccttaccttatgctgttactattgcatggcataaaggtggaag

SEQ ID NO: 20305 - DNA, 539 bp, Arabidopsis thaliana columbia
cgactcgatcccccttccatatacaaaagcagtcatgcctcctcgctctctcgcaattcacaaagtatccaaacatctaaagttatcaattttacaacattaccgctataatctgcttgattctctgcaaaaagagaagactttttaccgagaagaagtcctctggctcattgaagaaactcaacgaaacaaacccagttctcatatatcgttttaaggtaaatgatcgcgacaatcttgttctcatttgtgtgtttttgtgtttgtgattagggtttacaaaagatactgagattagtttttttttttttttttttttttcagggattacaaaagctaatcgaagatgaatccagagaaattcacacacaagacaaacgagacaattgctacagctcatgagctagctgtgaatgcaggacatgctcaattcactcctttgcatttagctggtgctttgatctctgatcccaccggtatatttcctcaagcaatctctagtgccggtgggagaacgcagctcaatctgctgaaagagt

SEQ ID NO: 20306 - DNA, 203 bp, Arabidopsis thaliana columbia
atcagacacagacagcgaagaatcagaggtcagtggttctgatggagaggacacctcgtggatatcttggttctgcaaccttcgtgggaacgagttcttctgtgaagttgatgatgattacatccaggatgactttaacttgtgtggactcagccatcaagttccttactacgactatgcccttgactttcttcctaggtgga

SEQ ID NO: 20307 - DNA, 598 bp, Arabidopsis thaliana columbia
cccctctcatatgtatgttcctgcaaattaacacacaacatttcctttcgatcatttcaagtttttttcttaggaaaaaatggcgacaagtgaagaacctagtacggatgcctccataatatgttatgcgccaagcatgatcaccaccaatggtgtttggcaaggcgataatcctctcgacttttcgctacctctctttgttcttcagctaactttggttgttgtcgtcactcgtttcttcgtctttatcctcaaaccctttcgccaacctcgtgtcatctccgagatccttgtaagtaaccataaattctcaatttttttcattcgtggcggaaaagtttttttaactcaaaaccaattggcaaaaagtgaaataatacatatcacttcggatgagaggtttctaacattttgaaatgtatattttgatcttaaattatagggcggaattgttcttggaccatcggtgctagggcgctccacaaaatttgcacacactattttccctcaaagaagtgtgatggtacttgaaacaatggctaatgtgggtttacttacttcgtattcttggtgggtgtagagatggacattatggttg

SEQ ID NO: 20308 - DNA, 596 bp, Arabidopsis thaliana columbia
gtcttcactgacaaagacaaggctgcagctcacttgaaggtttgtcttatttgaattggttatttttgtcttgtaatgatataaatagtttatgtgctagaatttgcttagtatcattcaactaaatttgtgacttgttgtattttcagggtggtgccaagaaggttgttatctctgcccccagcaaagacgctccaatgtttgttgttggtgtcaacgagcacgaatacaagtccgaccttgacattgtctccaacgctagctgcaccactaactgccttgctccccttgccaaggtaaaatatctgatattctatatgatcaaatttgactttgtatttcaagttgaagtgactaatttcatttaacgttctttgatttcattgtgtaggttatcaatgacagatttggaattgttgagggtcttatgactacagtccactcaatcactggtaaatttatcaatcagttagaagtttattacaaacttgcttgcctataggtggaaaatttgtgatttaatggggtttgctttatgattcagctactcagaagactgttgatgggcttcaatgaaggactggagaggtggaaga

SEQ ID NO: 20309 - DNA, 1073 bp, Arabidopsis thaliana
cacatagtgtccgtacctctgatgttcctcggtgttttgagttgctgtggtgttgaggatattaaacatcagacgaacagaaccagcgttgtctagacagacacctcctttgtcggaacagaacaagtaagttccaaagggccagaattgttcattgctgcttctaggaacgaggtcgtggatggagaccacgtggcagaagttgtgtgctaaacgtgatcgtgaaattgaggtggagagagattggtttccgagcagaggagagccaaaggtgatacaaaagacgcggaatgacggcggagaagattgagatagaagccaaagtgcggtgaaagcggccaatgcgccgccggttgaatggccggttatcaccaccagctttttacctaacaattccaattccaatccttccttgatctgcacgttaatgcagtcgacgttactgtaaattggttgactaacaagaacaaaactgattatagattaccttccttctgagtgtacaatttcctctaataatgtaaactgatttagagactaaatttgccaattacttggtttaaccaaatttgaataaaaatcagttaagacacctctctagacttaccatttttacaacttatatctacattaatggtcacttcttgttttttctactcatcaaaaccaataggaacttgtttttgttcaagattttcatatccttagagacaaaacaaaaactaaaagtattcgacgaaaaagggaataaaatacatgatggtgacacaataatcatgggttaaaaactttttgagcgcacatttataaacttcgccgaggtgtgttaaagcataaagcgtaaagctaccaattccattaacattttttgttttttttggtgtcaaaaataccaatgacgtttcactcactaattagtaaattttttaaatcacttgggcggacggacgtgatggcatacaaaccaaactttcaattgacttgcttatgatatccaaaggtcgcgacaatgacatattccaaatggtggatttggaataattgtgtccacgaatctttttagaatttctgta

SEQ ID NO: 20310 - DNA, 553 bp, Arabidopsis thaliana
acaatctgctctgcctttttatctacataagtaccatctggtttggtatgagtcttgatgaaaacctcaccaacactcaccgtccttcctaactctttttcctgtgatgttaaaaatgaacaaggcttaatacaacatctgaacttaagacagagacacattaaaaaaaaacagagatagaagttaataaccagttcatgtttgatgttttgatatgactttggccctgacaaatggatgtgaggaccgagcccattatggtcagacaagcgagccttggaatatatcttactcctcgctattgcttcttcagtatcccaatactcacacatcgctttccagatatgagaatcgatgatccatttagggcactctcgactagtccttatcgtgctaaccatgtctttcatccttcgtttatagatttcttcaaaatgccattgaactgtacctgttatcaaaggatcccaatggtgtgtttctacaaataaaaaagagaagatgttagtgaaaacaaagcagcttaacttaatactcttaaggcaagaggaag

SEQ ID NO: 20311 - DNA, 692 bp, Arabidopsis thaliana
aggatccccttggctatttttttcataggtcacagagacagatacaagagggaactattatggagttggaagcctcaaagataatcttccggatatagtcactggaaagggcaaacatgcagactctacctcctttgtgtcattgcaagagcaactgaaagaagctcaacagaagatcgaagagcaggctgctcataatgctagacgtgaggaagagcaagtccgagctgtggctaaacagaaagacaagctggagcacttggccttggtggaaaagtatttgcgccaaactgatccagcctttctcaactttatggctactcaatcatctgaagcaaccataaccgatcctatctaatcttcaccatctcagtcttaagttaacttagtcataactctcatgaattcctcaaaccttttagttgtatgtcaaattactagaatcttgtatttggtatgttttggatattgaatttggtgtttttgaatcttttcaggtttttagtttgttttgaatcatgattttgtcttgttttttatgtgttttggaatgaatttggatacaaacaaaatcagacaaactattttttattgttttgcctgaaacggtagcgctaaactgtcgttaattggtcactatttagtcgctaaattgtcgcaaagtagtctatacacgagtcgatatacatgtg

SEQ ID NO: 20312 - DNA, 557 bp, Arabidopsis thaliana
  unsure (1)..(557): unsure at all n locations
tactgaagaagcaatagcgaggagtaagatatattccaaggctcgcttgtctgaccgtaatgggctcggtcctcacatccatttgtcagggccaaagtcatatcaaaatatcaaacatgaactggttattaacttctatctctgttttttttttaatgtgtctctgtcttaagttcagatgttgtattaagccttgttcatttttaacatcacaggaaaaggagttaggaaggagggtgactgttggtgaggttttcatcaagactcataccaaaccagatggtacttatgtagataaaaaggcagaggagattgttaaaaattatgagaagaagctgcaagagaagttgtctgaaatggaggcagagacttcaaatgtntcagacggggaatccagacctcgggagctcacaatagaggatcatactgtcatctttctagaggtaaagtttacattttcacttgcgatatgtctgcattttctcaagctctttattaatgggttggctattttttcataggcacagagacagatccagagggactattatggagtt

SEQ ID NO: 20313 - DNA, 1410 bp, Arabidopsis thaliana
gtaaaatagtcgctatatgttacgactatgttacgattaagttacgattaaactatataaacttcgattattgtagggattagtctgcgactaatctgtgactgagtaacgactacggtttcagagaaaagaaaaaaacgttattttgtatttctgatttatattgcttaatcttgtaatgctttctctaaattcttaactaaatttcaaaaccaaactcatgattcaaacaaacaccaaattcatttatattgtaaccaaaatacaagattcagattacactaaattctcaaaagacaacaagttttgacaagttcatgagtgttttgaaagagggagaagtaccttaagaagtagttggagatgagataggttctgtagttgattcaggtgaataagactcgatgaagtggagaaaggccggatcactttggcgcaaatacttctcaaccaaagacaagtgtgccaacttgtccttctgctcagctacagccttggtttgctcttcctcacgttttgcattataagcagcttgctcttcaattttttgttgagcttccttcagttgcactttcaatgccacgaaagaagaagattctcctaagtgtttgcgttttccagtgactagatccggaagatgctccttaaggttgcccgctccataataatttcctcgtgaatctgtctttatagactgtgaaaagaaagagacaaacaattactaaagagcatgagaatatgcagaccataattatgaaaatgtaaactttacctataggaagatgagagcacagtcatctgctgtgagctgccgaggtcatgattccccgtctaaaatatttgaagtctctgcctccatttcagacaacttctcctgcaatttctgctcatagttcggaacaatcttctccgtcttcttatcgacataagtgccatctggtttggtatgcgtcttgacaaagacctcaccaaaacctaccgtccttcctaattcctcttcctacaatgctaaaaatgaacaaggactaagacaacatctaaacttgcaatggactatgtaaaacaaataacagagagaacaagaattaatttaccatttctgattggatttgttgatacgacgttggccctgataaatggatgtgaggaccgaacccattacggtcagacatgcgagccttggaatatgttagactctttgcaattacttcttcagtatcccaatatgcacacatcgtttcccagatatgggaatcgatgatccatttaggacactctcgactagtcctcacagtgctaatcatatctttcatccgtcggcgatatatattttcaaaatagtattgaactgttcttgttacaaaggatccaatggtgtgttttctcaaatacaaagcatgatgtagtgag

SEQ ID NO: 20314 - DNA, 628 bp, Arabidopsis thaliana columbia
ttcacaaaacaaacacatgaacaaaacaccaatcgaatccaaaatcaatgaaaatttcttaccggaactttagctcctcgagccttcaagagattgtaaacatctaaattcccatagtactttgcatcagcagccgcctaattcaccagacaacataaaaatgtcaactttatccctaaatgtcaacttctcgaatctagagggttaagagaagaagacagaccgtacttccccatcgatcacgagcatcaatgttagctctccggctaagaagagccttaacgacaccaagatgtccctcacaagcggcgatgtgaagcgccgtccggccatcaagatcgatgctattaacatcaattccttcgtcaagaagctcctcgattcctctgacatcacctttgctagccataaagagaagctgcatcgtcgaatcgagattctccggtaccgacatatgtggctcgtcatcactcttggaagaatcaggactcctcctgatcggatcgagagaagactgacgaccgaaactaaacctcatgttggtcctacgagggtcaagagatgactgacgcgtgaactgtcggctcaatgttcgacgaatcgaaccagttgagaattgtcttgagat

SEQ ID NO: 20315 - DNA, 1369 bp, Arabidopsis thaliana
tatagttttttctcttgcattcacttaaatgtttagctgttaattatcttcactaacatcatgtctttgtatttgtagaaaatacaccattgggatcctttgattacaggaacagttcagtactattttgaagatatatgtcaaagacggatgaaagatatgattagcactgtgaggactagtcaagagtgtcctaaatggatcattgattcccatatctgggaaacgatgtgtgcatactgggatactgaagaagcaattgcaaagagtctgacatattccaaggctcgcatgtctgaccgtaatgggctcggtcctcacatccatttatcagggccgacgtcctatcaacaaatccaatcagaaatggtaaataacttcttgttctctctgttatttgttttacatagtccattgcaagtttagatgttgtcttagtccttgttcatttttaacattgcaggaagaggaattaggaaggacagtgggtattggtgaggtctttgtcaagacgcataccaaaccagatggcacttatgtcgataagaaggctgagaagattgcaaagaactatgagcagaaattgcaggagaaagtttctgaaatggaggcagagacttcaaatgtttcagacggggaatcatgacctcgggagctcacatcagatgactgtactctcatcttcctacaggtaaagtttacattttcataattatggtctgcatattctcatgctctttagtaattgtttgtctctttcttttcacagtccacagagacagattcacgaggaaactattatggagtgggcagtcttaaggagcatcttccggatctagtcacaggaaaacgcaaacacttaggagaatctttttctttcgtggcattgcaagtgcaactcaaggaagctcaacaaaaaattgaagagcaagctgctcataatgcaaaacgtgaggaagagcaaaccaaggctgtagctgagcagaaggacaagttggcacacttgtccttggttgagaagtatttgcgccaaactgatccagcctttctccacttcatcgagtccattcacctgaatcaactacagagcctatctcatctccaactacttcttaagttacttctccctctttaaaactagcatgaacttgtagtttagtgtttgaatcttgtattttgtacttctccctcttcatctccgaatgtagtgtgtaatgtttagtgtttgaatcttgtattttggttacaatcttaatgaatttggtattttggttagaatcatgagtttggttttgaaatttagataagaatagttgtgaatgcattacatgattaagcaatgtagatcagaaatagaaatgacattttt

SEQ ID NO: 20316 - DNA, 608 bp, Arabidopsis thaliana columbia
tgtaatatatttggattcaattttgttataggtattgtatcttattcatatgtaactcttttgttagagcctttacaaaaaatgtgagtagtgataataccgtttgttttggtttcttaattgaattttgttttatgagtaggagcgtttgcggcaatggcattattgggaagaatggatcaaatgctatctccgaaaggcatttcaatgtcagttgcaccacttggcgcagtctccgccattcttttcatcaccccttctgctcctgctgctcgggtaaatctttagttaaccgtttttccatataatagcggtctaattatatttgcggttaaacgcaaacgcttcattgtcttttctgtgagacaaaaaatgcaaataccaaaagtgagttgttaggatttggatggtgtgtaacaaacatagaggaattgaataatcaaaagtagaaagtagtggttagaggagacatttcccactaagttctatatccataagctagttgaagattttcttctaattttgttcttgtgcttacacttttctatggaataaatctagaggtcactattttatcgttgattgatactttcatatatttggataat

SEQ ID NO: 20317 - DNA, 639 bp, Arabidopsis thaliana
ttctattccccagcagattcaagttgacccaagcattcttgtacatgcttttcataagtgtatgcaaccaaccatgctcgttgatcaacgtacgagccatcaggcttttgatgtgttttcttcatcatagcaataaaagagtagtcttcgttgtttgcttcctataaaagaaacaataaaccaaagtgaaatagtagaaaaattatcagaccgaggagagtccttggctgtccctttgcctcattgaaagcagagctttcaccactactttttgggttatatggcggtatttttttggaatataggaggtcttaatagtcgatctcgtcaacggatagttagtagcttgattgcttccaataatctcctggtaggttgccttttggaaactcatgtggcttcagagaatgatgttgctgttttggcttcaaccttaccaggatggaggatggataataattattgctgttctgagttgggtaggatgtggattgtatgggacccgtcggtttctgttatggtcttcagaagaacagatcagcttatgatgtgctctataaagctgccaacattaatcagtcttttggtgttactttgtttatggtcgaatactgagatggagagaagcatctttgggat

SEQ ID NO: 20318 - DNA, 888 bp, Arabidopsis thaliana
tttgtgctctatttcatcagattattttcgtaagtgatttcaatgttactcatcatgtgtgatatactttgttttttagaaaagatttaactaggatgattccatcaactatcaagttgaaaaagagtttaataagcttgctgcttatcgcctcaaaggaatgataagccatgcaaaaagtggaggagaaaaaccagattggatattgtctgactactggaccattatgcaaaggcattgggcaactgaaaaagcgaaaggaactagtgagaaggctcgtgcttctcgaatgtctgatcgcaacggtttaggcccacattcccaccgagcgggttcacgctcctttctcagagttaaagatgttttggtagttatatatttcctttcttgttaatttctaatcgtgataatttttctgctgtttcactttggtttattgtttcttttacaggaagcaaacaatgaagactactcttttattgctgtgatgaagaaaacacatcagaaacctgatggctcgtacgttgatcaacgagcgcggttggttgcagacacttatgaaaagcatgtacaagaacgcttgggtcaacttgaatctgctggggaagagaatctgagagctgaaactcttgacaaccatgagaaaaatgaaatttatatcaaggtaataattctaaacattaggctggttttacactcactttaggcttgttagtctatagttttacattcactttagccttgttagtctctggttttacatttatttgttcttgtgatatgtgtagataaaactatcgttttataacacttgttagatgttaagtgtggttggctcaaggttaagtgttgacgggtttggtgctggcttctcaagggccctaactt

SEQ ID NO: 20319 - DNA, 1723 bp, Arabidopsis thaliana
tgacgactgagttacgactaagttacgattgaatcacatgtatatcgactcgtgtatagactactttgcgaaaatttagcgactaagtagtgaccaattaacgactgttaagcgactaccgtttcagccaaaacaaaaaaaaaatagtttgtctgattttgtttgtatccaaattcattccaaaacacataaaaaacaagacaaaatcatgattcaaaacaaactaaaaacctgaaaagattcaaaaaacaccaaattcaatatccaaaacatatcaaatacaagattctagtaatttgacatacaactaaaacgtttgaggaattcatgagagttatgactaagttaacttaagactgagatggtgaagattagataggatcggttatggttgcttcagatgattgagtagccataaagttgagaaaggctggatcagtttggcgcaaatacttttccaccaaggccaagtgctctagcttgtctttctgttcagccacagctcggacttgctcttcctcacgtttagcattatgagcagcctgctcttcgatcttctgttgagcttctttcagttgctcttgcaatgacacaaaggaggtagagtctgctgcatgtttgccctttccagtgactagatccggaagattatctttgaggcttccaactccataatagttccctcttgaatctgtctctgtggcctatgaaaaaaatagtcaaaccattaataaagagcttgagaaaatgcagacaatatgcaagtgaaaatgtaatctttacctccagaaagatgacaatatggtcctctattgtgagctcccgagattccccatctgaaatatttgaagtctctgcctccatttccgacaacttctcttgcagcttattctcataatttttaacaatttgctctgcctttttattgacataagtaccatctggtttggtatgagtcttgatgaaaacctcaccaacactcaccgtccttcctaactctttttactatgatgttaaaaatgaaaaaggcttaatacaacatatgaacttaagacacaaacacattaaaaaaaaaaagaaatagaagttaataaccagttcatgtttgatgttttgatatgactttggccctgacaaatggatgtgaggaccgagcccattacggtcagacaagcgagccttggaatatatctgactcctcgctattgcttcttcagtatcccaatactcacacgtcgctttccagatatgagaatcgatgatccatttaggggactctcgactagtccttatcatgctaaccatgtctttcatccttcgtttaaagatttcttcaaaataccattgaactgtacctgttatcaaaggatcccaatggtgtgttttctacaaataaaaaagagaggatgttagtgaaaacaaagcagcttaacttaatactcttaaggcaagaggaaggaaaactataccgtaaactcgagaaagtatttttctcgtctatcccgaggaacacatgatcagctatagaacagaccatcaaatttatttgtccatactttagtaatcttccttaacaggcttgaatttgtgtcccgagtaaacctgcaagcaatacagaagacacttaatacaatcaaaaccaatacacatgagattcaaaaccacagacaactaatcataacaaacacttaagactcaaaaccacagacaactaatcataaca

SEQ ID NO: 20320 - DNA, 618 bp, Arabidopsis thaliana columbia
caaacagtgttgatttacctctatcacttaggataataaagaggaagttacaagaagaagctcttaagaaagctagtgctactacttactgttctatcaatagagctttttcttctatggttttcatgattgaggagcttcatagctttgcgttgcagactagagtgggtgttcttaagcaggttaagaaggaaatgcacgcttcattgttgtggattttccaacgtgtgttctctcagacacctactttgatggtttatgtgatgatccttttggcgaactacactgtgcattcagttgcatcaaacctacctattgcagcatctcctccagttgttaataaaggtccggatcagacgcaacaaaggattgatttttcttcgttaaaggagtctacgaagcttgatgggtccaaatggttaggatcgatcaattttgacaaggtttccacttgccgagacatcgagactcggtttcaggagaagggatgagagaagaggaggtgagtctgtggaattcgatggtggaagaagcagatcaaatgcaagattcctctgttgatcgtgacatgagattgagacttgtttaccgatcactgcaagattgaattggatgata

SEQ ID NO: 20321 - DNA, 1333 bp, Arabidopsis thaliana
cttcatcgtcaactagcttttggatccagttttgagcccttctgtttttagtggcagcatgaaagaactttgtatttctgtcaccattattagcccactccaatctgcttttttggttccagaattgctcttcttggtaatactttttgtttggctcttttctcaagtctttgattactgggggatcaaaaggtagctgccaaggtagccgcgtcaatacgaaactggagctcgtggattcttaaggctgaactaggtttggtctgcctcttccatttggagatttcctttctacagctactactttcattttgcctccagaaaccagttattagatccacaaagccctccctttgaacccatcgcttgtcatacttaaacccagcccaggacttccattccattcccattaggctattaaataagggactgtgatcagaacacaccttctgaagataattcgcttgagtttttgggaaacagttcatccaagcctgattcgcaacagtcctatcaagcctacattgaaccagctcatcatttcggtttccaaaccaagaaaattggtaccccagatgcttgacttcccataaaccacacgcattcaacatctgtctaaactccacgcaggaggaatctctcctttgagccccaccaattttctctgttggatcaaccagctcattgaaattacctgtcatcatcaaaggtttgtctctagtcgttcccagcctggagagtttctcccacaaatcccctctttcgctttggactggtttcccataaacgcaagtcaggaaaaattccttattctgccatttcaccaaagcatcaatcatccgtttatttgactcaataatcctaatattgacactctccttccatattaaagctaaaccattgcttttaccaactggttctactgtatgcaaatcatagtatcctaggtggcctacaacattctctaggtaacttctcctgtttttagtctcacagaggaatataacctctgggaaatactaaccacgtatttcccttaggtgtcgaactgtaggggtattccccaccccctgacaattccaactcaatatcctcattgagatttcgaagggttagaattacccatcaacccttctttaaaattggtgtcactttcattcccacattttgtaccagaggaattaggacggttagctgccacagaggaggcagaatgatttgagacttgagctgccacaccggcagaatgttcagaatgacctgatttcagtagattatgagtactcgaggatgagccctgagagccaagacgttcaaagactaaaggagagtg

SEQ ID NO: 20322 - DNA, 592 bp, Arabidopsis thaliana columbia
acgttctatcaaacacataatggtaaaaattcaatgtacacaccttacctaaaaaataaaaattcaacgtatacaaataccaattctgaaagagaattattctaaaatgttgaaaaataaaataactccatcaaattactaagaacataaagtataataatataatcaaaataaataaatgaaaatattaaccctttattttgaaaagttaatcttatcaattttttcaaataacaatttctgcttcaaatccatggttgcatatccatgtgtttcgatttccttctttaaggagagacttttcccacattcctcttctgtaaaaatatcacttctacaattttaccaaattttcgattgttctttgaaattaaagacgagagtttctaacacatcaataactatccctcatagtgaggtgttttttctcttaaaaaataggattatctcttcagatattagtacggtagggtatcattctccctccaaaactaagaaatgaggatcctagcgtggaattgtcaagggacgggtgcagaccttactactcgtcgactgaaagagatgtgtcttatgtactcccaagtttttt

SEQ ID NO: 20323 - DNA, 189 bp, Arabidopsis thaliana columbia
  unsure (1)..(189): unsure at all n locations
cgactcacnccagacggatcaacccacaaaagtctcggtagttatccattatagattcctcgatttcactatctatgtaactggataaaaaaaaaaaaaattgattaaatgtatatggcacataggggctcaagcggtggagagccaaagaggcaactcgaagacattaagactgttcggagtgaacat

SEQ ID NO: 20324 - DNA, 575 bp, Arabidopsis thaliana columbia
ggccctgagagacataatatgttctataaggtcaatatttacctgctctgttgtcttctcgtggtctcgactttgcgagacaccttgaccaagcaactccctaactctattcccagagtacagctcagagagacagctatgtgactcagttatcattccaacccgaaaagcgcaaagaccaagttgtgccattgtcctgttaaagagaatctgtgtagagatgtccatgtgttgaatgttttcttgtagatgactcatcagcaacaagtctctagcagtaacaaaattgtccattaaagcatgttgatagatatcacatagcattgctctggctttggtcctctcatctccatttttgtagataaaggatacaagtgtatccatcatagctctgctgctctttgcgaaggtaggcttacgaggaacaatctccgcaacaacaatgaatgaagaagaagaagatccactttcctcgttagcctcctcaatttcctcatcagccaatttactcatagcatcaaaaacttcttgaggcttgtaatagattgactcgactagtataaaggctacctttg

SEQ ID NO: 20325 - DNA, 624 bp, Arabidopsis thaliana
cgccagtgtgctctaaaggcccgactcgtgtcgcgcgcgaactctccggtcattccggctacctctcctgctgccgtttcatcaatgaccgtcgaatcatcacctcttccggcgacatgacctgcatgctctgggatatcgagtcaggctctaaagtcaccgaattcgcagaccacctcggcgatgtcatgtcaatcagcatcaaccccactaaccagaacatcttcgtctccggtgcctgtgatgcttttgctaagctctgggatatccgtactggaaaggcagtccaaacttttgctggtcatgaatctgacattaacgccatccaattcttccctgacggcaacgctttcggaaccggttccgacgataccacttgccgtctcttcgacattcgtgcagacagatcactcaacacctaccaggtgagacccggttgccacactcattgtaggacagtattgttaacaaatgccacagagcgatcaaatactgtgcggtatcacatccgtcggtttctcggtttccggaagattgcttttcgccggatatgatgattttgaatgcaaggtatgttctgtctcgacgcctgtgattctggagacggtgactgaccgatgaata

SEQ ID NO: 20326 - DNA, 492 bp, Arabidopsis thaliana columbia
tgtacataatgcttccaagattttgtgtgtattccaactgagacacactttcaccttcattctttgaaagctttcacgttggatcaaacggagtaactaccggtatatcatcaaagtgaccaaacttctttagaactttcttcacataatgagattgagtaagtgaatacccatttggatctatattatttctaattccaggaattacatcagccaatcccatgtctttcatttcaaaattatcactcaacatcttctttgtgacattgataatgtctttatatgtatccattattaacatatcatccacataaagacattcaatcattgtatcctttttagtttcattaacgtagacacacttatcgcattcatttattttaaaaccattcgatctcattgtattatcgaacttctcatgccgctgttttggcgcttgcttaagtccatacaaagactttttaagccttcaaactttcttctctttccctt

SEQ ID NO: 20327 - DNA, 797 bp, Arabidopsis thaliana
caagtatctcatttctgtaggatccatgataatttcttcaaccgataaagcttagtcctttttatgtcaaacgtgatctaacaaagaaaattggcagcaacgacatagtggagaacacagccaaatactattattattgggcctaattaaagcccattaatgattctctttttttttttgttgttctcccttcctctcagcgcgaacgcaagctccgtcggcaatggcagaatcgacgagaaatctgactgggcttggaggagaagcagcgaaagaagaagatgatgagtacatgggagacctttctcagtttattcctcaggaacttagccagacctccaaaagaaaggtatcttcaggccaaaattttcatcttcttatgtccacaattgtcaagctcctgaatccaaatttgtccaactgattttgaataatctccaacaaatttcgtttagtttgatagctgaatgagattttgggattatatttaaattcgtatataaatgcttttgcaggaatctgagaagaaaactgtaatcgtagaaccatcacggaagaagttaaaaaatctcaattggcacgagagacgaagattggagaaagagaggaaacagatagaagaagatgagcagacattggctcgtatagtagacactccaataggagagtctaacatagggtttaagctattgaagcaaatgggttacaagccaggttctgctcttggtaaacaaggctctggtagagctgagccagtgactatggatattcgaagatcgagagccggtgtgggaaga

SEQ ID NO: 20328 - DNA, 911 bp, Arabidopsis thaliana
gtctttttgtttgttgctcaccagcttttgcattatgtaattaatccactagcaaaagattgagagagtctcagctccaaatggattgtgttggttacattttgtgatatttcttacacaatttgcaataaactattgtgtagggatgcaaaccaatggatcgaatggacctcatgaatggttctacttcagctagtccatgctcatcgtatcaacatagccctcgtgcttcctacaatccaagcccttcgtcttcatcattcccgagtcctacaaacccatttggtgatgctaactcactaatcccatggctcaagaacctctcttcaaactcaccttccaagcttcccttcttccatggaaattcaataagcgctcccgtgactccgccattggctcgaagccctactcgtgatcaagtaaccatccctgactctggatggctctcaggaatgcaaactccgcagagcgaccgtcttctcctactttcagtttagtttcaagaaacccgtttttcgacaaagaggcttttaaaatgggagattgtaattcaccaatgtggactcctggacaaagtggaaactgctctccagctattcctgctggtgttgatcagaactctgatgtgccaatggctgatggaatgacggctgagtttgcgtttggttgtaacgcaatggctgcgaatggaatggtgaagccttgggaaggagaaaggatacatggagaatgtgtttcagatgatttagaacttacacttggaaactcaagaaccagatgatcattcagagaagaacaaagtcgttgctacattaagtctcttttttgctgcttattttcagtgtgatgttaaggtactcagagaaaaagagatagaagagacaaaaagacatttgacctgttcttttttt

SEQ ID NO: 20329 - DNA, 557 bp, Arabidopsis thaliana columbia
tagttttggagatatgctgatagctattaccattagatggaaatggtgaataaaggagttgatatgagctttgagcggatccgaagagacttcagagccattgatttttctggaaacaaaatcaatggtaatatccctgaatcccttggctatttgaaagaactgcgggttctcaacttgtcaggtaacgcattcacaagcgtcatcccacgattcttggcgaatttgacaaagctggagacattagacatatcccgtaataagctgtcaggtcaaatccctcaagatcttgctgcactctcttttctgtcatacatgaacttctcccataaccatctccaaggtccagtgccacgaggccactagtttcaaaggcagaaatgttcttcattcttggacaaccctggactctacggtctcgaatatatttgtagggataatggtgccttgaatcctacatcgcagctatacgaggacttgtcagaggctgaggaaaacatgttcaaatgggtagcagctgcaataccgtatggccatggcgtgttatgtggattggt

SEQ ID NO: 20330 - DNA, 637 bp, Arabidopsis thaliana columbia
  unsure (1)..(637): unsure at all n locations
gtagaaattaaaagcaaattaaatgaagaagatttcgtgcaacattatagacgattacgtgtatatttaaagtatcatatatgaacaaaaaaaatgggaattacgtgcatgttggataacttttgtttatacctttggagaaaagggcaagagacaccccatagagttttgtatcgttgaaaagatcaccggaaagaccattttcggacgccgttgatttaagtccttcaagacaagtctgctcattggtgatggcagcactcagaaatgtatgaacatcctcggccctagataacgacagtgttttggtggaatcagccgtctgtgagctactaaggaggtagtccatagtcaggctggctaggaatttgcagtcttcgagagcccctactgtggatttagcagccactttgcctttccggtcaagttcagcgtcgatcatcgaaatgaaccggcgggctcgtgagagggatcttcgtagagacaaacgtccgtaggaatatatatctccgggctggtttggaagaacagatctacaataagatggatcggcgcgaatntacatatatttgacggtgaagtggcatttccaatggccggtatttgggcggagataaaaggagatggtacagaggag

SEQ ID NO: 20331 - DNA, 352 bp, Arabidopsis thaliana columbia
ttcccatagtcgttcaatatcacgatcgcggtctattgaagcaccatctctcttggcaagtttttgctgcaaaaacaagtaaaccccttcgattcagaacaagtaaacataccatttcacataaaataaatagcaaaccaaataagaatgatgttgcgtcttatatctcaacatcaaatgtgcaacaattagactccaaacgtagaataatgatatattcccactgctatatgcatgtgaattaaaccagtacacagatataacattgtgagacatcgtacacatccctgatgatgaaaaataccttaatcacggacatcaaaccagttttgaattgaagaacacctctacc

SEQ ID NO: 20332 - DNA, 746 bp, Arabidopsis thaliana columbia
tgagggtgtaaatgtaatttaactaaaacgctatttattactagtattttgtatttcactcgtgcataggcccattaaagacccaaattagaacgacggtcgaatgtataatattaaataccgataatagcctcatttctcttccgtttacttgtccgtgtgaccgtgtctacgacgttgaaatcgaaattaccacaatgtcctcgccggagcgtgctctcttgaatctattgacggacatcgctctctccttcgacggcgcaatcctcggactgactttagctgttagcgccgtcggttctgctctcaagtatgcttctaccaacgccgcgttgaagaagatcaaagatgcacccgaagtctccatttccgacctccgatcactgcttccggcttctgaagacaaatcagagactaacgataacaggaagagcaatgatcagcgaatcgttgtggttcgcggagtcgtcaaaccgaaaatttccggtgatgagggttacaagaacaacaacgtgttaatctctccggagactggagataaagctcttatcattcagagaacgcaaactgtacgttgctctaaaccctaagtgtttatgtttccctcaaattgcaattgacattgacctaattttgctttgtgttcttatcaaaggcttaggttaaagagtttggatgatttcttcatgattaggtgttcattgtgattgattaagttaggattatgtaagttggtactggtgtga

SEQ ID NO: 20333 - DNA, 901 bp, Arabidopsis thaliana
tgatcatctataatatatatacaagctacatatattctttcataagaaacgcctagagatggaaaaatatggattttgctataggatatatgcggagactcttctgactaaccagactggttggttgagtgagagctcagaaccaagttttatgcaggtactattacccgattcttggagttttgagtaatcacaatctcatgaacaagaagtattaattttcggtttttcttatatcctgtaggaaacaatctgtactagggttttgattcctataccgggaggactagtggagctctttgcgaccagacatgtatgtttatgtctcaataatgttaagtttatggttttttgtattgtggttgtttgtgatgatgtgtgcgcgtataggtcgctgaagatcagaacgtggtggattttgtaatgggacattgcaacatgttgatggacgattctgtaacgataaacatgatggtagcagacgaggtcgaatcgaagccgtacgggatgttatccggtgacatccagcaaaagggttccaaagaagaagatatgatgaatctcccttcgtcttacgatatctctgctgatcagatccgactcaatttcttgcctcagatgagtgattacgagacacaacacttgaagatgaagagtgattatcatcatcaagccttggggtatctcccagagaatggtaacaaggaaatgatgggtatgaacccatttaacacggtggaagaagatgggattccagtgattggagagcctagcttgcttgtgaatgaacagcaagttgttaacgataaggatatgaatgagaacggtagggtggattcagggtcggattgcagcgaccagattgatgatgaagatgatccaaagtacaggggatcctcta

SEQ ID NO: 20334 - DNA, 457 bp, Arabidopsis thaliana columbia
aatatagacaaaccaatatttgtagattagaacttcacataaactacgaaccaaaggattttagtagcttcacatcaaagaataaaaatctaagtttcacaaagaaacaattaaatgatttttgattttgaaaatttaataaatagccccacacaacacactcatcttccttcacagccttaaacgtggagccaaagaaagtaaaaacaaaaggagagcaatggactctgtttcttcttcttccttcctctcctccacattctctcttcatcactctcttcgtctgcgccgatcttcctctcctactctcatccgtatcaactccgccgtcgtcgaagaacgttctccaatcacaaacccaagcgacaacaatgatcgtcgtaacaaacccaaaacactccacaaccgaaccaatcacaccttagtctcatcaccaccgaaactccgaccagaaatg

SEQ ID NO: 20335 - DNA, 532 bp, Arabidopsis thaliana columbia
ggtaactgtcttctttgcattccatcagtttgtatgctcttgagagacttggcacttcatcagtatctttataaatattgtaatataataactcttacacagagcaaagtagaagggatgatctggaatctctaggctatctgcttatgtattttcttcgaggaaggtaaatcgataaatctgtattttgattttcttcctataattatagctgtccctgatccttaatttctgtttcagccttccttggcaaggccttcgtgcaggtaccaaaaagcagaagtatgacaagatcagtgaaaagaaaagactaacaccagtggaggtattgtttcccgctccaataaatataaacttctttggtatattgagtattgacttgcaatgtttttggcagtatttttgaattcaaagatctgaaattgaagtacttaaaaattgtctttgacaggtcctctgtaaaaactttccacctgagttcacatcgtattttctctatgtgcgtcactacggtttgaagcaaaccagatta

SEQ ID NO: 20336 - DNA, 883 bp, Arabidopsis thaliana
tccgagttcgttatattgtataaacgcttatgtttatattttcacagtgtttcttccctcaatacgttgctaagaccttacaaacaccgcttttcgtcatcaatgccgccttcgattcttggcaggttcgattttgtttttatgattattgttttcggtagaaataataacactagatatgatttggatttaacaattgtattactctttatgcacatcaagaatgtattggcaccaacctctgttgatataagcaaagcatggaagacttgtaagcttgatcttaagaagtgtacggccgctcagcttcataccgatcaaggtatgttttacctaccggaactaatgaacaaatctggctaatatcttctagactaaactgattggtttattataatatttcaggatatagagaccaagtgttggctgcgttggcgcctgttcgatccgcgacgacgaacggattgttcttggactcgtgccatgctcattgccaaggtggaagcgctgccacttggtccggcgacaaaggtcccacagtcgcgaatacggtaatcacttgattttcttgtacaaagtaaaaataatattggaaaataccacaaacttttgatctaagaagggtttataaaaatttacaaatggtttctatgacatttaagactttttagaatctttcataaacctgaaaataaaacataaatatgtagtatatttttcattattgttttggatttgttattttcagaaaatggctaaggcggttggagattggttctttgagaggagtacgtttcagaacgtagattgttcatcgcttaattgcaaccctacttgccctgcagtatctactgaagactaaaatttatcattgatgtcttaa

SEQ ID NO: 20337 - DNA, 637 bp, Arabidopsis thaliana
caagccttatcaaggacatttgggacgaatggagcattcgaagtaccttaatcttcagtctcagccttcaaacatttctcattttctttgcacctcaaagaaaacgctcatccagaaaagttttactctctttcatttggtcagcttaccttcttgctgattggtctgccaatttcgccgccggacaaatctcagatagtcaaggagatgatccagaacccggagaaccgaaaaagagcgccgagttgtttgctttctgggttcctttcttgctcttgcatctcggtggtccagatacaatcactgcccttgcccttgaagataacgagctctggctcaggcacttgttgggtcttttctttcaatcagttgcaaccgtttacgtgcttttgcagtcgttacccaatgctctttggaaacctattttgctggtgtttgcgaccggggtgatcaagtatgtcgagaggacattagctttgtacctggcgagtcttgacaagttcagagattccatgattcagcggcctgatcctggaccagactacgcaaagctcatggaggaatcgcagccaagaaagatatgaagatgcctacacagattatcaaggttggcgagcctgagaaagatcaagagacg

SEQ ID NO: 20338 - DNA, 836 bp, Arabidopsis thaliana
ccggaaatgcatgccgggatgcatattcgcgccatattttccaccggatgagccacacaaattcgccaacgtccacaaaatctttggagcaagcaacgtcacgaagctcctcaacgagctcctccctcaccaacgtgaagacgcagtcaactccttagcctatgaggccgaggcacgtgtccgtgaccccgtctatggctgcgtcggagccatctcttatctccagagacaagtccataggcttcagaaggagctcgacgcagctaatgctgacttggcacattatggtttgtccacatcagccgccggagcacctggcaacgtcgtggacttggtttttcagcctcagccgcttccgtcgcagcaactgcctcccttgaacccggtttataggctttcgggggcaagtccggtgatgaatcagatgccacgtggcaccggagggtcgtatgggacttttcttccttggaacaatggtcatgatcagcaaggaggtaacatgtgagagtttataaattatgagtattcatcctctcatctctctctttctatatttatgtgtgtgtggtacgaatacgatattatttgtttaatgcatggactgtgtgtgggatattatttcctagcgaattataaatgcatggactgttcttatttatttatgatgattgatgaggtatatatattttggtttttgattattattagtgtatgtttttcaataactaagctatgatacttgaacaaatatattttactagataattattttcttgattgtttttgtaatgttaggtccaaacatgatatagttttatccgtttcatttttagggg

SEQ ID NO: 20339 - DNA, 595 bp, Arabidopsis thaliana
cccacgtgccagtgtgctctaaagatgagcacccgcgccgttactattgtaatcgccaaacgctgttgccccattactcatcttgccatggatggtgttggcaaaacggtcaactttcaccaccccatcaacataggcaccgttctgatgctcccaaccggcataagcccccagggtatagctatcgatattacctttgccgccgcgatcaaaaccaatatcagaatgagagtaaccaaagatcaagccgcgaattgtactgctttcttcacgggagaaacggctatcgataccgagcgtcaggcccgtcaatgtttgctcaaaaccagctcccgcatcagtggtcacgttgttgcgggtgttaattgccgaactccacatcgccgtatcgtaactaacgccttttacgctaccaagacgctcacgcacggtgtccagttctgcatcaaataccagcggttgtgcggccgccatattcagcacatcagtggttgaaggggtaatttgcgcgcgattctctgccagactccagctatggttgccattatccagcaaggtatattcatacgtaccgatatcaacgagctcggtaccc

SEQ ID NO: 20340 - DNA, 863 bp, Arabidopsis thaliana
tgcaaaaatgaataaatttttacttggacgcttgcaaacgagacttcgctcacatattgtagctctctattcgtagtgatcagcttaaaccttgtttatgatacagcaaattgtagctctctacaaaggcttctacttcagaccaggtcttgttattcctcaaattagttttctctcccggatatataatgctcatcaatgttttcggtggagggtcatgtcaccagtaatctccgcacgaacaggcaccgtttttgaaatggtgaaacgttgcatgtctcgtactacaatttcccgtccggtcacaagggaaatgtactttgtagcattgtgacagtcagcacaaacccgcagttctttcttacgtgaatagttgtacctgcagttgtattcagcaatccaaaagatatagccagcttctcactgtgggtactcagcagttgctccttaacatcattttccacaccgaggactaaattcgtgtcaggaacataaccagcttctttgatgtggcatatcagcttctcaagaaacgcataaatcttcttggaatcgggatgggctgtgcttccagagaagaagctatgcacctcgttctttatctccaccatactgcagccaggagttttgcgcagaccctgtctcaacattgaaactctcacttgtcccactttttcccacattgaagctgcacgatatatgtttgcaagaagcacatgatacccaccatcatccgggttcaactcaaacaatctctctgctgctttctcagcgaaattcacatttttatgaatctggcaagcacctaacatggcaccatatacatttacagccggcttaacgggcatctgcataataaagtc

SEQ ID NO: 20341 - DNA, 544 bp, Arabidopsis thaliana
caagcttttgcaaatgcaagcaagcaccagcagctacgacttgtttcctgcatttctttgaagttacaagcagttccaacgccgagactgtgtaccgcttatccaatttcttaatcttcgggtccaagagctgaactagactgactacacccttgtcactcttcttgaaaatctttctgttactcgtgcacaccaaaagcgtcgatagagctttagaagctgcttctttctcttcaatggctttaccatctaacatatcaatcaatggaacgatacatccactttcacccatttcttttcggcttttcgagctgaaacctagcgaggaaacagcttccgcagctgcaattctcacaccgagaaccccacaactcaaaaccggaaccaaacgagggataaaccttcggatataacaacttctctcacaataggacacaacgctaagttcttcagaagcacaactccaacctcaagactcttaacactagaaacagaatcccaaaaactcttcaaacactgaatcctccttctctaacaacagata

SEQ ID NO: 20342 - DNA, 444 bp, Arabidopsis thaliana
tttaaattataatttgtaacgcaagaatttgaaaatgagtacaaaatctcttttattaaacgggttgaaaatagtaatagattgctacaaaagcatacaagaccggaatacaggaacgttgacggaaaaaaaaaactaagaaagtctcactctcacacattggttatttcactttaacaaattcaaaatttaaaacataaactctatagcttacatgcatttattcatactgtaacaatttcgaagaagatatttgtgcacgggcatcacatcgtatgcatagctgatatccttcaagcacattggaagccagacggaacctttctgttacaaacgttgagaagaacactgagagatatcgggacgttaaggttgataccaagaacgttagccctaagcgcagtgcaaagacaaatggcagcgtcgaggtcaaccaaaccttgg

SEQ ID NO: 20343 - DNA, 684 bp, Arabidopsis thaliana
tatatacaaataattacaaatatctataaataaattttaaactaaatcaagttggtcctcttcccatccttctaaaatcctataaataccaacatcttctcttcatatctatttattcaataacccttacaacaccgaatataactttgaaaaaaaaaacaaatggcttcaaagaactcagcctctcttgctcttttctttgcgctcaacatcctctttttcacttaaccgttgcaacaaattgcaactgcaagccaagtcctaaaccaaagccagtcccaagtcctaagcccaagccggtccaatgtcctcctccaccccgtccttcagtcccaagtcctaatcctaggccggtcacacctccacgcacccctggttcatccggaaacagctgtcctattgatgctctcaagctcggtgtatgtgcaaatgtcttaagcagtctactcaacatccagttgggacagccatcctctcaacaatgtgcttcgctcatccaaggtttggttgacgtcgacgctgcgatttgtctatgcactgctctgagggctaacgttcttggtatcaaccttaacgttccgatatctctcagcgttcttctcaacgtttgtaacagaaagcttccatctggtttccaatgtgcttgagcaatatccattatgcatacaattagtcttttaacca

SEQ ID NO: 20344 - DNA, 1242 bp, Arabidopsis thaliana
cgccagtgtgctctaaagtttgacttctatcgaataaatagatttggtagattggaaaagtattattatatacaactaagaggcgcttttttatcggctattcatcaccagatcattgaaaaccaactggatacagaaacaataactattagttatgaatttatcctctgtcaacatcttatcgcaaataccgagttcagctatttggcactccctgaaaattataaccgtttgtttttaccaaattcaaaaaaccaaacaaataatcgtttcaaaacgttaaacagcaaagctattggcaggctacttgctgctggtggcgtatacaatgggaacattgaaggattcagagatactgcggaaaaactgggtggagatgcaataaaaggctatgatcaaatactaaatgaaaaaacagcgggcatagcgatacgaacagcatctattcttttaacaaagcgttctaatgttgatacatatacagaaataaatagttacttaggcaaacttagaggtcaacaaaaacttcttgatggtatagacataatagaaataatatacattaagagaccttcaaaagacttagctaacttacgaaaggagtctaataaaactgtaagaaaaaattttcttatcaaacttgcaaaaacctccgaagcatctggaagattcaacgccgaagaccttttaagaatgagacagggcaatgttcctctaaattataatgttcaccataaactatctctagatgatggtggtactaatgatttcgaaaatttagtattaatcgataacgaaccatatcataaagtttttactaacatgcaatcacgaatagctaagggaatattagtaggtgaaagcaaaatcactccctgggccattccatctggctcaatttatcctcccatgaaaaatattatggaccacacaaaatgatgactaaaacccaaataaataaattaataaaaatgatgaatgatttagactatccatttgaagcaccgctcaaggaatcatttattgaaagtataatccaaatagaatttaattctaattcaactaattgcctggagaagttatgtaatgaagttagtattctttttaagaatcaacctgattatcttacttttttaagagcaatggatggattcgaagttaatggattacgattatttagcctctcgattccagaaccttcagttaaaaacctttttgccgtaaatgactttagagcacact

SEQ ID NO: 20345 - DNA, 1030 bp, Arabidopsis thaliana
gaatttgatgtctgtagaaggtgaaaagttgagtcctttacatgttttgtcgggtttgattcgaagttaccaagcttgtggttcgagtcctgatgtgtttgattcattggttagagcttgtacacagaatggtgatgcgcaaggagcttatgaagtgattgagcagacgagagcagaaggtttttgtgtttctgttcatgcgttgaataattttatgggttgtttattgaatgtgaatgagattgataggttttggaaggtttacaaggaaatggattctttagggtatgttgagaatgtgaatacatttaatctggttatatattcgttttgtaaggagagtaagttgtttgaagcgttatctgtgttttacgggatgttgaaatgtggggtttggcctaatgttgttagctttaatatgatgattgatggagcttgtaagacgggtgatatgagatttgccttgcagcttttagggaagatgggaatgatgtctggaaactttgtttcacctaatgctgtgacgtacaattctgttatcaacgggttttgcaaggccgggagattggatttggcggaaagaatccgtggtgacatggtcaaatcaggtgttgattgcaatgaaagaacctatggagctttggtggatgcgtatggtagagctggaactcagatgaagccttaaggttgtgtgatgagatgacgagtaagggacttgtggtaaatacagttatctataactctattgtttattggctgtttatggaaggtgacatagaaggagctatgtctgtgttgcgtgatatgaatagtaaaaatatgcaaattgatcgatttactcaagccattgttgtcagaggtctatgcagaaacggatatgtaaaggaagctgttgagtttcagagacagatttcagagaagaagctcgtggaagatatagtttgtacaacacgcttatgcccattttgtaagggataaaagctggcgtgtgctgatcagattctagggagtatgttggttcaaggtttga

SEQ ID NO: 20346 - DNA, 1123 bp, Arabidopsis thaliana
tatttgtacatagatatatctttgcaagagtgatcaaaattcccaccacatacgtaaacttaattatgtatcatagagcttaatgtaactaacatttacacattatcacgattcatatacaatccgaacataaccctccattcgtttcatcgcatgcatgtcaaaatagaaataacccacatgcaagaatctgaaaataagacgttgcttacaaaacttctttcggtaaataggttgaaaatagagaaatatattgcttcacaggtatacaaatggcgaagacgggaaacgtttacaaaatgaaactataaaactctcacatgtttattctatcacttaaacaaattcaaactgaaacattaaaacctaccattcatgcatttattcaaacagtaatgattttaaagagaacactgcgcgcatgaagagtatggatagccgctgataccgcttaagcacattggaaattagacggaagccttctgttgcaaacgttgagaagaacactgagagatataggaacgttaaggttgatgccaagaacgttagccctaagagcagtgcataggcaaaccgcagcgtcaaggtcaaccaaaccttgaatgagtgagcagcatggttgaggtgatggctgtcccaactgcacgttaagtagaccgcttagcacattcgcacatacaccgagtctgagagcatcgataggacagtttccggatgaaccaggggttctcggaggaatgactggcgtagggttaggacttggtacggaaggacttgggaccgaaggagttggtacggaaggacttgggaccgaaggagttggaacatatggacttgggaccgaaggagttgggaccttaggacttgggaccttaggatttgggagcggcctaggcttaggactcgggttgcatctacaattagtaccagcggttaaggtgaaaaaaaggatgttgagggcaaagaaaagagcaagagaggctgagttctttgaagccattgttatggagaatgtttgagtgagagatgaagaaaatgaagagagggtgtgggtatttataggattttagaaggatgtgatcatatgaagaggaccaacttgttttacttacagaacaattca

SEQ ID NO: 20347 - DNA, 779 bp, Arabidopsis thaliana columbia
atatccccaagatggtgcaaaagaaagttgtgccaacagaaatagatttctttgcaacagttggatcctcgtcccttgataagactagtaagacactcactagaacataagaatgatccagcatccgcaaaccaacctcttcaatgatcctgccatccagaagaatcgatcaaccagtctcttaccttgtcagacaaattaataaccataaacttttctccagattgggaaaaatagagaagaaccctaaccacgcaacaacataaaaattcttctacaagttcgtgcagagcaagggaaaacatcaaaacggagtggaagaagaaagggagaaaccgtaaaattgctaaagggactcactcgataagggatttgcgaactagaatttcacgggacaagtggagttctgcgagataggggaaaatctcagcagacaaagacggctccagtgacagcaaaatctccttcacctgtctaagagacgagagcttcactgccaaatcgccgtggttattagcagcggcgaggagagagagcgcctgtgccctcgctgtcgcggcagccggagccgccattactgaattctagattcgtccggcggaaacgtcaaatacggtgccgtatcgcagtggcggttaacttttagggtttttcaaggttgaagaagaagaatcttggcgacacagaagcagcagcacacaagagcaattaggcgatttacgcaattacaaaaatgcagaacagaaaaaccggatggcttcaattaattttctaaaaag

SEQ ID NO: 20348 - DNA, 955 bp, Arabidopsis thaliana
aaaaatgtacggagttagtttgtttaatatttttccttttctagatttttttctctaattgtgattttttctttatcatccaattaattgaatttttcaaaattattattcaaaaaaaaaattacgatggtaaaaaaaacaatgaattttaaagttattaaaatcacggaaaacaattctataaaagttatgacgttgcatgggaaatatacgggttcgggtcaatttaagtggatcgggtcatattttcttgagtaattaaaagttaatgatttaatttaatgaaaaaattaataactaatcaacacgaaatttgaatgtttttgttcgttacagattccttaacgccggaatattcggaagcacgaaagaaacaagccacacattgccacactccgccacaagagccgccatgcttgtacgaatcaacactctcctccaaggattttccggtatccgatttgagattctcgaagcaattaccagtttcctcaacaacaacatcactccatctctccccctccgtggtacaatcaccgcctccggagatctcgttcctctctcctacatcgccggacttctcaccggtcgtcccaattccaaagctactggtcccaacggtgaagctttaacagcagaggaagctttcaaattagcaggaatcagctccggattctttgatctccagcctaaggaaggtctcgcgctagtcaatggcacggcggttggatctggaatggcgtcaatggtgttattcgaaacgaatgttctctctgttttggctgagattttgtcggcggttttcgcagaggtgatgagtggtaagcctgagttcaccgatcatctcactcacagacttaaacatcatcccggtcaaatcgaagcggcggcgataatggagcatatctcgacggaagctcgtacatgaaattagctcagaagcttcacgagatgg

SEQ ID NO: 20349 - DNA, 815 bp, Arabidopsis thaliana
aagagcttccgtctaatatatgttccataattgcggcggcttcgatctgaccgggatggtgcttgagcttatgcgtaagatgatctgtaaactccggtttcccttgcataacctctgcgaacatggcagacataacttccgataaaacagccaaaatatttgcatcgaacaaaaccgttgaggccaaacccgatccaaccgctgtcccgttcacaagtgctagtccttccttaggctgcagctcgaaaaaggacgatactccggcgagcttaaaggcctcagaggcagtgagagtctcaccagagggacccacggctttggagttgggacggccagtgagaagtccggcgatgtaagagagaggaacaaggtcaccggaggcagtgatggtgccacggagagggaggcacggagtgatttcgtggttgagaagctttgtaattgcttcgagaatctcgaagcgtataccggagtagccttggaggagagtgttgacacggacgagcattgccgctcttgttgtcggctttggcaacgtgtgtgacgtgtccccggcgccggggccaaatattccggcattcaagaacctgctcgagtcattaattgcacgttaccgttaatttcgtccttgacaaatattaattgttgaaaatgaccggcttaaaattatggtgtatgaagaatataattaatagcgtccacgactgttatgtgtaacttaatttcacctaattattattgccaaacaccaacttattcagctaaatagtgctgccaaaatattagtcacctaagtattaggtcaaatcagtacc

SEQ ID NO: 20350 - DNA, 476 bp, Arabidopsis thaliana
ggaagtcgtatagggaagagggtgagggtgtgctcatgacttttgatgtgtgagatagtgggaggtggtggtctcatcgagcaagtcgcattaagatagaacttgcagatagaacaatgataatataccttttgtagtggacctgacaacatttgcatttcaggtgatttccatcagataaacaggcactatcaccataatcatcatcaccatcaccatcattgtcattactaacaccactagcgacggcattactgttgacgctttcttcgtagtcatcatcaactttgtataccaattcatttttagaggcatcatcatcgttgttgatgctgagttccaaagcccatgtcgaataatcattattgtggtcatcatcatcatcatcatcatcatcatcctcatcctcatcatcctcatcctcatcctcatcatcatcatcttcatcatcttcatcatcaacaacaacatcatca

SEQ ID NO: 20351 - DNA, 600 bp, Arabidopsis thaliana
cgaaactcacaatattcctcatcgcatttgtacacgaaaccacaacttaatcggtagcaagctttacatttgaatatgtctttggcagcaactgtattaaaatcgaacctggagatcccaccaatcgggaaggggtggagggtaagtgggtgtttatgtattgggaggtattttttgcgaggaagagaagcacatgcttcgtcgagtacaaaatcacactccatacaaccataaaatctccgagagattataattggaatcgtgcatgcaacacaatacttgtctttctcgcaaatggttttcttttcttggagcttcagataatgttcatgactgaaatgatgaattgtctccacatcaatcctcacaaatggctcgatatcttcatcaggttcttcaggcactccttcaagatcttctccatcccacacgtcattcctcgttgcacaatgcgaatggacagcataatgacatcccttaatacaagaatattgcccatagttaacgtcgacggttttgcgacaaactccgcaagagaagtcaccaggttgaagggacaaagtgaaagagagtcggtgtgtgtgtcgggtgatctgaatg

SEQ ID NO: 20352 - DNA, 622 bp, Arabidopsis thaliana
cttagagacaaaccacaagcatcacatggtgaagggagtcgtatagggaatagggtgagggtgtgctcatgacttttcaaatgtgagatagtgggaggtggtggtctcatcgagcaactcaggttaagattgaacttgcagatagaacaatgataatgtaccttttttaaaggatcttgacaacatttgcatttgcggtgatcatttccatcggatatagaggcataggcagcgttatctccatcatcatagttattataataataatcataaccatttacacgataataaatatcttgttgaaaatcatcatcatcatcatcatcaccaccatcaccatccccatcactgtcaccatcacgatcttcaccaacaccatcaccatcattaacaataacatcatcgtcaacaaaattgttatcttcatcatcatggccaccgtcttcagagtcatcatcatcgtcagtttcgtttatcgatctttctgaagccgcggacgcgtcgtcggtattgcggggtatcttagaaatatcaaaaccaggtggtaaggagatgagggtgagaaggtgagaggggtgaaaagggtgtcttacaccggcgggaagaggtgcagctctgtgga

SEQ ID NO: 20353 - DNA, 721 bp, Arabidopsis thaliana
cgtttatgtagttgggttgtatattttccgaggaagagaagcacatgcttcgtcgagtactaaatcacactccgtgcaaccataatatctctgagagatcattactggaattgtgcatgcctcacaaaacttgtctttctcggtaatggtttccttttcatggagcttcatataatgctcatgatgactgaaatgttgaattgtgtcctcatcaatcttcaggaatggcggttcgatatactcctcgggttcttcaggcactccatcaagatctattccatcccacacgtctctccatgttgcacatttcgaatggatagcatattggcatcccttatcacaagagtattgcccgcagttaacgtcaacagtatggcgacaaagtccacaagagaaatcaccaggttgaagggaggaagtgagagagagacgatgtgggtgtcgggtgatcttaatgacacgaggtagatagatacatgatctgtggagcataaggctgcaaggtatacaagcgtaaacgagatctgtccgagtcctagagtagaagatagccacaaacatcgcatggccaagtgattcgcacgacgaagagggtgagggtgtgctcatgacatatcaagtgtgagatagtggtaggtggtggtctcatctgagcaagtctagttacgattgaacgtgcaggtaggaccatgataatatagcggtttctcaaggagcagca

SEQ ID NO: 20354 - DNA, 1766 bp, Arabidopsis thaliana
ctcttctctcttctcttgtccttacctaccacaaacactaacattgtccttcttatttaaacgtctcttctctcttcttcctcctcagaaaaccaaaaaccaccaacaattcaaactctctctttctcctttcaccaaacaatacaagagatctgatctcattcacctaaacacaacttcttgaaaaccaatggatcaaatcgaagcaatgttgtgcggcggaggagagaagacaaaagtggcggttactacgaagactttggcagatccattgaattggggtttagcagcggatcaaatgaaaggaagtcatttagatgaagtgaagaagatggtcgaagagtatcgtagaccagtcgtgaatcttggcggagaaacactgacgatcggacaagttgctgccatctccaccgtaggaggcagcgttaaggttgagttagcggagacttcaagagccggtgtgaaagctagcagtgattgggttatggagagcatgaacaaaggtactgacagttacggagtcaccaccggctttggtgctacttctcaccggagaaccaaaaacggcaccgcattacaaacagaactcattaggtaattaattaaatcctataccttatattatataactaattaataattagagaactcattaggaatgtgatcagagaaataaataaattagtggcttaagtggataacgcatactcacgagtatacaatttgcatgggagatataccgggtcggtgataccggtcgggtcgggtctattttaattaattaaagtttatttccgatttcagatttttgaacgccggaatattcggaaacacgaaggagacatgtcacacactgccgcaatccgccacaagagccgccatgctcgtcagagtcaacactcttctccaaggatactccgggatccgattcgagatcctcgaagcgattacaagtctcctcaaccacaacatctctccgtcactacctctccgtggaaccattaccgcctccggcgatctcgttcctctctcttacatcgccggacttctcaccggccgtcctaattccaaagccaccggtcccgacggtgaatcgctaaccgcgaaagaagcttttgagaaagccggaatcagtactggattcttcgatttacaacctaaggaaggtttagctctcgttaatggcacggcggttggatctggaatggcgtcgatggttctattcgaagcgaatgtccaagcggtgttagcggaggttttatcagcgatcttcgcggaggttatgagcgggaaacctgagtttaccgatcatctgactcatcgtttaaaacatcatcccggacaaatcgaagcggcggcgataatggagcacatactcgacggaagctcatacatgaaattagctcaaaaggttcacgagatggatccattgcagaaaccaaaacaagatcgttacgctcttcgtacatctcctcaatggctaggtcctcaaattgaagtaatccgtcaagctacgaaatcgatagagcgtgaaatcaactccgttaacgataatccgttgatcgatgtttcgaggaacaaggcgattcacggtggtaacttccaaggaacaccaatctggagtttctatggataacacgagattggcgattgctgcgattgggaagctaatgtttgctcaattctctgagcttgttaatgatttctacaacaatggacttccttcgaatctaactgcttcgagtaatcgaagtttggattatgga

SEQ ID NO: 20355 - DNA, 1054 bp, Arabidopsis thaliana columbia
taagctataatatttgtccaataaccagttttgaaaatcaagggaccatccacatttcaaaaaccagtagtcaaaaattaaaatgaacataatcaagaagagaaaatttattcttgaattactttctctgttttattaataaacaagtgaaatggaaataaataggaaatgaataagatcacataatgagttgttattacataatgaaagatagcttagtgcaagtagtagctgaagagggagacaagggaagctccaaccaaagagccaagagctggcaacgcagccgaggcggcggatgcaggtcctggtgccggagctccgacttcctcagcagccatgacggcggtcatggaggcagcagcgaaaagcacaccgcaagcaatcttcttcatctccattgtttgagacctgaaaggcttttcttttcttctttttatttagtttttgtgctttttaaagttcttgcaggtctgaggaatatggatggtgttgatcgggaatttatatgtgtggaactagtgttatttttagtaatatttactttgatttacctaaaaataactaagtttaaggaacattaggagggtaacaaaacttatgatggtcaataataactaattcgccgttaaatttaactacaatcacggtgaaaagagttgcaacatgtggcttagatttattttagcatttctgtttgtattttcttgttacatgaacatgagtttttcatatcaccatccggttatcagatttcttttcatgacgttttttctttttctttttcatctaatcttcggggacttcaatatgagaataatatgaaaagtttcagtttgggttattttgggtgtatatcaatattacaatatctaagaaaaagaagatccttaagactcttttactaatctaaattcactaaactttacgtatagaaggaaacaacagtaagtgtcagatagatttgtacatggaactatcacaatatatacaacataaacttgtcctataaatattcacgatgaaaccgcccaaaaccctcaagaagctgttc

SEQ ID NO: 20356 - DNA, 1091 bp, Arabidopsis thaliana
tgccatcaccagtggctctacagatgttatccgatttcttacagtgatggccatctgcaacacagttctacctgtgcagaggtaaatttgaacttcttgaaatcttcacaatatctgtttttggaaaatttaacttctgcatatttattctgtttgtctaggaattttcatttagttatattttttgggtttccatctgacagcaaagctggagatattgtttacaaggcgcaatctcaggatgaggacgctcttgtaatcgctgcttcaaagttgcatatggtctttgtcggcaaaaatgccaatcttctaggtaatagcatctaattttcatttttgctctatatggaatatgtacctaaaaagtagttatcatttgtttttttcttcctctttattaaatgcagaaatcagatttaatggttcagtaattcgctatgaggtactggagattcttgaattcacttcagatcgaaaaagaatgtcagtggtagtgaaagattgtcagaatgggaaaattatacttctgtccaaaggtgcagatgaagcaatccttccctatgcacgtgctggtaagttgatgtatctcttattaatatgagacgagtaagtagtattcaactgaatgtgcttagagctgatggccgttaactctccactaaacttttaggtcaacaaacccgaactattggtgcgccgtagacactattcccagctgggctccgaacattgtgtttggcttggcgtgaacttgaagagaatgagtatctagagtggtcagtgaagtttaaagaggctagtagtcttctggttgatagggaggtaattgaaacaattctctctttctgttgttcactataagcgattatgaagtatgattagtttgaatctacagcttgactggctaagtcgatgcacttgcttgatgtttttctcatgttacagtggagaattgctgaggtctgtcaaaggttagaacatgatctttatattctaggggtcactgcaatagaagaccgcttgcaggtaaaaatttaaatgtccaggactagtgaggttcacagtgtaatataatgtagcaccgtaatagg

SEQ ID NO: 20357 - DNA, 1113 bp, Arabidopsis thaliana
tgtctttgggtttaaaatcgcatccacataaactttgactgcatttggaccaataggaagtccatttaccaacgcttgcggttctcaaaactaccatctcccttcagctaccacttcatcagtcttgcccaaagcctttagtgtgcatctgttcttagaagttgtgcttgggctctgtgtaacaaaaacagagatcggcatcaggtggaatgtcttctaatctatatacaaaagcaataaataagatacattataaccttaggtgcaatgtcttctaaactaacacgttcaggtggaacaatacataaatcggcatcccatgcaatcatttctccaactacatcctcaataatagacatctcaggtacaggtctccatattggagcttctggcttggtagcagattcaattaaaaccttaactacattaggccctagaggtatccaatgtagtaactcatcagcatcataagagacaacacggccctcaacaacattaccatcagaagaagtccagtcaaccaaattacatttaggaagtgatctggtatttacactcctatgaattgagttttcaccaacatcaggctcttgtctctgcaattccagaaacagatcaagacatataatattcctcacttagtacatttaggaattgatctagcatttactaacctggtcataaagtttttcaataatctgctctagatcctgaattatattctttatttgaatcttattggtttccattgcagccatagagcgactgttgacctgaaaacaagccaatttggacaagctcatgcctctgcccattgcacgcagtcttcctggattatcaggtcccaatatctgactaagcacatcttcctttggattagttgttgctgaatcctatgtcccttcaatatctatctcggttgcctttttctgcaaacagataacaaattaatccacaacatacattaatatataagcataatttaaaaggaacaagcataacatacaatcatttcagccgcatcgatgtgtacaggagtgccatccttcttagtacgtgactcaacccacactttcagccttgtcaccttggatggttcacacttttttggac

SEQ ID NO: 20358 - DNA, 574 bp, Arabidopsis thaliana
atgttttgtaatcaacataaacgatcccaaacctatacaataaacaaaaacagatattaattataaccttgatttattctacatatcatacatttggtataaatttttaagtaccttgaagtatatcctgataaccattcgaaattatctagcaatgaccacgcaaaatatccaaccacattggctccatcatccctagctttcttaaggttggttaagtaatctttgtaatacttgattctcgtggtgtcatgtagtccttgagctagagtaacgtttcccgggtcatccatacctataaaatatgttcaaacatttataaaaagctctaaaatttataataatcttatagaaatataacaaaacaaaaagaaacttgattgaagattttaatttgtttctttaataccgttttcagagaggatcatagtagggttgccgtaacgttccttcatatacatcaaggccttgtacattccccatggtacgttgtataccaagacgagtaagcctataagataagtggtttatttaataacttagacacttgtatatatattgcttagggaaaaaa

SEQ ID NO: 20359 - DNA, 779 bp, Arabidopsis thaliana
ctaaagaaccggtggtcgctgcggggttataaccgagcaaaaagagcgcggcgataattgcgccatttacgcccgtgccgccaaatgcctgggcggcgttatagcccaccagaatcaccaggaaagtgaacaaacctttgctgaacaccttcataaaattcagcgcatcgggtagtgttccctgagcatctgccggaacgtgcatcaccgtggcaattaacgtcgctatccccagcagcagaccggcggcaataaaaccggggatcagcggcgtgaagatggtggcgaatttggcgagaaattgttgcacgccggaggtttgtttggcttttaactgacgtttgttctgggcggcgatttctgcggcatcctgtaccggtgcttctcccagcagctcgctcatcgcttttgcggcacgatgcgctttaccaggcccaaaaacgacctgcacctggtcgctggtcaaaatgacgcccttcacgccttccagcgttttgatattgggatcaaccagtgaactgtcatgtacaccagacgcagcgcgtcatacagttaccacaactggcgatatttcccggtccgccgacacgggtaagaatggtgttcagaagttcactgctgatctctttggccatgggttattccttgtctagaacctgacgaataaagccgccgtgttgatccaggcgttttttagcttctgcggcatcgagattcttcagcaccatcacaatggtcgttctacagttgcgctcgcaagcaattaacgccgcttccgc

SEQ ID NO: 20360 - DNA, 594 bp, Arabidopsis thaliana
acgtgacaaaaatgtatctctttgttacgtaggcgatccattaactgggatgttagacgctttgtcgaatgaattttctgtccagcgaatgggcggagtaggtggagggatgctaagagatgtccttgctgtttcagctaatcttcctgtaagtattccttcatagaaacttatgatatatgcgtttttcagtttatagcctacatattttcaagtgttcatctagtattgtgatcacaatatattttcagactcttagtaggatgttccctaaggacacactgctttggaagctggaaatgcttaagtatgctattgcttctgtgaactctcacatatactcagtcagagcggaaacactcatacttctgaggtccaaaaattctgaatatataagatttgtaaagaggtattaagtgtaagtgcttatctggttatgactattgcagtggacgcgatcattggctcctgaaggaggaagacattgacagatactcgcgcacgttgccaaaatgtattgtccgtaagctcgacgacaatggacagtttccccttttggttagtgatactcttcatccaatactgatactagtt

SEQ ID NO: 20361 - DNA, 618 bp, Arabidopsis thaliana
tatctgagtattgtatctctactgcattctctttactcttggtcctaattgattagatatatgtttccagggtactttttgaactaatatggagagattacttcaggtttctttcaattaagtgtggaaactcactttttcatctaggtaactatgctttcgaattaaagctcaatgcaatgttgttacagtgaactttttaaatagcgcattctcttcgtaggtggcccgagaaatgtgcaagggaagtggagccaagatcagaaactatttgagtcttggagagatgccaagacagggtaattatttgatgttgtggtttttttttttgaaagatcaacaaagtaaagcttgtggacctttagtgacttctcatgaatggtattaggtatcctcttatagatgcaaacatgaaggagttatccactacaggtttcatgtcaaatcgaggccgacagattgtttgttcgtttcttgtccgggacatggggttggattggcgtatgggtgcagaatggtttgagacatgtctattagactatgatccttgttctaattatggaaactggacctatggagcaggtaagtactactcatgacacagtttgtgacttgtgg

SEQ ID NO: 20362 - DNA, 819 bp, Arabidopsis thaliana
gaatcaatcaatgtattaataattgatttcacgtctgattattttctctcaggtctgagatatttatcagaaagttaaaggaaatatcttgaaagagcctgccaccaccgagaagagaattgaaggttaaaaacttctgcctgaatctctgataaatagatactatgtatccttgtgtcctgtcttaatctattctttgtctttcttctgttgatacaaactctgtgttttctatttatagaaacaccaattctgttcttcatacgacgagagaagagaaaaatgaggagtagagatatggagagaggtaggaaacacagaggggacacccagtggacggcttggctgactccaacaattgtcgtggctaatgtctccatcttcatcgttgtcatgtacaccaacgactgccctaagacaaccacgggagccaacggagattgcgttgcaaagcttctccgcaggttctcgtttcagccactcagagagaaccctttcttgggtccatcttcttcaacgtaagtttctaaaagaactcgaaagccaaatttttgtgaacttttgttgtctgtttcaattcataaacccttaaaagtctctgtttatttctccaatgtttcaaggttttgattactgccttaacaaatcaggttaaggcttgtggggtatttcactagtatctttcgtttcgtttcatctttatttttcaattttgcgatcctttcacacgtcattgttatttgtgattgctttgattagtttgttcatgccatgttgtattcgaaacaaactctgttcttgagatacagctcatcggag

SEQ ID NO: 20363 - DNA, 526 bp, Arabidopsis thaliana
gcaagtggccaaaaggctgaagctcgaaacggcagcctttgagctcaagtatctagacgacgatagagaatgggtctccgtctcatgcgatgctgacctcagcgaatgcctcgacacgtctgcagcaaaagcgaacacactgaggctctcagtacatgacgtgacttttaactttgggagctcatgcgaaagctcagaggaaactatgatgtgcttgtgacaatgcttcacttgtatacaactttcttgtatggatctgagagttttgtttcttatttttctctggaaacatgtcttctttagaagaaggttttagtgttctatttttttataagatgtataaaagcacacttctccacatcaatagatgttgattggaataatgatatataattgttattatttacctatgtgacttagcctattacttggattgaattgatttcaaaattaacataagtgaccaaatttatacaagtgaccagttttgagtaatttaggggaatggccaactttatggaggttt

SEQ ID NO: 20364 - DNA, 556 bp, Arabidopsis thaliana
tgagactgcacaatgttgttttggtaaatcacgcaattgcgttttagaccaatttcagtttgcaaatttagaatttgattttatatatcactggttttataactctcaaaatacttttttgtttcttctatatacctcaatagcttacaacatttctttgatgaaatcaagattaagtgtgtcctttacgatgagaaataaaccgagaaataatacaagcatgattccagaagacataatcccttgctccacctctaacggtaatttcctcccgcctcgaaccgcttccaataagatcagagccaaagttccaccatcgagagccggtaaaggcaacagattgatcacagcaaggtttagattcagcaatgctgcaaactggtaaagcccgtccgcgtttgatctcgctacttctgctccaaccgcaataatcgccactggaccagcgactttactagcggtttgagagaagttcaagaaagtctgttcaaactatccaatacattgtaagagagccaaagaattctctccggcgaaactaaaagtttgcggtatg

SEQ ID NO: 20365 - DNA, 515 bp, Arabidopsis thaliana
gtcatctgtgttatcacaagaactacctgtacaatgcatatgtgaatgctatcatgccaagagagtttgctatatccgttccccaacatgtggcgacaactgtttgcttacccccatacctcgacaacaaccgggaaggccataaaattcgagaattatatcggcattggaggttgctatgcataaaagaagcaaacaaagccatacacttgtggtaattgcaataaagtaggacacaatcgtaatacttgtacttcataaactttgattttcaggccttatgttttatgtttttcacacttttacttgtttttctacttcaaaatacttttgttgatcactagttagacttttaaatggtgttttatttatacttgatgtcgtgtggaatcatgcttgtattatttctcggtttacttctcaatgtaaagggcacacttaatcttgattaagcatttcagcttaacgtaaaggacacacttaacgtaaaggtttcttagttttcttggttgtgt

SEQ ID NO: 20366 - DNA, 710 bp, Arabidopsis thaliana
cgggttttggctgtttttttatgtcttgttttgtttgtgctttcctaaaactttcaggatgtgttaatgggtacttgcaatgtgttgaatacgagaggattccttcgaagattctcacttaccaagcttcggatgatccattatacagtggatacaggtctgtagtccaatctacgagccaagaagattctctggtgtgttttccttaggacacttttgttgagcagcaactagataacttgaaaaggatttagatgataagatacgatgacctcttttttcctcagcttgattttgcagtatgggagcctccacatggaccatataagactttccaccatccatgggcaaactacgtcaaacttagtggcgcagtaaggcactgcgctttcatggtcatggcaatgcatggctgcattctttcggaaattcaggtaacttaccatattcttgttaaatacaactttatctatcatagcaaatgaggtgctataatggttattagagactataccaacctgcttcaaatgctactagtacctcttcgtgattaactagactgttactctgagaagtcggatatttgtcatataattgttgagtaggtgaaagtgggatctctagtttactgttgttactagtgaatggttttctttgaagtcaatgcttgtcgtatgccctataagacttgtgatacaattggtgtggga

SEQ ID NO: 20367 - DNA, 1086 bp, Arabidopsis thaliana
tctagtaacagttttctttctcttatataggaaccagcttggtctaatttccttatctgtctaaaactctcttaaacctctgtctcttctctctctttcttctcttacttatcttcttcttctcttctctcatttcttgagttctctctcaagactcttcttttcttcagtcttcaaacataagaaaggaagttccttttgtttcttctgttttagttctcttgtgggtttatctatttggggtggtggttaaaggagggagctttgggattagaagtttttcagtgaaatcagaaagctttcgagagaggtttttttcaatttcaaaacgtgggggtggggggttagggttagggtttacaagttatgcgaacaggtggttatacgattcaacagacactcactacagaggctgcttctgttttgaagcactctctcactttagctaggagaagaggccatgctcaggtttcttaacaaaaccttcaacattttgttaaagttttgatctttttgatctttcgatgttttattaatggaaaagtttttgtttttattgtttcaggtcactcctctccatgttgcagctacattactgtcatcaaggacaagtcttttgagaagggcgtgcattaaatctcaccctggtttttcaactaattaccagtttgccccttctcgtcttcaacatcatcatcaccataaccaaaaccatcctcttcaatgcagagctctcgagctttgtttcaatgtcgcactcaacaggcttcctactgttcctggtcctatgtttcatggtcagccttctctcgcaaacgctctcgtcgctgcactcaaaagagctcaggctcaccaaagacgcggctgtatcgagcaacaacaacaaacgcaaacgcaccctcaaacgcagcaaacgcagttattggcagtcaaagtagagcttgaacagttggttatatccattcttgatgacccgagtgtgagtcgggtcatgagagaagctggatttaacagcaccgctgtgaaaagctgtgtcgaagattgttccgtttcttccgtcttttacggtggctcagccgtcggagt

SEQ ID NO: 20368 - DNA, 610 bp, Arabidopsis thaliana
  unsure (1)..(610): unsure at all n locations
nnnnnnnnnnnnnnnnnnnnnnnctaaagagcatcaccatgccaataaagatttcgatggattcagggttaagatgtgggaaatagcgcacgactaccacacgggtcatcagtaccaccacggcggcgatcagactttgcttccagccaaactggtagaaaatcgccaccagcgggaacagtgcaaaagctgaaaccaccggcgagcttaattcccccaggctacctaatacatccaccggcagcgcggtcagcagctggtttactggcaacaggcaagtaaggatcaacacgccccagatagcgccaagaccaaacgccatcaggctgtttatcgccaggacgccgaggatatcggtaggaagaaagagtaaccatgcgttgagcagcccggttttcagggtaaaagagatccccaccgaggccacaaaaccaatgctcagaccaaaagcgatactccccgcctcgcgacggttcatatagccttcaatcagttgcggcaggatcgggcggatgcgtcatgaaaaacagccgccgagcgatgcgccagaagcgatgtcatacccgtcagcacgccaccacgataatctgaatatacagatccatagtcg

SEQ ID NO: 20369 - DNA, 1323 bp, Arabidopsis thaliana
cggggatctctagtaacggccgcagtgtctctaaacctgtcgggatgaccagccccaccactgatttacggcaccgagtttctccatcttgtaagcatacgcgcagccgactcggaagatgaagtccccagtacaatcagcagttcttcacggatgtagcggataaatttgaagatactgaaaccagtcgctttagcgattgaacccaataccagcaccacaaacaggatacaggtaatgtagaaacagataatcagctgccccagttgcaccagtgtgccgacgccgtatttaccgatggtaaacgccattgccccgaacgcaccaataggtgctagacgcatgatcatattgatgatgccgaagatgacctgcgagaaactttcgatgacgttaaaaatcagttggcctttgctgcccagacggtggagcgcaaaaccaaacagtacggcaaacagcagcacctgcagaatgttaccgctggcaaatgcgccaatgacgctcgccgggatgacatccataatgaaggcgacaatgccctggtctttcgcctgatcggcgtaaaccgctaccgctttcgcatcaagcgttgccggatcgacgttcattccggcaccaggctgcacgacgttaacgatgataagaccaataatcagcgcgatggtactgacaatttcaaagtaaagcagtgcgactgcgccggtacgaccgaccgccttcatgctttccatgcccgcaatgcccgttacgacggtacaaaagatgacaggagcgatgatcatcttaatgagcttaacgaagccgtcgccaagcggtttcatttgctcgcctatttcaggatagaaatggccaaggagaataccaatggctatcgctgtcaggacctgaaagtaaaggcttttaaacagagaggttttcatagggtgtcctttagtaaaaccacaggtcttgtaaggttatggggtacctgcggccttaaaataacacccagacaacatcacagaaatgtacctggatcataattgaaacaaaaaggttaaaaagtttgagctggctcgcacaaaccagcactttttaaagttttgtaatcagtttggggtagctacttttcttccaggtaactctcttcgaagatttcaatagggagtgggcgagcaaaaaggaagccctgggcaataccaacgcccgcttttgccagccagtcgcgttgtgcttcagtctccacgccttcggcaatcatttgtaagttcaggctctgcgccacgatgataattgcagcaatcatgctgctatctcccggcaagccttcaacaaacattttgt

SEQ ID NO: 20370 - DNA, 1287 bp, Arabidopsis thaliana
gggtggatcccatcaggtgacatgaaaaaaaaaaaatcaacttcacattgctgtccaaattgatgacaaaggttagaaaatctgccttttgcttttttaattttcaactcatcttcaatgatcttctctctggcgcttcttgatttcaaagttgtatttaatttagtacttatctataatcaaatctaaagtaattagtaatacaaaactcagaaaatttactactagtaaaacactattaagtctataacatataactcagaaaatcgctaatccacctcaaaccaagtaattaattattataatcatctagaaatgatacgattagtgttcaagcgagttgtttcgtaaaccggaagctcctctctatacctatcgattcctatcgccgacaaattatccaactcgaacagatcagagcttgtgcaactcaacgcatcatcatcgtcgtcttcttcatcgtcttcgacggagacttcaatgacttctttattcttcttctggtaacttctcagaagttctttagctgcttcgattacacgacgattctcttccatgactcggttctctagagtatgacgaatggattcatattcacgttcgttgtttccgtacactttgttgttcttgttgttgtacttggaggagtcttcgtcgaagatgacgttgacgggacaaaaacgtacggatcttttcgatttttcgctagacgatggcgttttgctcaagcaagatctggagaatgatgaagcagaggagcatgtagtggttgatgacgctgcggcggcggcggcggtggtggaagtgacggttgtgttgattttgttaagttttttagtgtttccggcgccggtgaatatggagttaaggaaagtagcgagacgaccaccgggagaaatcggttgtttcactttcttcaaatcgctataaatcttcaacgctttagatttcgttttgagaaagcttccatgttcttgtttattactactgttaggtcggtgattctgaggagatctttcgaatcgttccacggtggttcgtatcggtttaggatgagaaatcgccggcgaggatttagatcgtctgtagaaataatcagactcggaagacgagaatccgcttgagtcagaggagcttgagcttgaatgtttgaagaaaacaggttctatggttttaagattcttggatctgttgaaatcgtcgcggcggttagcagaaacacgcgtgtcctcgcggttctgatgtttggtttttctcatggatgaggagttagtagaggaatcgtcg

SEQ ID NO: 20371 - DNA, 488 bp, Arabidopsis thaliana
tgggtttagcttttgcgacacatcagttccaagtcctttccttttcttataatcattggctttttgcatagcagccttaacagagagcggcaattcctcgtcgccggcatttttctctggttttttttgctctgatttcgatttcttataagcttcggctttcttcaatgcgagcttcaccggatccacatcgagctcaacctctgacgagcggtccggtgaggacgagttgctccgagttcggaaaagtgagagtttcaaggattttgggtgttgagatggagaaaaaaagaaagcgggagtttcggtgagtggagaagagagccaagagtggttgaaagaagccatggtttggtggagagaagagctggttagccatttttggagtgcaatgttttcacagacttgtggactcgtggatgcaacatcaccacccatccatttcatcattggtcttggtcactagagcgcataaacagttcgtttta

SEQ ID NO: 20372 - DNA, 1061 bp, Arabidopsis thaliana
  unsure (1)..(1061): unsure at all n locations
cctgagggaagtcgtcggagctagtgttgatgagatcaatgggacagtcacactcttccttactctccctggggaggagatagaacttgcggtctcttccagaatacatcatcacattggaggcaggaaacgggaccttgatgcgtgtccaagccgagtcaccaggccgccacaggatgaggaatggactactagaggacttgactgccaatacacagtcttgctggtttggagaggctgatagagagatactggagatacgagctttagcatcatcctccaatggaggcagattgaaaaccttatgtgacgaaacagaggcacacgggttgaagatattagtgagatacaatgtgggctcgtatatcgtcttcgcaacaatccatcccctcgaagatcccatcttcatcgtacattggagctcctccgacagatattggtcgcgaattttcactatttccttcttcctcggatcatacaggttaatgtcgaccactgatccaccagacgccgccctgtagttggtatcctttaaaagcagacntacggtcgccgccgtggagaaagaccgcagttcactgaaacagagtctctgcttcttcacaactgaggagatcttagcggttcgacccaaaagctgagacattgttgaaaatgaaaaccctagacggctaaccaaaaccctaaaacccaacccttgcttgcttcacttccttactttcccaaaacttccatttttttcccttttaccctaagtttccaatttttgcattctcgctttatcagtactcgacttagggagtttgattcgatttcggttaaacgtggtaaattaagggaatcataaccgaataaatcaaatcaagctgaattggtttagattaggaagaaacagaagaaaaagataacaaaagggaactggttaacacgtttatgtagtgtgtgatattagctttcattttagtagcgctatatgttctcatataactcaacagcagtcaaatgctagaaaacattattactacccattagcggtagagagaaagtccaaaaagtataac

SEQ ID NO: 20373 - DNA, 1496 bp, Arabidopsis thaliana
agaggatccccgatcacgtaaagtggttgcattttaagcagagatctttcccaacttgtagaaatgtggtgtagagtcggcaactcttatacatgatttttattctcaagcttaatgatggttcacacaaagagctttcattgatgtatcagatgggtctgagatggtggggaatggtatggaagtactgggtttgggaatgaagatgttctccatagaaagctaattagtttttaggacaatatcacagattctgtcgagttgtcttggacattaataaataatcactcactggcttctttcgagagcctcgtgggtccgcatccatcaatttgtccatacagtttttttttttttatcaatcgtctttgaacctaaatcatggcgtatagaagaaggcaggggatcggaaagtttgcgactttcaaggaggaggttgatcggcttcccccggaaagcatcaccgccgtcaaggatagatcaccgccagctcgatcctcccctgcttttgaccaacccagatctaaggtttctcctttatctcaactgagagtccactttatgtttttgcatttacatgatccgctcttaggatatccttagtgaccaatctttgacgacttttgactgtcttaagttaatgctaaactttctgatcagattcagctgtgaggtcgaatctagtggttttgttacaagttgtgatcatgagatctttcttctgccattgatcctatgttttctggggatgtataactgcagaattttacgaccgagccaaagggcttgtggggagtcatagcccagaaagcaaaatctgttattgaagatgataaatctagtgatcgctctacaacagcttctcaggttttgtttttgctcatctgactcaagtacattctcatgatccatcatcctcttgctttgacgtcgtcatggttttttggtctttgtttctcttctagtcccggttttcatacctatcagatgaagggttcaagaaaatggacaatcccaagcttcggagggggctggataagcttacatcttctcttaatcagatcggtgacacttttgaaaaagcctttgaggtgttgtttctccttccttctctctaaatcgttccgctttttcattcttttggttgaattgcttccttgtttctctaggatggccgaacactcgttgagaacaaaacagctgatatcatccaggaaacacgaaaacttcaaaccagacgaagaggaactggtggtgaagatgagaatcagaatcaatcttatggagttagtagctcatggaagaagtctccagagcagccaatgcagttaaatcatatagaacatgaaactcaactcaaggcatctcgcgatgtaaggtccagtctttcgatggcttggttggttggtgatttttgtacgatagctctcttcgttgatatatagtttcttctgtgagctgcaggtggcgatggcactgctgctaaagctaaacta

SEQ ID NO: 20374 - DNA, 842 bp, Arabidopsis thaliana
cttgtaagtatcatggaaaagtaaaggtacatatatgaaccatagagagctttgacgacggacctgtgcttcatgaagacgtttgacctctttttccaactgaaactctgctgcagccttctcactcgccatagtctctagttgtgtttgcttatagtactgaattaaaacccgtggccagaagctatcagacaacttcccaatatgactttgattaatagaatcagtacattcaagagttcacgttaccagtaaatctgttagttcacggtatcgtttctccagctctgtatgctcctactaggtcagaggaataacgattaaactcacgttacataatcatatgcattaaaggtaccacttgacgagcaaaatcagaataagttgagtattaagaccgtgttttagcaaccatcgaatgaatgcgtcatattaacaagaccgtgttaacaagaagagcaatgggtctttccctcaaaatattcaataagaatttttactgggcaatgaaatttattgcattcaatgaaataaatacgccaaggggtttaacagagaactatcaggtctgcctaagccacttgatagaaaaagagtagtagctaggaagtcccataagtatagactaggagaaacgaaaaaatcagaaactgttaatacattgacaagaaaagacagactctcagaaactgataatattacctggcgtgagtaatgttctgcatccctcttcatggctgccatttcaacccttaacttttgcatttcagcctataacaatcaaacagatcatgtgtaaataccacaatcatgttataaagaattccaaggtaagtacaagc

SEQ ID NO: 20375 - DNA, 669 bp, Arabidopsis thaliana
aaaattaaaatgaagaaaaaaaaaatcctgccaactcctttattaagatcgtaagagagagctctgagaagagagaagcagcaccaaaaaaaattcatatctctctttcctttcaattttctcagttgtaaaacctctcatactcattagagagctcttcacgagagaactctttctctttcccattaaagatcaaatctttcttcttcttcatcaacaccatcatcatcatcaccgtcatgtgtaacccatcaacaacaacaacaaccaccggttcagagaaccaagaatctcgaaccggactcttcctcgatctcttctcgatcaatagctttgaacccacaaagagaaatctccggcattgtgagaacagaggatctcctcttatggcagaagctgtaacagaggcgaaatctctcttcacgttagcttttccgatcgccgtgacggctcttgtcctctacctacgctcagccgtatcaatgtttttcttgggtcaacttggtgacctcgaattagccgccggttcactcgccattgcctttgctaacataaccggttactctgttttatccggtttagctcttggtatggaaccactctgttctcaagccttcggtgctcaccgcttcaaactcctttcactaaccctccatcgaaccgtggttt

SEQ ID NO: 20376 - DNA, 538 bp, Arabidopsis thaliana
tgaagatgcaaagttcttctatgaggtggacacaaggaaaagattttctgaattccgagatcagctacagggaattcttttccatgtaagttttccttcggtacatatcttaaacaagaagatacgataaatgcattactagatggtcgtacttcctttcttttttgtagtagtttcattgtggtttcagatgttcagtaatctgtactattacaagtaaaaaatgcaaaccatataatattgacttcagtagcacatacaacacaagtttctcatccatgtttatgtgaattaataggaaaagctggggacgatgctggataagatgaaccgcctcaaaaagatggtatctaaactttgtttggccctcaaaattgatgaagatctgcttccggttgtagaggatgctgcctcacttgctatgtcagatcttgcaactgctgtagttacagaatttactgcgctgtcaggaataatggctcgtcattatgctctcagagatggctattcagagcaggtagtggattgttcaagtgtg

SEQ ID NO: 20377 - DNA, 563 bp, Arabidopsis thaliana
taagattttgagagatgcgtacctctgattcggatccttttggccagaatcgcctgcatttgtgaaatggtttaaatgtgctggcaagaattgcttttctgggagattgaaaaccctgaatcccatataatatgagtcccgttaaccaaaggcagaggggcttaagcctcaaaatatgcaagtaaacaaagtgtatttaaggtcttgatgcacactaataaatgcttcctataacacaaatctgagccagtaataaaaagggagtcatggtagaggactagaggtatatacattattaacagtcttcaaccgaagcagtctctatgcagcaatctaactcaaaaagcataacaagaaatggaagggttcctacctggtacaatgaacacaataaccccatctctggacaaggcccactccccagcccccacatccgctgcatcttggcagctgagatggaggatgctccccttcccattagccgtactttgggtacagcgttgttagagtttgtggcagcgggcttctgtaaagaagcctggaggttccactgagacacatgt

SEQ ID NO: 20378 - DNA, 684 bp, Arabidopsis thaliana
gaagagaactgtaatttgcagcgagctggccaagacatttggtggttgaaaacttattgaagcgtaaatccaggaccgtcaatttcaaaagtcgatgaagaccctcgatttcgctgattttgttcccagctaggtatagttctttcagagaggagcacgaagccagacctaagtcaacaagaaataagaaaaagggaaatacatcaaacatggttttcatataaaagcagataactaggaaatgtcgatgagcaaaggtcgggccataccatgaccaagtctcagtattcggttgtaactcaaatctaatactcgaagccgagtgagttcacgtaggccctcaatcaccgagatactgttcttcgacaaattcaatgcatgtaaacctcgaggaagagcaccagcggttattctaactgaaagatgtaataaggccagttaaatagaagaaacaaaaacaatcagtatgtgaagaagattagcaagaagggaaaatttagctacctatagcatttcctgagagattgagaacgtctcagaccacaaatgcactgaggaatggtatacaaccagaccatgactaaccagctgggctgtggttgcagaagccttagagaggatatatactttttcgcagcttccattccaggagttaacttgatggcatctctttagcagaagatg

SEQ ID NO: 20379 - DNA, 579 bp, Arabidopsis thaliana
cttaaggattttggttaaggatctgttaaggtcctcccaatggacttgctctgacatatacacatataggtcctttagttatataagtattaaataaatagataaattcctaattagatggagattagcttatcacatctttatccataatatcacacatctttaaccataaccatcatccgaggattgtttttggtaaatttgatttcaacatggtttatggtgaatgatagcatttgtttgacccagcaaaaaaatagcattaatcttgcattgtctagtacataagccactgaacataaaaggatttagaatttggagattaacactcacaagacacatcactaagttggttgagttccattgatattgataataggatctgcattcaatcatagtgttacaaaagtagatatagaaactcaagaattcgaaacatgacaagagtttgttgctaatagagaaatgtgtcttcttctttactggctaatttaatggcgatgatgagggcaaaaggtgacgatgtagttaccttggaacatgtggcgatactggttgggtcgtcgtaagcataagagt

SEQ ID NO: 20380 - DNA, 1038 bp, Arabidopsis thaliana
  unsure (1)..(1038): unsure at all n locations
ttggtaaaaatgtttgcttaaacaatgtcagatatataaaatgtataaaatcttaatttacatttacaactacataaactgttaattatttgatattaacgtgttaagctgaacataatagttcaacgaattggaacaagttaaacaatgagtggtatgccggaacaaacttgaaatgaattggttaacggtgtgaggtggttcaaaaaatttgagatgaatatctaaaatataatttctcgattttatatatcgttattactagttagtatgagggtattgactattgagagctagagagaaagaaaagataattaactctcaagataagttttgttatccgatcattcatttcgctttatacggaaaacaaaagaaagactgtaaaagagttatattttttgaaataatattctaatagaagcaaaaatcatgacctaatttttttgttgataaaactgttanagacgtcatttagggaccaaagttcgaaatcctgtccagcccgatcataaccatgatacacaccatgatgtggtattcgcaatatttcatcacattctattcaattaaataagtttgattagtaagagaccaaagaaagaagacgtgttgcatgagacatgagcatgaccgattaataaacaattgaattgtacacttttagtgacatttctatctaacatttgctaaattttgacagtgtgcatggacgctaagccaagggagcaatgtattgggtatctcatatatggacatatacaagatataaactcaagtgtaactattgtggtcatcttccatgagagaaaagatgacgatgaggtcgttcctgtttagtgcagctaccacgttcaacgtcggattcctggggcacgaccgagttaaggttgttcagaacaaagatcacattacttaatttactttagtggtccgaagatcagaggagtttgctagagagctacaagagctctggaagagttcttcttgctaaatcaagtatgtagctaaattactaccagttgatgtaaaaaaagt

SEQ ID NO: 20381 - DNA, 1164 bp, Arabidopsis thaliana
ccaatcaccacctgcgtcaaggttctagacatgacggggttgaagctttcagctctaagccaaatcaaggtatgatgatagtcaatgtctgcggacaaagttgcttcgtgaataatgatactgcaagatgttgatcaattcattgacatagttttttattaataacttttagtgttaacacattaatgcagttagtgactatcatatcgaccattgatgatctcaactatccagagaagacaaacacgtactatgttgtgaacgctccatatatattttccgcatgttggaaggtaagcctctttgattctcttttgttagtaactcatggtgtttagctacttagcacgtatgtgtatctcattgagctccttacaggttgtaaaacctcttttacaagagaggacaaggaaaaaagttcatgtcttatccggttgcggaagggatgaattattgaaggtatatacatatatgcatctgatttcttatgatcttgctgtgtaatgcaaacttgtctaaaaatcttgtggttcttgtagattatggacttcacatccctgccacatttctgtagaagtggaagctctgggtcatctcaccacactcagagcgcaaattgtttttctatcaatcatcccttccatcaacagctatacaactatgtgaagcaccattatgaaacccaaggacaagcagaacctgcaaagcaaggatcattccacgtgggttttcctgagcctgaagctgaacgttgtgtgatagccaaaaccatagaatcggagctgcacaagtttgagaaccgcaacggtctggccgtgtccattgatgacagaaaatccagtcatgaaacactggcaaatggtgacctctgaatgcttctgagggaattccttcagtgcctccagaactgagatatatagtttacaggtgagctagcaattcaaatgagtaagggagtactgagctgtgtccgctccctagccatgcaaatgtaaagcgcaaagcagagcataaatcttgaactgaatgcacttctggttttatgtatagtattatttgatcctctaatgtagcaaatttatttgtgggaaatctcctctcatttccgtaagcatctgtgtttttggtgtttgatctgctcattggctgaacaacaagagttta

SEQ ID NO: 20382 - DNA, 570 bp, Arabidopsis thaliana
cctccaaagaattttaagtcttcaaagatctccaatagtggacgggtgcctggaaagggacgtccccatcatcacgcttgaaagctttgctttcgcaccttttgacaatcgatgatgataaaaaaaatttgttataatattagaggtctgaatcattctagtagacaacatgagctcaagaactggcttcagtcaaataaaccttctattcgaggctttttggaaactcatgtccaacaagataatgcggctttaattttggcacgtaatttcccaggttggagaagtgattttaactactctcctcatgccaagaatggcagaatttggatcatttggggtcctgcaatttccgtttttgtttacaagaaaacagatcaacttatttcctgtggagtttttgatccggttacgaaacgttctttctcggtcacattcatttatgccagaaactgtatgattgcgagaagggaattatggagttcgctggttgagcttcatcatcacagtcttcagagaagacatccttggttgcttcttggggattttactaaatacttgtggctgaag

SEQ ID NO: 20383 - DNA, 634 bp, Arabidopsis thaliana columbia
tgtaacttagagagattttaatgtgattgcagatagtggaattacttctagataacaacgagacaagcccaagcacaaaagcgataaacagagcaggagaaacgccgcttgacacggctgagaaaaccggccatcctcagatcgccgcggttctcaaaacccgcggcgttccctcggctaaagctatcaacaacactactaggccaaacgcggcgcgtgagctcaaacaaacggtgagcgacatcaaacatgaagttcatcaccagctagaacacgctcgagagacaagaaaacgcgttcaaggaatcgccaaacgcattaacaaaatgcacgtagaaggtcttgacaatgcgattaactcaaccacagtcgtggcggttctaattgcaaccgtcgctttcgccgccattttcactgtcccggggcaatatgcagacgaattgagttcgctcttaccgggacaatctctcggagaagctaacatcgcggatagacccgcgtttgcgatcttcttcatattcgattcaatcgctctttttatatctttagcggttgtggtggttcagacttcagtggttgcgattgaacacaaggcaaagaagaatatgatggctgtgataaacaagttgatgtg

SEQ ID NO: 20384 - DNA, 1088 bp, Arabidopsis thaliana
gtttcaggtcgtgtatggagagaacagcctgtttcgatatgaattcgataattaggttacagaattggacaactatagaatatttggtgacaaaaatatcttttcttgatttaaaaattaaatatagcaatttcgagggaaatgtgtaggtaaactggtgattatggctcaatccccttcacaaggggggataaacaacacaatcaccacatttttgcttcacaattcaactgaaaaaaaagaagaagcacaacagagcctgagaggccatagggttggataaggaataggagccgagacttagaaacatatttctctcgtccttcaacagtttttactaataagtctcaagatacagttcggccatagcttaacgatgcaaggtagagattctttccccatttttcctgcacaacagaaaattgcatctccggtattgttcatgggaagggagaaaaagagttcaagatattgattagtaatcttttatagctgctctactcaccttgacgtgtgtgctggggaattgagaggtacgtaacgtctcttgtgtctcatcaacaagtctacgacgtgggatgcttaggatgagagcagcttgatcggttgtggctgctgttgatgtgattctgaatccaccatcccaacgcctgtggatgccttcacttggatacagaaaatcaagttccacaacctgtagaggagatataagcgaaaacaggagaattagaaatcaacgcgacagatccaaaactgaaggaaacggaagaaattcatctatatcggtgaagtctaacctgttcactgtagccagaattgcgggacataacaacaccccatcgatttccagctgttgccattgaggttacatggaagccttctctccatttcttgtttatccacttgaacgggaatgaatcgcttactttgtaagactgctgtgtatagtgcgtaccttcataattcatttgaaaaccaaacatagaataagccacaaattcagagactagtaagataccataatgacgaaagtgttcaaaagtattcatgaaaagtgtagataccttttgacatgacaactaaggagc

SEQ ID NO: 20385 - DNA, 1186 bp, Arabidopsis thaliana
ggatgtctgccacaacaattttgtgtatttcatccactgctattctaccatgaccgtgtttctcaatggtaccatttgactctacaaattcagtcaaaactctcatcttcatttggtgatacttcaggtaagccataaacttgttgagactgtgatctatgattatcttctggatgatccaagatgtaaacaataccctcattcctaactgattgttcatcattatcatagaatttttcaaataaacaccttagttttctatctcaatcttacacctagaagatgtgttcataaccactgaattcatgtagtttttctccgacattcgctttcaaatatagctttgtgttttagaataagatatcaaaacctagagattcatgttcatgttcatgttatgcaatcaccttcacttgaagttgaaactttaccacttgatcatattcatagcatcatattgatcaaagcaaagtattacattatgtaattaaactcaactacctaagcaacatgacaaaagtaaaaatataaattgtatcaataaaaaaagaaaaagttttgttgtctattagaaatatatatttttttaaaaatcagaatttcactaataatatccttgatttctaattcactaataatatccttgatttttagtttgttaattgaaatacaacttactaatttgaaaaataaactttgttaaataaaaaatttactacattgtatacgtttaagcaaaacatatgttgtattcagaaatctttgtttgtttgtattttgtttacatcgtgtaatgtgaaaaagtcattagatttttacattttgtaatcaaagtatcaaaccaaaacaaatcaaactaaaccaaaaggtttttaagcaatttgaaccaaatgaaccaacatcaaaccaaatcgcatgatccaatacggtttgattgtttgtttcggttacaatggtgacaactgaaaatagctaaaagaggaggaatcagaatcaagcatccgattccgatcgacaaatagggtttagaatccacacacccaaatcggaaggcgaagaaaatggaaggatgggatccgaacacgaagtcgacgttaacgcgaataccgcttctgacgacaaaggcgggtccaagagacggcgcggcatggacgcagaggctgaaagaggagtacaagtctctggg

SEQ ID NO: 20386 - DNA, 754 bp, Arabidopsis thaliana
tgaatgaggtttggttgtgcaatcatattggaaaatgcagcttggttctgaattggtggtagcatgtaaccataagttccaggaggctgctatggaaatggaaacgaaaattttattagttacaagattgataaagacaaatcttatacagcttgaactaacggagtattaggctttcttgcttacatgataaccatatccattatatggtggtacataacccataggtaatgctccaaacaatgagggatttgttggatcaccgttccctagtcgggcgatgtgagattgagccttttgaagtcttcttgtgtgtctttctcgttctgtgtctgcccatttgacaactaaaggaacagttgaaccctaagaagaaaaccaaaagaaaaatgatggaattttcacactacagatttacaaacggtaagttttcaaagtagcaaaagcaattacctccattttatgttttccgttgatagattccatggcggaaacagcttgttcttttgtctcatacttcagaaatgcacagcctaaacatcgacaacaaacaaaaggtcaaaactaggtaaagcaaactagtgaaaccaaagatcacaatagcgacacagagatagattcaacctttgctcgtttgttgagcacctcttagaatctgtagatcctttatggtcccgtacttggagaataaagattgaacttcagcttcagagacattctttggaagcataccaacaaatagcttatgctctgg

SEQ ID NO: 20387 - DNA, 582 bp, Arabidopsis thaliana
atctatatccaacataaagatcacaagtcacacaaatcaatgtatttaagcgtaacgctgaagcaaattttatggaagttccactttatttaaataaaaggaatcagcgaaaaaataattaacaaaaaaatcttaaaattaggataatccgaaattaaacacaaagctgatgatctctcaaatccaaagttcctcagaaccattatgttaggattttccagacaaatactactacatagacaatctccttagtacttacatgcaccattgcttgggttgttccctacgatcataccagttccactgaagttacaagcaccatcagtgcggccgtggctctggaaataagcattcataacaaaagatgcgtgcgtcctcaaactgctcgggttaaagcacgaaccaccagcttggatcggtttacagtcaacaccctgaccacacacccaattaatactgtcttgcagctgagtattcgtcgccccggacctcgctacacaccatttaccgccggcagtactaggtgcgggcaatgctgggcggcctccaccgccttgtccgtttcggagaagaccaacatcg

SEQ ID NO: 20388 - DNA, 554 bp, Arabidopsis thaliana
cagaagagcaagatcttcttcatagcatggtaaatacaactttgaacattttttcatgttatatttagattatggttatggataaactgtgcatatgtatatgtatgttacgttaggtcaccggattcatctagagtaaggatgaagatggtgtatgcgagctcaaaggacaggttcaagagggaattggatggtattcaggtggagttacaagccactgacccgagcgagatgagtctcgacatcatcaaaagtcgagctctctagatctccttgcttttctaattatatatccataatcattgtcattcaaacaatttcctcatcttatgtaactttcgatcttggtttcattcattcttgttcttgactgtttttttctattttatttacattttaaattgacatgggttttatactttgcaaaccatgtagtttctcgtgtaatagctcactttcgttgaaaaaataaagatatatctttttcaaagtgtaatttcatcaaattgtcgatatgtccgagtggttaaggagacagacttgaaatctgttgg

SEQ ID NO: 20389 - DNA, 248 bp, Arabidopsis thaliana
gtgagcgactgctacgagtttagaaaggggaagtccgtttgaaggccgaggtgcatgtccaggagctcacaaaagggaaaggacgagaccagattatggtcgaggaagacgcagccccagcccacataagagagccagtcttagcccagaagacttgagggatgaccgtaggagggagagtgtggcgagcccagagaatggagccggaaggaaccgaagcccaagaaaaggacgcggtgaaagcagga

SEQ ID NO: 20390 - DNA, 1027 bp, Arabidopsis thaliana
ttcctaaacataacatttctaatcccagaacatcaaacaaagatgtgaactgaaacatttacctgggcaaatcacaatggttaggatgccatctcaacttagtatagaacaaatcaggtctcccaaactcagtgcatctgaatcattcatcaataaaggtacaatctctagactgatacaagggatacgattcgtcccaaacccatttcccattgaacaaatcacaaccattcccactctcttcaagaaacccaactttggtgttgttaacttcaaacccatcgagctccttgagccaaaggaatctctccgattgatccgaaaagtcatgacttttagttttagccacggttctgtaatcgaggtagaagaagctgaagactaaacacaaacccaccaagaaaaaacccaagactcctagtgatggctcgaacacgagccttaaacgcttgaatctctttattactacttcagagattggcatggcttcatcttcttcctgagatgggttcttcgacatctttgaggttttaagaagaagcttcagaagttgctaactttattaatatctgagtagaaaaaagtaagctgaaagagacagctttacttggtatattagattcgtcaaactagtatatgtattagcgaacaaatacaaatccaaaggtgtaattagcttaagattttcggtttcaaaatctaaaagagaagagtctcaacttttttcttgaccgtcttgtttcgtaaagggagagacttggagagtgtgaatagtggggtccttttaagtggcgggtcccgtagatccaaacttgtcacacgcgcgatcatggcgcgtgacaaaattagtggggctaaagacggcgtacgttttagttactttttagtgcgcattaaaacggttaaggcgtttggttcatgcaccgaaaatagcgttttagtccaaaaatgtgtatatgtgactgatgagtaattagatggaggaatattctaatgagtaaagaagagtaattagattaatgaaggc

SEQ ID NO: 20391 - DNA, 511 bp, Arabidopsis thaliana
agtaacgtccgccagtcccgacccgcttctctgaatgaccacctttaatattttgatgaacttattttgctttataaaaaaaaaaggaaaaaaagagtacgtcaaaaactcaaagaagagaaaatgacgaatctttttcttaaagatgaggcaattgtatcaagatacgaggacgaggttggtttgtttaacattatcccaaacaaagtttacggccaaacccgtcactgccacgtgtcatccggatctccttttggcttcgtctgaagacgttcgatgctcaccggtcgcgtctttatcctctcatcatcatcctcgaaacgtgcaacacacaaaaaattgactataaaagattgcaaatttctctctaaatatctgattcaaacgcatttggtaggctgagagaaagaaagaaaaagataaagatggatcacgcagcagatgctcaccgtacggatttgatgaccattacaagattcgtgttgaatgaacaatcaaaatacctctatta

SEQ ID NO: 20392 - DNA, 928 bp, Arabidopsis thaliana
ccaccaagacggaggaggagatggaaacgtaccggaaaacgttggtcatggttggcgattggttaaccaaagggttttgaagaatgcgccgtgttcggtggcggttcttgtagaccgtggacttgggtccattgaggcccaaactttgagcttagatgggtcgaatgtggttgaaagggtttgtgtgattttctttggtgggcctgatgaccgtgagtctatagagctcggcgggagaatggctgagcatccggccgttaaagttaccgttattaggtttttggtaagagaaacgttgaggagtaccgccgtcactttacgaccggcaccgtctaaaggcaaggagaagaactatgcctttttaacaaccaacgtggatccagaaaaagaaaaggtaaatctcttttgatcccctatgtttatataccagttatgacaaatataactatagctttctttcttggaaaaataattataggaattagacgaaggggcattggaagacttcaagagcaaatggaaagaaatggtggagtacaaagaaaaggaaccaaacaacatcattgaagaaatactgtcaataggacagagtaaagactttgatctaatagtggttggaagagggaggataccgtcggccgaggtggcggcattagctgagcgtcaagctgaacatcctgagttaggtcctatcggagacgtgctcgcctcttcgatcaaccacatcattccatcaatccttgtggttcaacaacacaacaaagctcatgtagaggatattacggtttccaaaattgttagtgagtcttctctaagtattaacggagacacaaatgtatgataacaataaataaattgatctagtacttaaacttcggcttaatgcatggttaaagtggttagttgaagatgtagtttatctacaata

SEQ ID NO: 20393 - DNA, 540 bp, Arabidopsis thaliana columbia
taaggtgttcgccgatgcctgcacaaatggctctcaagtcaaaaagtgaacttacacaaataaagtaagacttataataagaacacaattagagcttaatacctgaactaggaagacatcaagagcaagaacgggactgtatccctgagagactccttggtagaaagggtttgctgaagttgttaaagcctttgcaactaaaaatccaactgttgcttgcatcccgagtagtgctgatcccattcccaaaatatttaccataatcccgctcctcaaacctttcacaacatcagcgcgaggcggcgcctgcaacaacacaacctttattaaaactggattttttcctttagacaccaaactacaaaactgagtatcaggactcaagtaggagtagtaaccgctattgggtgacctgggcaacctgactggacatgatcaaggttaagagctgctactaaatctaggttccagacggtctttacaaacaaagttgaccatcgtacgtcaagcgctattgtatgggtgtcactgattaggatt

SEQ ID NO: 20394 - DNA, 1001 bp, Arabidopsis thaliana
gtgtttatattcatcgtaataacttttgatgttttagatggtttgctgtttgattttctatttttaatacaatttaaaatggaatgttaatgtatatgttatcctgcaccttcattattatcaatttctaatcatcattaatcctattgagcccattatagacttagtgagtgttttttctttgttaactttttttgcttttctctttcttcatttttctttcatattcattacttccttctgtttcatatcgtaagatatttaattttgggaaaaaattacataaatgtttacgtgtttgatttaaagtctatttgaccactaatctataccactttaaacttatatagtaaattaagtgaaatataattagattgcaattagatgaaataaaaatactgtaatgcgttaaaacatcttataaaattaaaacagatccaagtagtatagcaaaggtcacttttattctatagcacaagtccattttttaaccggtctatgtttagacttgtttgataaacataattattactagatgaggatactaggacttggagtagcgtaaacgagtagttcactatcatgctcatacttagccatgtcggtttcaggtagtgtaacccttgcctcaaccccttcactgtcctttgagtccattaacacgacctgcgtcttatcaactgaatctggggcaacccaaaccggcttcccccatccaaaattcgcctcgtaaaacgacattctgcaccagctagacacagcatatgtctccatctcaggacttatctcacacaacgaactcagcatcgcgcttgcgattctctctttggcttcaacgctactctttgcgtcttccgaatcgtttctgataagctcattcagctcctgtttagttttctgcagcttagacaccgtttcttcgatttccatcttactctctgagctttccttaagtaatggtaaaaagaagaagtttcaattgccttgtgcggcaagagaga

SEQ ID NO: 20395 - DNA, 933 bp, Arabidopsis thaliana
agtaacggtccgccagtgtgctctaaagagggattgtggtggctgggcaagcgttctgtcacgccattaccccctgcaatccttaactggttttatgaagttcgcggtaaattgcaggagtctggacaggtgttggcacccgttgaaggcaagcctgattaccaggcattagctgacacgcttaagcgcgccttcaaacaactggataaaactttccttgatgatttgtaattgacccctgattacgcatataaaagaaggcatactcagccttcttttttttcaccgtagtagagtgatacaggagtcaacaatggaaatgaccaacgcgcaacgtcttattttgtctaatcagtacaagatgatgactatgctcgatccggcaaatgctgaacgttaccgtcgcctgcaaacaattattgagcgtggttacggattacagatgcgtgaattggatcgcgagtttggcgagctgaaagaagaaacctgccgcactatcatcgacattatggagatgtatcatgcgttgcatgtttcctggtctaatttgcaggaccagcaatccatcgatgaacgtcgtgtcaccttcctcggctttgacgccgccactgaagcacgttacctcggttatgtccgctttatggttaatgtggaagggcgctatacccattttgacgccggaactcacggttttaaccccagacgccaatgtgggaaaaatatcagcgcatgcttaatgtgtggcatgcctgcccgcgtcagtaccatttgagcgccaacgaaattaatcaaattatcaatgcctgaggaaggccgcgtgcggtgcaaaggttttctgtttgatcttgatggaacgctggtggattcctgcctgcagtagaacgggcgtggagcactgggccagacgtcatgggttacgccggaagaggtgct

SEQ ID NO: 20396 - DNA, 761 bp, Arabidopsis thaliana
cgtaaaggagaatcaaggtaacaatcattcatttcttcgatcttcttttaccctcttaacgattctcgaaatatgatcggaaagcttttctgcaaattgttgtttcaatatcgaaatttctctccataagcatggtaaaatatgaatgttaatacacatttttttatatgtttttaacaggtaaaaacagagattggctgaaacagaatcggaacataagaataagacaaaacccgtgttggcaaaagatctgaagatatgttttgttgcggtggtgcggatgaggaacccgccggtccgcccgcaaaccagtatgcagcccctcctaacaaagccggaaatcccaattttggcggtaaattccctaatcttcctcaaccgttccttgtacgtttatgttctgagtttcaccatgagcgtttgcgtttttgcatttctgcgtgtgtgaataggtgggaatagaggggaaccgaggaatccgaatgcaccgagatcaggagctcctgcaaaggttttgcccatagagatcccttctgttgcattggatgagttgaacagaatggcgggtaacttcggaaacaaggcactgatcggtgaaggttcttatggacgtgtcttctgcggcaagtttaaaggagaagctgttgctatcaagaaacttgatgctagttcttctgaagaacctgactcagatttcacctcacaggtacacacatacatatgtcaataacgattatcttctcttcaaactataatttgtc

SEQ ID NO: 20397 - DNA, 1463 bp, Arabidopsis thaliana
gatgagtgaggctggcgagatataagagaaccaaaaaaagatagggaatttaatgaaaaaaaacctcaactttggtcagatccatttttaaaccctgaactatgtttttagtaaaacaaacgctgaactaaaacctgttaataaacttaaccccacagtaataaacttaaacatgttaataaacttaacattgatataattatggtaaaatagagaacaatgaattatgtttcacaagatcttccttttcaaattatttaatttaatctttgcatatttagacttgcagcaactgtcaacaagtcggacacaacaaacgttcatgcaagcgtaaagcagtgccaaaaccacccaagaaacctcaaggacgaccaaggaaaaaacagaaaacaatggatgaagagaaccctatcactcagccaatacaatcttctcttcaaagttaatgcttgacaagtctttactttagaatatcttgtccctctgaaacgattgtttttttttgtgacaaatattgttgtgttgcaacagcttcgatagttatgttggttggatttatttaagcatgactctttggattattttaagttgttgtatctttctttcagcttctaaaatccaaactaattaagcaattcaaaatcatttagaacgttttttttgtaataaattcaaaacagttttaaagaacatcatgtggtttttgcgctaaatacaaatgtctcgttgtttttttttttggaaattaatattccattaatatttaaatactgtggggttaagtttattaacaggttttagttcagggtttgttttactaaaaacatagtttagggtttaaaaatggatctggccaaagttgagggtttttttcattaaattccctaattttatattcaatcttatgattagaatgtgtgtttgctacacaatttacccccgatgaccttaaaaggataataatgtgataatcaccatctccgtgatatacaaattaaaattgataatttcattgcattgtcttgtaaatatatcaagcataagaaaaacaattaagttctcgagataaaatatatcaaacataagaaaaggggctacttaaacaaatatacaagagttatgaacggaaacaacattttattataatgaaaccaaaattacataaatctcaactcctccatgatatttaaagaagagaggatttctggaaattgaaagaaaatatcgacaaaaataatatacagcgataaacatatttcggtgaaaaaaggatgtaagtagaagtattaattttagttttaagttttaattttaattttaataggttgatattaaagaatttacaaagcgggtggtgggagaagcccttggatccttggatgtagccgagggataggaaacagttagcttctttgtcgtcgatgtcttgtgtgaatgcactctcttggctttgtgtgccctgg

SEQ ID NO: 20398 - DNA, 555 bp, Arabidopsis thaliana
ctttattttggtataaatgcagacctcggcggttaaaatcagccagataatgtaccggaacataaccgggacaaccaaaagtgcgaaagcatcaaatttgcgtgcagcgacacagtcccttgcagccacatagtcctcaacaatgtgaatcttgaaggcaacgacggtcaagtcgaagcttactgtaattcagccgaagttttgggtatggagtgattcatccatcagcggactgtctctactcgcacgacgacaagggcttggaccagactcacaagtcggaggaagccgagactggccacgacgagctttgatggtgatgttcaaactgttgttgtagtgagagatgatatgtaatatagttttctgaagcatatgatacagtaaaaaatgatattgtatttgtgtttataatcaaccatagttaacgctgttgttaacagcatttgtccaccttttacatcaaatgattttattattcttttcatagaaagtcatatgctgcatctattgagcaatggccatcactttgaaaacttacgcttataccataaa

SEQ ID NO: 20399 - DNA, 487 bp, Arabidopsis thaliana
gggtaccgatcatagtatttaaaaacgttattgttttgtttttgttggatttacaccaagaatagacactaactagtaaggagtatcgttttttaatctacaaacttttgatgcatgttttgttatggtgtgaagggagttgttgggctttctcgactgtgggagcagtggaaggcttaaacaagatcgtgacgggagagttagtcactttgtctgagcaagatttgatcaattgtaacaaagaaaacaatggttgcggaggaggcaaactcgagactgcctatgagttcatcatgaaaaatggtggtcttggtaccgacaacgattatccttacaaagctgttaacggagtctgtgatggccgcctcaaggtcagtatagttacgatttatatataacaatattatcagaaagaatcaattttgaacttattttccaaaaatatttgtgtaggaaaacaacaagaatgttatgattgatgggtatg

SEQ ID NO: 20400 - DNA, 540 bp, Arabidopsis thaliana
catgctaggtcacaggagctcgcagaaaacgggttgatggcactgattgtgcccggtgtaccagatggttttctcgattgtcaggaggcttcaacgggatccgagttcgatctgttgggttcatgcctcatggacatggccaaagaggtacttgctttgttttccgtaagaaataagaatccatgacatattaaaaatttctaaaagacttgactgtgcagggaataatagaggaggaggaggtgaacagtttcaaccttcccatatattacacaactccaaaggaactggaagacatcatcagaagcaacggagagttgaaaattgataaaatggagacactggggagcatggacgcacaagacactatgcctgacctcgagtcaagtgttctgtacctgagagctgtgctggaaggtctagttcgtacccactttggccagcaaatgctggacgacctgtttgagcgtacgccctcagacttgctcattcctctttcatccttcagcctcaaacccacaaatccatcatgatctcggc

SEQ ID NO: 20401 - DNA, 1473 bp, Arabidopsis thaliana
atgctctaaaggttagctacaagggcccattagtgctgttaaaaatacccaatgatggctcagtagataaggcccattaatgaaaatcacagcttagtaatattgatgacatgttgacctaaagaaaattcaacatgatcatattgtgataataaatatccactgaatgtcatctaaccgcgtacgggattttttttttttttttttttttcatgtcgactccctaattccattgatattttattaaaagtttatttcataacacccagtaaatctcaaatttttgttctatgattttcctggttgaaataatcagctttttattatatcgaaacgatcgaccaaccgggactaattatatgtcttttttaaatgaattaattggtgttttattagtgtgctatcaaatcaagaatatctatcgtcatgtattgtatttggatgtttctgatatttaattgcaatttaatttacgtacatgcaccatcagggttacttctccaaaatacgtttgtactttgtacgtactcgatcttgaaaaagataatcaacgttttctacttagacatactaaagctatgaaagcgatattaacctgcaattataaggtttctctattcgtacgtgtaaacttacacaatatagaatcaaaaacttgaagtgttgtgcaaaagattaaatttcatatatacttaaaatagaattatgttagctaacacttcgccaactatgttggttaggtctaaataaactataaatgcatggtatagatcatagtgttaataatactagtctatgtatatgttaaccaaattatatatttttaattaaaaactatagatattttaatggtcggtttctgtttcaaaggccggttttgactctgtttctccttcttcttccttctatagtctctcttacctatttgatctcctcttccttctttctttccttcactcagatttttgtcagcttaaacaaatcatttctattctttattcgaatcatcgagctacaacaaacaaacagaacacaaaacacaccaaaaaatatttatatatctcttacacttcttccaattcttctcccatcagattcttctttcaaactttaaaacttttccaagatttctttttttctaataccaagcacaaaattttcccggaaaaaacagaggaaaacaaaggaaaaatgaattatcgacgaaaacagagtgctataactaactctgccgttgtctttatcatcatctccgccgtatgttttctctccggcggtgtctctggtttgggagtaaactggggaacaatggcgagtcatcagttaccgccgaagacggtggtggagatgcttaaagacaacaatatacagaaagtgaagttgttcgatgccgacacaaacaccatgggagtctccggctccggcgtcgaagtgatggtggctatccgctaatgatctgctcctagcgatggg

SEQ ID NO: 20402 - DNA, 906 bp, Arabidopsis thaliana
aacgttgcaaattcacaatgagggtggttgtaataaatatcttggccttcctgaacaatttggaaggaagaagataaagttattccaacacatagtgaagaaagtgagagagaagacaaagggatggcggaataaatttatttctcaaggaggaaacgaagtcttgcttaaagctattgctctagctatgccggtttatactatgaactgctacaagcttcccaaaaacacttgtgaggagatagagcgcatcattgctcaatattggtggtcatctacacaatatgggagctcgatgcattgggttgcatgggatcgtatgaaattctcaaagaaagaaggtgggcttggattccgggacattaccaaattcaatgatgcgcttctagcaaaacaagcttggagaatatttcagtctcccgagtgtttaatggcctgtgtgttaagagggaggtactttcataattccaatatctttaatgctactggatctcaaaaatcttttgggtggcaatctatattacatggtagagaccttcttaaaaaaggggtgagatacatagtaggtaatggcgattctattaatctttggacggacccatggttaccacttcatcctccaagacctccaagacaacacccccatcaccagcatcgtgacatatccattcaagaccttttcttaccaaatcgaacaggctggaatgaaagattgatccgtgaagtcgtcatacaagaagatgttccatatatccttactacaaagctcagacaatcacaaaacagagattacttgggatggcactacacggagacgggttcatacactgttaagtctggctattggttggaactcatatcctgatgaagaactcaagctcgcccccagcaggcgaaccccaattg

SEQ ID NO: 20403 - DNA, 539 bp, Arabidopsis thaliana
agacaagtttctaaattgacaagacacaaactaagagatcaacatcaccaatagagactaaaaaaaggaagagactttgaagccctttgatgaagacagaagcttttctcatttgagtgagtttcccggagttgtgatggaaagatccggccacgcaaagtactcaccggagacaaatccaccaccagcgttgctctctaaaccctcgaactgccacgtggctggcattggaacagcgtgatgaccaccgttactcccaacattcgtcgttgtcgcagtaccaacagttgaaaacggccacatcgctcttccgagtccaaagctgacgtcatcaaaacccgacccgagtccgattccaaaacctccgataccaataaccgaaccggatccatgcgtagccgtcgcagcagcgttatggttcaacagagtggaggtgaaacttccacagagagataaagcacttccctttccgtcgctttcagttactgtgtgagtaacgccgttagagattgacgactgagggaagagaacaggcgtcg

SEQ ID NO: 20404 - DNA, 1270 bp, Arabidopsis thaliana
tgagaaattggccttttttgaattaactgttatattcaaaatccgccaataacatcgctctaattatctctctttcccaaatctggaaaatttagggttccaacaaaaacgcgatcgcattacccaaaaattcaaatttgcaactgatttcgtcctgtttgaatcactccaatctattgctttcttcgtcgtttgatccaaaacagtgagaagcgatacaccattttttctgggtgtgtgaatttttattttaccccaaattagattagagacgatgagcgacgtcaccggtgatctcgcggcggtgagtgaagccaagggaggttctgacgccgcccggatatcggaggtgaaggcgtggctcacctctcagttcgaagctgtcggcaaagaagtacccaatttcgagtacactcatcgaagcattacccatttgtataatctcgctaccgcttctcaagctaagtctcaggctgccaccattgtcgctaacgattttcgtctcaaggcttcagaatatcgtgctcaaggtacttgcttgtaatccttagctcctaatttgctcgcgtggctgattcgaattatgaaaatcttcttttgggcattatcagtttctgatctgttactatgatttcaaacaaagttgtgtttttttggaaatttccaagttcctctctcttagatctctgggtggaaattttgttgatgtagcggctaggattagagagatattggagagtgcaggaatgtcacaagagagcttaccgtcaaatgtggtctcttcagctcaagttcttgcaaatgtggctaatttgttgaacatacgggacactgaactgagcaggtgactgtactgttagctctctcattagatgtgttgctatctcgaatcgggaaactgatgcagaagaaatatgtatagtttccttgtagcaatgggagacatatctctgaggaagactggagtggaagagaagagggctaaagcacagaaggagtccaatgctcttcttgactatacaaggaaagcgatacagaggctgacgtatttgaagaagtaagtttcgtaataaagcaccatataacttataatatgatcttggtggtggtgtacatgtaaaccttgccatttttcctttgggatgtgacttatctaactttatctgtgtgagctgttacagaatccttgcgcagctagaagatgatgtagtcccttgtgaatcacagatggagaactggaaaacaaatttggaagtgatggcggtgaagg

SEQ ID NO: 20405 - DNA, 1052 bp, Arabidopsis thaliana
agcaccgattttatgaatttagtactgtgaataatgtagaaagcgcatatgaactcttatttcattgaaaattgctctaggattggaatcatactaaagtagagaatccactttgatgtttttgtagttgtacaatgtgtagtttttgttttttgtttgagaaaatgtgccaaatccgatgttgaattgttgtttttgtttgtgtggcagtatgattccacacaagactaagcgtggagctaatgcacttgcccgcttgaaggtctttgaaggagttcctactccatatgacaagatcaagaggatggtcgttcctgatgctctcaagtttgtccttttaccctttcattttcattttttttcagtttccttcatttatacttacaagtagctacagtctctgaaactttgattcttccttcttgatcagggtcttgaggctgcaggctggacacaaatactgtctgttgggtcgcctttcttctgaagtcgggtggaaccactacgacaccatcaaggtatgcttcacttcacctttagtttctcttgtgtactgttcacttttactgatgtgatgctttctgtacctaagctgatttgaacatcgtcatgaaaagcttttaagaacataagttcctgtcatgcgtgtattatagcaataatatgcatacatcacataactgtactgttttaggatatctttagattggatcatgttttagttagaagaatggatcataagctaatgaatgtgtgtttgatgaaaatgagcaggagctggagaacaagagaaaggaaagagctcaagctgtttatgagagaaagaagcaacttagcaaactcagagctaaggccgagaaggttgctgaagagaagcttggatctcaattggatgttcttgcacccgtcaagtactgaattcaatcagtttatcgtatttgaatgtttttgcaagttttgctcagacattatactattatattacgaggttttgttgtatgcgattttgacttagtttatttcttgaattcgactttacttatttcctttag

SEQ ID NO: 20406 - DNA, 1260 bp, Arabidopsis thaliana
taaccaaaaaaaaccacaaatacagatacaacagtaaaacaaaaatccaaaagagaagagcgtttttactggaacaccttgagcattaccttccttcttattaccctcttccttgttatcatcctgcttccttatcctgatggttatacttagcttcagattctgtacgatctttcttcttcttgtccaatgtctcggatatatagcttcttcacaaactcttcgatcccttcctttatgcgttgcacatgtgggagtacgtctctgacggttctctcgaccaacgcctagcctcctctcatgcaggagcatttcctcgattggttgaaaggtttaatggcgttgatgaccagagagtattcgctcacttgcacctcgagttcagttatattatatatgttgccatgttggagtaggtatgtattagctctcatctcatggcttcagaaatgttcagaacagctttgctcattgttgttatgttgtctcaatattgaaacgtggccaatgttgtacgaaacatggaaaaaagtatttaaacctaaatgacaaaactctatctcagtcggtctgaatcatcatcttgctaaggttgctataaacttggaaactgacacctgcctcttagtcacgtcattgacaaaatgacaagtgtcaaaatctcataatgttgctctcacactcatgcacctctcttatctttataggagttgttgtcacttttgtatgtaacacaaaacggaacataacataacaaaacagagagatgagtcaagaagaacaaccaaagcggccacaagagccagtcacttacggtgacgtttttgaagtctccggtgaactcgctgataagcctatagcgccggaggatgcaaacatgatgcaagcagcggagacacgtgtgtttggccacactcagaaaggcggtgcagcggcagtcatgcagtctgcagccactgctaataaacgcggtggctttgtccatccaggtgacacaactgatctcgccgctgaacgaggcgtcacagtggcgcaaactgacgtccctggtgcacgtgtcacaacagaattcgtcggtggacaggtcataactcaaatccagaattacatcttttttcttacgatcatgttttataatggtgaagatatatttgtcataggtcgttggacaatacgtcgagcctaggccagtggcgactgcggcactaatggaagcagaagttgtgggtttgagtttacaaagtgcaataacgattggag

SEQ ID NO: 20407 - DNA, 982 bp, Arabidopsis thaliana
cgacaacattcttcaaactcgagtcagcttcatggtaaagtctttcaaaggaagagactctgtcttcaagttcatgaacaagccgatccttctcaagaagcttctgtctcaagccggagacttgagattccagattcgaaacccttgaagcgatagctatggaagtgatcttcctggcgaggtcgagttgatcataagggtcggtgggaatcacggcgagaatctcgtcggagaggttgaagtcaccgccgctttgagacatcgcaaagggccctcgggatcttcggctgcctaaataaactacgtggcgtgtttttattggaagattcgcactttttatttgtctttgtccgagacagagagagatagttatatattgaccatgaaaccctgaccttttatatatttcatgtttaaacccctttagctatttgttcttatttaaataccttcaactttggttttgttacaatttaacccttcttttaaaccccaagaacttgaacgatatctgaaaaactcaactttggttcttcttttttcttcccttccccaacagtaatgctcgggtttgttgatgaatgagataagctagtgaaaaagcgtactactttcttctcacttctaatttttggtttcaggttatgcaggtagtgaacatgtcagttcttattgtgacaagtcttggggatagagtgattgatatctaacaaataaatgccctttgacctgcaaaaaactttcttaagatctgcaagtaagtgtctttttgcctatctactaagtaacatttccatgatattcattatgtctcttaaggggtttaacttactatatggataggatcaagtactacaatgggtgtctcttccacacagtgcaaaaagatttcacagcacagaccggtgatcacaggagctggtggggattcaatgtacaagtacgatgttgttttcttcttacgatctctaatcatatgtgg

SEQ ID NO: 20408 - DNA, 655 bp, Arabidopsis thaliana
tattttttactaggataatggccgattatgctttggtgaaaatttagataacgcaagttagatttttctcactttatttaataagataagattttagcggggatgaaatttttacaagcgaatccctcaatatttcacttatgttcgtggatgatagcttcttttttgtaaaacgacaaaaaaaacaatgcgtcattggatttggaatactaaagaactatgaagaggtttttggtcatgagttgacaactcgatgatggacaaacttatggcaatcttcgaaatcactaatataggggacatgaacaactacttgagattatcgaaaagtttaggaggatctaagacaaaaaaaatttactcttttagaaaatatttacataatagaataaatggttggtttacaaaattcttatctaaagatggcaaagaagtattgattaaatcagtaccagatgcattgcttacttatgtattgtcttgttttagattaccaaaatcagtaacatcaaaacttaggaatgtagtaacgaaattttggtagagtccaatggacgaacaaaacgtttacagtggaaggcatgagataaattttgtcatagtgcctctctgctctccctctcctcctccgggtgcctctctgcttgctacttgg

SEQ ID NO: 20409 - DNA, 919 bp, Arabidopsis thaliana
tcatcccgagcaaacggaagatatgcttgaaagtgtggattgcaaagattacctgtgcagaaatggcctgtgtaacggtatattctgtctcgttcttaaattgcctccacagtgatttacactgcacaggtgtgatcaacgtcttttctggtgcaacctgataataacaagggtaccagtaaggatcttttatatctcaaaggtgtgagtactaaatatgagaccttttgtgttttcattatatacagtgagtaaggttttagtcaccttctcccaagtgcttgaggcaagtgaatcaattgtgctgatgctcttgctagtagcattgttgcccgtagaattaaacagagctagcgtcaatgtcttctcaatattgtcgagttcatcatccaagcgtataacagccataacagacagcagcttcaaggactgaaaaagagaacaagggtcatatcaaaatctcgagaaatttgcgattgattcaaagaataggtgctgagatattgctatatcaggtaggtctcataccgcagaacgagccatttttgtaattgctctgatgtcctcctttccagtccaaacacgtggcattgaatcagaatcatggctgaagattgtagcaaatctggatagaagtttgtttaatcagaaagctctgtaagagatggaagttatcggacaaggaaatgatgaaagacaagtaaaatggtgacacctatccttcatgcgcatcatcgctcttccagcctcttcctttgccttggtttcaacaatacctcgtgcatagttctcgagatcagcaagcattttactccgtgtttcttcgtccatttcgaaaccagataatgcgttggagagaccatagacagccaattctccttcccgtctaagtagctttcttattgctggccatgtttca

SEQ ID NO: 20410 - DNA, 2196 bp, Arabidopsis thaliana columbia
atggtgggtttctagtaacaatcctaggtcagggttcaaacaggtaaaaatgagaacttaagagccctactcaatcattgggtcgagtagaaccaacaggtgacaatattaagaactaaaatgcaaacaacatgggatacaaataacaggtaaataaaagtgcaatcaggtggtgaatacaaataaatctaagaagaatagaagtcctaaggatggattaattgataagggcaactctaggattcatcaggtggctaacaggtgaaaggtagataccctagacgaatagattcaaaaaccgggtcaatccactgtcgtgacagagacccccataactctaccacttcctaatctcaactatcgtttatgaaacataatagagcagagtttaagcaacaatctaccaaagccaataagaagacaagccaatgtcttggtcaagtttacaaatctctggaattcataaatcagatatccatttgaacgtcttttggacgttggacgtctatgatcgaatctccacactagccagcgaataccgcataggggccaagcgaatccagaaaggatctaacctaatcttaaccacctgactaacctagagcttaccctaatctaatccatcctcaagaaccctaatcactactcaagcaacaaaaagaagaacacaaccccagaaattactaaaatcatactaaaatgtagatctaaacaagataaacaactttgctcaaagaagtaaatgcaaaagcgaaatagattaagagtaattaaggtttcaagattgtaaaacacaaagaaaaactacaaaataaaagcttggtcctttggacaaactccaaagaacctatttatactaaaatttcgaaaaccatagattcactagaagacaagagacttgaggcggtttggatgaatgctcgatcttggggatctggtaaagagggtgctgcaaaatctgcgcctttgcctccatgctccaagtgatcaattggtcgagtagttgcttcttcctctcctattcttatgctcagatgtctggttgagtggggaatgaggaggatcagaagatgctttgaacgatcaacaattcttgtagagtaggttgcccttgattgagtaactggtcgagtagaggatcgagtagggggtcgagtagagtctgctgccacctctgtagctgcctggatcgagtaactggtcgagtagattgctctgctgcttcccacctagtttgatagagtagagggtcgagtagattccttgtaagctccttctacacctgaaaacacaccaaaacatgcaatatgtatgcaagatgatcttaaatgcctaagtgggcaaaataaactaaatgtgatgcaaaatgatatgaaacaatgagtgatcactaagctaaatgatgataaatacatgcctaaaatgagtaaaatacagtgttatcaactcacccaaacttatctcttgcttccctcaagcaaacaaaaaatcttaagttgaaggagaggattgaaggtggggattcaaaaaccgaagcatgcatatagtgcgggtgagatcaatgtccatgtagctaattctaggttgcaaggtgatagatccttcttaaaaactttagccatacttgtaacacccccgagcctggccatgaccggactaaccacgcctgactcgggtgggcatcacagatggagagaaccattcgcaactcggccaaagtctcggggttccaagtccacggccaaaccgcatccggtcatctccccacgagattccccgcgtaggtttgccagcccttgcgatgaacctagtgttgtgcggctcggacaaagccttgtatcatctcaaaacatccgcatttgtaaaaccctttgtacttattcgaataaaacccacaaaaagcaaacgattagtaaacggatccgcatataaaactcgtagagatacaaaatgaggttttacaaaagcaactaaagaaaaataataacctagtccgaatggccttgcgttcgtctttcgtcttgacgtccgagactacaggcgcctgaaagacaagtaaaatcatgagtaatctagcattactaagtgagtcgggaccatgcagcacacaacctatggcaattctaagctgtctaatgcagttcaatcctagagggaggttaatgaacgaaagcaagcaagaaagaagacaacatg

SEQ ID NO: 20411 - DNA, 1697 bp, Arabidopsis thaliana
cggccatgaggtcgagtaaactggtcgagtattagtgatgattctaaaaaccaaaattttgaaatcatatctatgctcgaccaacagaagctacagagacttacagggagttcaacaaatttacagaggattacagaaggttctagtcaacagaaaacagtgcttcaggacaaatagacagaacgtggcccaccacctctcacttttgtccccccacgcgttttaagagataacaaaatctcttccttccttctccaccactcgatctcaccatatcctctcccaccgacatcatctctctccctctccaaacactcgaccacgaaaactcactccacctcacgtccatcactcgaccaaacctcgcaatcccttttcctctccaaacacttgacctcgcccgtcactcgatctcgcccttccggcttcgtctctctccttcactcgacgacggtactcgattttgccatttcttccttctcaccactcgacggttactcgaccgctccgcccttcacttcgccggaagcttcaccgcctcaccgtcgcctccttaccactcgaccgcaactcaacctctccgtgcttcatcttcatcttcatttactcgacttcgccggagcttctcgccgttccagcttcgcatactctctcaccgtctctcgtttcactcgaccacttcacacttcgcctcaacatcttcgccggagtttctcgccattgtccgtgcttccgtcatctccgttcactcgaccaccggaccggcttcaccatctctcaactatccaccattcactcgacctcgccattcactgcgcctccattcgtctctttactcgactgctcctcaaaccgccaccgtcttctttaaattcgccgtttactcgaccgtttcactcgaccgcgtacttgactggtttagtgtgtgtgtttatttgaactaacatattgatatttggttttgagttacattctttttcagggaatcaatatgagtaacaacagtggcgaatcctccatggatgcggattacaacgtcgatgaagctgaatcttggtcaactagaccagagagagagcaacaggcttatgagagcttcagagccgagacccaacgctcagtagctcgacgcaatgaaaggagagctgagattgctagaggaaagagagcgatgaccagcagatatgagttgatcgacgaagatattgacgtcgagtatgagcctgagtcatggcacagagaaacaaaactgttgaacaagcctgatgaagttacagtggaggagtacatcagacttttcgagctgaacgacttctggggaacgaggtacccctgttacgagactctagcccagcttaggctatctgcggttcataagctttgaggttgattcgagcgaggctctgtgggattctcacgatgcaacataactctgaaccagctgattctctaagaagcttcaaaccattatcttctgagattaaactctttatgtctacaacaatctgtggatccattaattcaaaccttcaataccacctcagattgtcttctggttaagtggaaaacttgaaatacctttttttttttattccctagaattttgtggaaatttaagaaggaggagtgaaatttcgccctagcaaaatgttgacaagtctcccgttaggtcggcagaggacaaaagtatatttttg

SEQ ID NO: 20412 - DNA, 1983 bp, Arabidopsis thaliana
tgactatctctgtaaataaatttttcttgtcttgttatttttgatttgttttagttgtgtttgtggttctcagagacaagggaacaacgtagagatagagtaaaaattcaaaacttttactctatagaagacctagagatcgagtgtataacctggtggagtacaaaattttgaaagttttctgttgcatctggagacccgtaattcgagtacgtcagtcgagtatacgtgatgtttaaaatccaaaatttttaagaacgtcactatagtcgaccaacaggagctacggagacttgtaaggatttcttgtagtttacagtagaccacgcgttgaggataagctggagagagaatctaaaactcaacctccaccactcattttgaaacttcactcgacttcacaaaatccactcgacctacctcttttcatctcaccaccgacactccaaagagccactctgtccagatcagttcactcgaccaccgtgaatcactcgacctccgcgccgcagtcaccagaccatatcttccgtcactagacgtccgagaaccactcgacctccgcgccgccggcaccagatcatttcctacttcactcgactatccctgcaccgccgtaatcaagtactcctcctcgttcaccgtcgaagtctcctggaccactcgattacgagaaagctactcgaccacaaagtatcactcgacctcgagtattcactcgacctctgcagcagcaacttggcctcttgttcttgaaagcaacggagccctgaagaattgtcaaagtgtttactcgacctctaggcttcaccggctgaacccgacatccacaattcactcgacctccaggaacagctcaggttactcgagtacagaattgtactcgatcaattcaatctatttcattgcctattgataacaattttggtttcattgctatctttgagactaacctattgacatttgagctttgagttttaaatttctacaggagaatcatgagcaattatagtggcagctcttctgttgatcctgactacaacatggatgagacagagtcgtcatcttcaaggccagagagagaacagagagaatatgaaagcttcagaaggaaagctgagatagcccgaggaaagagagcgatgacagagaggtatgagcttatagaagaagatctggaagacgagtacatgcctgaacagactcgcagatctaccaaacttctgcacaagcccgacgtattgcttgctgaggaatatgttaggcttttcaagctgaatgagttctgtagcacgaggtatccttgcttgaccaaacttgcacaactcggattgttggaagatgttcagcacctgtaccatagttgtcatctagacactctgatggcttatccgtatgtagtgtatgaagatgagacaatacaattcctctccacgctgcaagtagacctctaccaaggtatgacctctgatgagttggattgtgaaggattgggattcttgcgattctctgtgtatggtcatgagtataggttatcaatcaagcgcttggaaggattgtttggcttccccagtggaacgggatctaagcccaagtatgacagagaagagttgaaagacttgtggatcaccattggcagctctgtaccgctgaattcttcccggtcaaagagcaatcagatacgcagccctgtcatcaggtacttccagcgttatatagccaatgtactctactcgcgagagatcacagggactgttactaactctgatatggagatgatcgcaatggccctcaaggaaattcttcgccaaactaagaatggtatgtctctccaaggtgaaatcaatgacacacctctctctgtacatcttctgatccatctgtatggataccagagctgggctgtcagcaatcatcagaagagagcacgaggcgctcagtgcataggtggtgtctgtgacaccgattctcatagcttgtgga

SEQ ID NO: 20413 - DNA, 1836 bp, Arabidopsis thaliana
aaatgtcctcgatatcttctccttacctatttatgaagtggtccatggacgtcgtaggtcccatggaagcctccggtgggaagaagaaactaaaaaacctgctagtcctcaccgactactctaccaaatggattgaggctaaagccttccaacaggtaaccgagaaacaagtcgaggacttcctatgggaaaatatcgtatgtcaacatggcataccttatgagattatcaccgataacgggactaacctcacctcgagaaaaatcaaagcattttgcgacaaatggaagatccgtcttaccacatccaccccccattacccacaaggtaacggacaggcagaagccgccaacaaagctatacttagcaacatcaagaaaatacttgattccaaaaaatcaatgtggtccgacgtacttcacggagttctctgggcctaccgaactacacctcgcaaatcaacgcaagaaacaccgttctctctcgcctatggtttagaagcagtaatccctatcgtaaccataataccaagcgtgagaaggaccgccagtcatgctaactcggacatgaacacgcaaatgttacgcgacaacatggacttcatcgatgaacgcagagatcaggcaatgatccgagttcaaaattatcaacaagctgtcacccgctactataactccaatatcaaaattcggagattcgaagtgggagagctcgtcttacgaaaagtgttcagcaacacgagagagctaaacgctggaaaactgggaactaactgggaaggtccctatcgaatcaccgaggtggtacgtgacggtgtctataagctcgtaaaagttatcaacggagtacctgagttacggccttggaatgccatgcatctcaagaaataccacgaataagtactcaaaaacaatcgaactacgataaggcttgatcccttggcagggtacgtaggcagctcctcccaagagcgcagccaccaattcaatcaaatcaaaagagcttaatcccctaaccaggtattcaggcagtcacctccgcaaacgcaattaccatctcaacccttctatctgtaagacaaaacttcaacaagggaaatggacatcgcatctctcatcaacgaagatcagctgctcacctgacagttcaatctcccttcagtattgagcaggtccctgctcgatgaccaaacgccagatcgtcgcttgctttacctccttttgtacttaacgatttcgagataagaataaaaggaaattttgatactcattatcatatttcgcaaaaaaaaaaatcatttacactatgatttaaaactcattcgtaatcttacgatacctaaagcccaacacccgaacgttggcggatccattttgtgatctcgcttccaaaaagtcaacagtggactaaaacttataagaacacatcacttcggcttcatcggagctcacctactacaaccaaatctaactctttcgctatcaacgcataacatagtaaacaaggaagaaacgaaggtttcattcgcgacctggcgataccacaagcccagctcccaaaatctggcaggtcccttgtgtgacctcacttcaacactttcccaagacaaaacaactcaaactcgttcaaagttttaaccttcgaagaacataccatatcacatccgaaataatttggacgcgaaacaagtccaattattatccgggacatggacaaagcgaggtggtctcacaccaaaatcaacaaagtgtcaacactcgaacgaaagacaaaaaatacttgctaaaaaggataaaagccttcccaggcattcgagtacttaaacgaacaaaggtg

SEQ ID NO: 20414 - DNA, 1704 bp, Arabidopsis thaliana
ctcttcacctgcaagctcacggcgccatcttctgctcctgctaaggatgagggaagaagacctatgattacggtggcaaaggtgcgatcgggcgtgtttgccaggtcattggtgccattgtcgatgtgagatttgaggatcaggaagattgccaccaatcatgacatctctcgaggtgcaggatcaccccacaaggctagtgcttgaggtgtctcatcacttgggtcagaatgtcgtcaggaccattgctatggatggtactgagggtctcgttcgtggaaggaaagtcctcaacactggcgctccaatcactgtaagtagcttctatgtccagatccttctatctgggacaatgatccgtaaaatcagccattattaagtatagatctgtgaattcgttgattggatttggcctagtctcgccggtctctgttcgtgttttccttatcctctacgttgacttttcccaattacaccttttacgtcaaaagtctattcatttccagagaactctatgtccagatgattttggatgactaatcatttgatattgcccttaatattccttctagttatctgtctaacttgcgataatggtaatatgacatttggcttgttctcacttttaaggtacctgtcggaagggctactcttggacgtatcatgaatgttcttggagaacctattgacgaaagaggcgaaattagtaagaagtctcagccacacttaattaatgtctcacattctgcaaacttgtcatgacaatatgttcttgctgttgttcagagaccgaacattacttacctattcacagagatgcaccggctttggttgatctagctactgggcaagagatcctggccactggtattaaggtagattctgggtcctagctctgcactgttcccacaggtcacatgtgttgtctttcgtgttccgagctgatatttagtttttccttttcaggttgttgatcttcttgctccttaccaaagaggaggaaagattggtctctttggcggtgctggtgttgggaaaactgtgcttattatggagctgatcaacaatgttgccaaagctcatggtctgtttagcacaagttgttctgaccttattagtctctctgttcctatttattaattggtgcgttttcttttgaacaggtggtttctctgtgtttgctggtgtgggagaacgaacccgtgaaggcaatgacttgtacagagaaatgattgagagtggtgtcatcaagctaggcgaaaagcaggttttcaattcattttgattactcttcaccttgctttgttctgaaaacggcatttgatttaatttgttactcaattctctctgttttcctgtcttaacagtctgagagcaagtgtgctctagtgtacggacaaatgaatgagcccccgggtgcccgtgcccgtgttggactgactggtttgactgttgccgagtatttccgtgatgctgaaggccaagacgttttgcttttcattgacaacattttccgtttcactcaggtgagccttgttcctagctttgtcctattactcagcccctgtgtgccatttatgcattgtacttggtatactcttttgtgtaggccaactctgaagtgtctgctttactcggtcgtatcccgtctgctgtgggataccagccaactctggcttctgatcttggtgctcttcaagagcg

SEQ ID NO: 20415 - DNA, 1600 bp, Arabidopsis thaliana
tcgatcgctagttgatttgtattggttagaaacgtgttgatttgtttgtaggtaaggtgccagaatacacaatgtgttgatttgatttgaagtagaacgatttgggtttggcaatgaggcagagttacaagaggaggcaggggaatgcgtttagggtttgtatccgatgcaaccgggtttagatcgtcttggagacgcaatataccatcctccttcaaagtagctacccaaccatgggatgacccgatcgttaccattggatcactatttaccaactctagaggtaccttcttttccaagcaagtgcgtcgagacatcatcataacatcgagtctcccgagatgatcagctccacaaggttgaacgccgacgattgaacaaggaggggtttgcatcagagaggatcttaccagtacaggtttcctccgaaagcatagtagcttcaaaggttggtttagaagcagagacatgagtaagatgttgttaccgaaatgcaaaggctgcaagagattttgtagaattaggtattgcactaacttgagtttattgattcacaaagtgtgatatttatacaagagagtcatcgtataaaataaactcgaatccctaaattataggacataactctgtcacaaaatatatcacaagagattctactctatccccaatactccccctcaggttggagtgtgaagattctgaatacccaacttggacataagataaatgaattgattacgaccaagagccttagtgaaaatatcagctagttgctccgaggtcctaacatgatgtgttgttataatgccatcacgaaccgcatcgcgaactgagtgacaatccctttcaatatgcttcgtacgctcgtgaaagacggggtttgctgcaatagaaatagcagccttactatcacaaaacaaacgagtaggcgcacggagtgtgatacctaattcttttaacaacttgttaagccatttgatctctttgagagcaaccgacattgctctatactctgcttccgcagacgagtgagaaaccgtgtcttgtttcttggttttccaagaaataggcgagccaccaagcagaaccacatacgcactaagtgaacgtcgagtcaagggacaagattgaaaatccgaatcacaataaacctcgagagtcaaatccttattagcactcagcaaaatgccctgacccggtgaacccttcaagtaacgaactatgcgcatcgcagcctccaaatgagcttccctaggagcttgcataaattgggacaatacatgaacggagtatatgccggtctcgctcctagagtgcaactctcagaaattatatcaagggcatattttcgttgagacaagaaaataccatcaggcccacgacttacttcaatgccaagaaaatatttgagcttgcctaagtctttcatggaaaagcaacgtcccaaatactccttaaatttctgaaccatatactcatcattaccgcagattattaaatcatcgacatataccaagacgcgaagttcaatccctttacaggaataagaaaagaaagagtaatcctcataaccttggatgaacccgaatcttttaagagc

SEQ ID NO: 20416 - DNA, 751 bp, Arabidopsis thaliana
ctctagaggcgtaattgaatttctcttagtccacaattcgtaagaaattatgttattctctgttttttagattgttggttcttgctctcgtctcacattcgaaagatcaaatcttttccacaagattgtggttagaaagctttagggatcttgaatttactaactttaacgaatcgatttaggagatggatcttcaaactgagaatcgaataggttcaattctatttagagaagcagcagaattgagaaggaaagctgagaaagaaggtgttaaaagcatattgtttacatgttctgtttcttgactaagaagatggaaaatcacgagaggaaagcggtagtagccgaatgaagcagaatggtagtttcatgagaaggagtttagataagagattcagctccggtgatgagaaaaaggttacgtgtgagtcatcaaacaagagatggtattcagaagatgaggaaggcttaggagatgatgacattgagacttttctccaatcacggtgtgtcctttcacactctttacctagcagatgagtttgctagctaccctcattttctgtcacatgaaaaaactttaatgtgactctcttgtaaataataggcagaggctctattggtcctatgatggatgaacagggaacggaaagtagtcttgggctccgatcgagagaccaccttcattgacacaagactcagataacgagcatggtccgaggataagaaaggactatctgaagaaacatct

SEQ ID NO: 20417 - DNA, 1501 bp, Arabidopsis thaliana
catctgagccaggtcaaaccggtcctcggatcgttgcatactcagctcaatcatcttctaggtaaccaccgagcagggtgatgtttgcccaaggtgtttcgaggaccggctcgggtatgtttgtggagtgacgcccgggccataaaggataatgttcccacctcggggagacggcaaaattacgtctcgcggcacttgtgttatttgtttgatcggctcggttacctgggtgaaatctgaccccaaaagattagtaccttggttgtttaggaggtggatgaagtatgagaggtgtagtgggtgacgtgacagtagtgcctagacttataacaatgatcccagcttgaaaagtagctatcggagatgactctgcttcaaccagtgatgtgtgtggatcgactcgagtggtggtgtcgatctacactcgtgctacaattcgaccatccttagaatgttgacaattcggtgctgcaatttgttaagtcttattcatctctttcttatggcctttgataagtgtgtattttgcatgttttgagcatccatttgtcatcactttagcaccatatcatcacttttttatactatttctcatcatttgtcatcactttacatgtttaggataggtttgcatgcatggtgcatatttgtgttgatttcagttgatttggagctgttgacgagctaattggaagaagcggacatgatcatacaaaaccactcgacccccaggtcgagtagcacttcacaacctcagcagaccactcgaccccctggtcgagtagaggacatcaccacttcacctcaccactcgaccccgaggtcgagtgtcttcatttccatcacctgaccatcactcgatcacatcactcgaccccggggtcgagtgtcttcacctccattaccagaccactactcgatctcaccactctaccttgaagtctagtatcaccattaccaccactcgactacatactcgattgcgagcttcagagtcttcttcattcggcactcaagcacaaggaagaaaagaagactccaactattcactcgacctcccactcgaccacctgggtcgagtacagttcttagtccgtcccaatactgcgtcgttttaagtattagggttttggaatatttggctataagtagcatgtacttcacattttcgcaaacaagtttttttctagttttattccacagacactgtgttctagacctttctaatccggatttctctttatctattcaacattcagtatttgtttttgatttcgtttactgttgttcatcctgttatcattttgctattacattgttgttatcatgttttcatcctgttcaacgtttatgttctctacaatgatgtctgagtagtgaataggtttctgaggatgggttagagtagtgtagaattctcagtatgctaggtggttaagtattgattgatagatcccttctggattagttgttcttaatgcctattgctttctgaaccact

SEQ ID NO: 20418 - DNA, 1475 bp, Arabidopsis thaliana
atataccagttgtacccttaatgagttgattaaaaaaataaaaaagaaattcaaaagctaaataaagaaaatcgagattctccgttctctcttcttcgtcgtcgtgttcttcttcttgcgtcgacgttcatcttcttcgtcggccaccatcgattccggccgccgccgacttgaaatccgtcgtaaaaggcaacgaattaggtcagtttcttctcatatttcctttgacattggtgcattgtgattttagattagattttgaattatatataattcccagattcaatttgatagtttgatgattggtttgcaaagtaaagagtaatcgattagaggttgccgaaacgttatttgaggtgatgagcaaaggaatgtaggttgaatgtgagttgaatttgaattccgagatttcatattaaagatttggggggtttcatgttagttgacaagatcatgaagaaggttgcgattgatgaagcttctgtgaagttgaaactgagttacaatctgtctaaagttaggagagagacatatattgtagatgatgaggatgtctttatatttttaacagaatctgatgaagagagtcggattcctgttttgcatgtggagaaattaaatggtataggagttgagaggagagaggaaatttctgtaccggagcgtcgaagttcagttggtgtaaatgtaagaaaagatgatgttttaaatgaagtatgtgagatggtgcatgatggatatgataatgatgtgaatgattgtgagaatgtagtaggtacggagatcgtggcagtcgaaaggccgatggaaaggccggtgaattctgttgaggaagaagatgaggatgataggattgattatgatgatattcacgatattccacgaagtgtagaagttactccgcaggttatagaatgggatgatggtacgggtattgaaattggtcaagaattttgttcaagggaggctgtgtgggaattggttaacagagctgcaaagaaagaagtttttggagtctatactattaagtcagacccgttgagacttatgctacgatgccgccaagcttctaaagggtgtacttggtatctaagagttgcgagaactaagaaatctcatttttggagtgttagagtgcatagaaagatgcatacatgctctcggagtgttgagactacaagcaacagtatacagcgaggcacaccaagattaatagcatcggttttgcattgtgactatcccggaaatttagagaccccaactccaaaaaacattatgtcgattgtaagaggaagacttggggtgcattgttcatactccactgccttaagaggcaaaatgctacatgttagtgatgtgcgagggactccggaaagaagctacacgatgttattttcttatctttacatgttagagaaggtaaatccagggacagtaacttatgtggagttggaaggagagaaaaagttcaagta

SEQ ID NO: 20419 - DNA, 2217 bp, Arabidopsis thaliana
aagccacacgtagttcatgttatgataaacgagctaggccattactggaggaaggtcgtatggtaggtgacgagccggcagacgtgcgacgagctggatgaacagtggtagagaggcgaattggacaaaccgagttctgctgaaggtttagacgagctgggcgacgagtaggtggactatgcagtcaatggacgaactgccgctagcgaggaggtagatgagtttcagttgagggatgagtcgatagctagacgagttggacgatctgactagctgacagctaggcgaggaggtggtcgagtgatgggaagagcttgaagacgatctgaggagcttgaagacgatctgacgagcttgaggacgacctaaggagcttaaagggcttaaaggatgctgaagagcttgaagacgagctgagggacttggtgaagagaacgagttgataagcttgacgaagaggagcgagctgacgagctacttgagacggacgagctgacgagctttgtgagacggacgatctgacgagctttgtgagacggacgagctgacaagctttgtgagacggacgagctgacgagctactctgtgtctgcgtgtcaggcggcattcatcgagggatttgacgaaactacccttcgccttaatactcctccttggtttggaacttattttgggcttttgacttgggttgcagttgattttgttaaatctaaacaacgaccttttttgttgcgttcttagtgattaagatatatgttgcgttccatgcctccatgacacatggtccgtggtgatgaagtgtggcgatgacgtgaagctttcgtaaattgaagaccatcggtggcgaggtgaagacgtgaagcctaagatgggcatgttggtggaatcgtcctggaaacgacgatggacgtaaaatcggtcacaaaggtggctgatctgatagccgcagacatgcatctttgggctacagccaggacgtgcttgtcgcagaaaaacagtaataactcttgttagacgtaatcaattgaggcaaggatgagtccgttagaaagataagccttgtagcttcaaaatgatgtgcagatcggctcctggttccttttagatcgccgggaaatcgatctgaaagcagacagatcgggtgtagacggatctatgcatgtctcgataaacaacgcatgcttgagagagaaacctataactctcggaagacagcaccaaatggagcaaaatcgatcttgttggaaagataagcctcagagcttcatgatgatattaagatgggctcttgatgttttctgaatcgttgggagtttgctttctaatccagttgctcccacagttcgaatctgcgatttgacaggtgtcatatgtttcattgaaacagtgataacgcttagtaaacagctcggaattggatgaggtcggtctctattgaaagataagcctcggggctcagttgatacttagatcgcctcgtgatgccttttagatcgccgggaatttgattccgaggtcaacagatcggatatagatcgatctgtattttgtcagtcttctgcagataaacggcagtatctccgagaaaacagaccctaacgaagtgagctggggcttgttaaaaagaggagcctcagcctatgcaatgtgcttttcaagatcatcactaagacgatggtagagcgtctgaaacctttaatgacaaatctgattggtccggctcaagctagttttatccccgggagagtaagtacggataatatagtgttcgttcaagaagcagtccattccatgagaagaaaaaaaggggtaaagggctggatgcttttgaagttggatttggagaaggcttatgataggatccgatgggattatctggaggatacacttatttctgcggggttccccgaagtttgggtaagatggataatgtgctgtgtgtcgggcccggagatgagtttgttgtggaatggagagagaacagactccttcaagccgttacaaggtcgacattcgagccgtgctggtccgtcactggagcaacttgagaggtttgctctcgaaaaaccaagctgatctggagacatgttcaggtcttcatctccaagctcgatgacgttctaaccatttgacttcgtcggacgcccttttggttaactccttaaggctgctgagttcggatgccgcaatcttcgtgtctctctgcatcagaatacc

SEQ ID NO: 20420 - DNA, 1008 bp, Arabidopsis thaliana columbia
tagaggatagaggatccccctccatgtttcttcctcctttccactaaagcgatgataggtcgcagaactagaagacagcgaaatcaagcggttccggttagaaattggactcgatggctacgattcaatctcacagagacacctttgttcttggcgttttgatttattatttgacggctaggattcaatctctggcacctttcatcatttgtaaaaaagtatcaacctttttacttcgttcttgagctcaaatgttgaaacttaaaacccattcatcacaaagttgaatagataatttgggtaaagtttcaatctttaattcgttcttggctcaaacttacatagatgtttatgaaaaagcgatagaacaatgtcacactttcttagtttctttaatgcaatgcacagatattgttaacctctcctcgtacacaaagcaaaccatcctaaagaagagactaatgattattaccttgttctaatcttttacaaatatgacaaaactaaagaatcatcaaatcaaaataaaaattacaattctctcttttctttataccctaaacaaatacaaacttctataacaaaaacgaacaaacaacctactctctcacccaccaacctactctcaaccacagggatggatttttctaattttatgtgttggtgaagtggaaagatttggcaacacccaagtgctcagctagtcgttgtactgaggactgcaccggtttagataccgaagagagcagctctgggagattcgggtggcattgaggtaaatacgggtcatcatcctctgtgcggctgaaggaagtgagtacagaccggcagaatatgaatctacacaacaacaagacaatatttgacaagagtccatgctttgtgaggttttgattccgaaaactttgagaaaaactcacctgagaatcagccgtctcaagaatggatcaggtaagacctgtgcccagacaagattcaagactttggaagtcaagagaatcgtttccc

SEQ ID NO: 20421 - DNA, 965 bp, Arabidopsis thaliana
gattaatgaggcgtggtattttactgcttcacatgtatagtttattgcctatgactgcaagaacgtaatgaatttatccccttttatagttggtcccaccaaccacttggtaccgctttgtcgctggtctgaacgctcagctacgtctggttcagcaagggaaactgaggtccacgtttcgctctgttatgagatggattgaaactcatggaaaccctgctttgaaaagacatggtgtacgtgttgacctagctaggtttcaggcattgtcttcgtcgtcttgccagtatggaatccttgttcacaccattgcagatgaagtcgcatcaacaagaagtgatgatgaaacagaacagcagcatccatggtaagaaatgtcactttgattctctctgttgtttatttgaatatgcagcatccagacgttcattgagttttgaatatgcagggggacacaaattgaaaatcactctggtgatttcagggagaattttcaacctctaagaagcgaaatcaaccacgtgaggcatcaagagtgtggagaaatcataggacatttggaagcttacaatttcttaaagaagaaaaagatgtcctttccctcatctccttcttgattcataacacaaaacctgttggtcatcaggtaaagtctccctgagactttgaaatctgtaattttcctttactattgagggtattgaaatctgtaattttccgcggtgttaacaggatctggtcggtttggttatctcggtgctactcctaggagatataactctaacgttactcgcactactccaactctactcgatatcattgctggaagtatttatagctatgtttaaaaaaactctcagcatcattttaacattccctgctggggtcagcgctttgattagccacgagacaaggagctctgctagtcgcacacgcgtttatgcattgtggaatgtccatccttg

SEQ ID NO: 20422 - DNA, 683 bp, Arabidopsis thaliana
tccccgtctcttccgaccactttcaacctccccttcgccgcctcaaacacttccctcgtcactttagttccgcttctcacgatcagagcgtcactctccgccactttcttcttcagatcttccggcgaaagatcgtaagagcagtcaacgtcgccgaattccctgaggagattcacgccggcttctcccagtttctcggtgacgaggatcctcggctttggaagagttggattgtattcatcagagtcagatccgacggttgagaatctgttatcctctgttaacgtcgtttgctcgacggtttttaaggcggcgcttatggccgttagtttgacgcttgttgcgtaacggcggtgaaggaaagcagggaggacggcgaatctagaagacggtgacggagacggagacgtccaccgtgagttgacggctttgacggacgaacacgaagatgaaaatgccatgactcttttttttaataataaatatgattggttgttgtgagtgtgtgcagaagagctaaagtggttaatatagagcttacaggaggtaatggatgagttttaatttaatctttcacattgtgggctaccaacattatgtattaagttgaacagtttgtttggtaaaagagtaaataaaatgagaagcacatgcacagagagtaggacgttcttgtctaggtg

SEQ ID NO: 20423 - DNA, 1267 bp, Arabidopsis thaliana columbia
cgtatgatggtgattcatgtttgagtctgaattgtgtcgtagggttctgtttggccgcttgggtttctgatgagatcatgtgcgatgcttcgaaatagaatgcttgcagatccttcatttctcttcaaagttggaaccgaggtttgtcaatgaataagctaatgctgttcttggactaggttatttaggattgaaattgaatgatcttgttctacggatttaatgcaggtagccatagactcttgctgtgcaacttttgcagaagtacagaagagaggggaagatttctggtcagagtttgagttatatgctgctgatcttttagttggtcttgtggttgatgttgccttggttggacttttggctccttatgcacgtatcgggaagccgtctgtggcatcaacaggtttattcaaggatcttaaacgtgcttgtgcatcccttcctagcaggtaatactgttactgtatctctctcgtttttttcacttttgtgttaactgttcccactgatatctatcgagctggtggctgtgtattcgggatgagatgtacttatacatgcttttttttttgtacttctgaagtgtttttgaagcagaaagaccgggttgtaaattctcagttaaccagcggattgcaacattcttctacaaggtatggagaagaactattgctttaatgtcctttgtggatcttgcttacctttggtttgattaattgatgtgattcttggtccagggcctcttgtatgggtcggttggattcggctgcggcctcattggtcagggaattgcaaatctgatcatgacagcaaaacggtattctttcaccatcgactttatcttgctacttttcaatgatgaaatgaatcttctgactgtttaaaaaactgttcttcactgaaatttgaggttacctttgttaataggagtgtgaagaaatcagaggaagacgtccctattccacctcttttcgaaagcgctgctctctggggtaagctttacttttgatctctaactatgttctacagaatcatcgatgcttttcccctctgatgttcactgaaaacgatagtcttgaaccgtcgatattgtgttgtctactctttttccgagttcttgtgatcagccatcggtttcttaaccgggcttagtttcttagaaaggaaagaacctgaattgccaatgataccaagaatagattatgcttacaattctatgtgaagatattagctacattgtcctgttgttagcaatattagatca

SEQ ID NO: 20424 - DNA, 2124 bp, Arabidopsis thaliana
tgtagaacaacaatggatgatctcgaaagaagacttggagatatcaggacttcggtctgcgagacacatgtgtttctcttaactattggggcggtaacacttccttgcagtttgttaagcttttggaaaatacttaaactctaaaactttgattacaaaataaacaattaaagaaaaattaaaaattaaaaactttctaatgtaaggtgcttgaactttgattacaaaataaaaaactttgttttgattaatcaaataaatgagttggctttgctatccattaaaacaactatgtttgaaaaactcgattacgtgaatttaatgaatggttttgcaggcaaaaatctaattagagctataattaaaaatataatttttttattttttcttttttttttgcttacaaaatgcttataaaattaaaaatattctataaagttttaatataatttttatatactattataaagaataattatgcaaaaaaaatagaatgcataaatattttatttatatataggacattcctacatggcgttttgtttgtcctatatcttatacatttcatcgtcgtgtttcgcatcacggaagaatatgatatagcaggtgggtttactcaggcgtcatttgttttactctatgaaataaccccttcaaattggctgctggcgcctctaatactaggtgccataattataacatgttacaaggttcttctaattgaaggtgtgtcgcccaatcgtgaacttctgccgacagggtcggggcaactgacgggagaagtggggaaaggttaatgaaagaaaaggagttaactagaatgttgtaatagaaaatacactgatatttactatagcataccgagatacgactttcttgtatatatataaccaaaaatacactacaatgttgtaatagaaaacttatccattctgttatgtatctttgacgttggttaattgattttcacatcaagacgaaatgttatgtttttgactaataaaatctttatcagtagcatgcatcatttgggctttatgatctcgaaatattgtgtaatttaagtcacgtgtttttcaaaatttaagatttaccattagtatttgattatagagtagaaaatttttgaaggtaatcaaacttaatatttatggaccaaaattcaaaaaataaattataataataggctaatttccgtcttaaattttataaatgaaacgaaatcagtcatgcaaatatatatgctttggcctttggaaattgttatttatcatctgtcggcaaaataagcggaataatcaaagagctagaattagacgataaatctttttcactgatcaaatcattagcatacgttcgtaaaccttcaaattaaagaaaaattcaccaagccctaaaatttcagtttttttttttgacgaatgtggttggtttagatcgcacgagtcacgagaccaaaactaacgaagatacgttgtcgttttggtttccacaaagtactcacgcgcattcagcagcgcgtgattggcaattcctgaatatcttcagatcacaggccctgataatttctcttctccgacagagagagagagaagcagatcgtatcatcacgagacgaccatcggaataacagagaaagagagaaaaagagagagagagagagagagagagagagagagaggatgtctggtgtggttgctcttggtcatgcgagctcgtggggcgcagcgctggtaaggatctcgccgtatactttctccgcaatcggaatcgccatctcgatcggtgtctcagtcctcggtgccgcctggtaaatcgaatcttattcttcttcgtccccgcagattaaagcattgacctttttcatcatctcctgttggtttgtcttattcaggggaatttacattacgggaagtagtttgatcggtgcggctatagaagctcctcgtattacttcgaagaatctcatcaggttcgttaaaagtttcaagcttttttaattctagttttgttcctttggttgatcaattagtggctttaaggaactgtgtagattccatgtcttgttctgaatagcaatgagaattcatcgctgagtagcttgattcatttggatatttcaat

SEQ ID NO: 20425 - DNA, 1752 bp, Arabidopsis thaliana
ttgtcaagaaaattcttctctgtatgcatcacatcaatattatgtcgaagattgaggtccttctagtaagacaactcccacaagatgctttccttgtgccaattatgttccttcccatagcctcgcatcttcttttcatgaccgttcccaccaacatccttcgtttttggtggatttacactagccaaccgctcgtaataaactttctcccctgtcaaagacttgggtggatactctctaggagcatctcttcctttcagaaagtcttttctgttcctacgggatggatgaccatgaggaagaaatctttggtgacaattaaaccagcatgtctttcgtccattgggtagataaaaagactttgtactttccatgcaaactcgacaagacaatttaccatgagtagtccatcctgataacatgctatacacaggaaagtcgctaatcgtccacagtagtactgcttttagattaaaattctgactcaatgaaacatcgtacgcatcgactccagtagaccacaactcttttaactcctcaataagaggttggaggaagacatcaagactagctcgaggatgatttggaccagaattcagaatggtaagaaataagtactcggtattcatgcacataccagggggtaaattataaggagttaggatcacaggccacaacgaatgattacgagacatgccaaatggattgaacccatcagtacacaacccgagataaacgttacggggttcttcggcaaactcgggatgtaacccttggaaatatctccactctgctgcatctgaaggatgattcatttctccctcctttgattggtgctcagcatgccatcgcattgccgcagctgtcttatggctctgatacattctcttcaaccggtccccaataggtagataccacatacgactatatggtactttggttcttcgacggtcgtccttaggcttccatcttttcgcgccacaaaatcgacattgatcttctttttcgtattctttccaaaatagcatacaattgttctgacaaacatcaatcgtatgatatggaagtcctaaattacgcattaacttctcggtctggtaatgtgaagtggtagcctggtttccttctggtaaaaaatctgtaaacatttcgcaaacggagtccaccaacttttcactcatattatactccgccttgttgtgcatgagtcgagatgccaaggataactgcgactgcccttcacgacaaccattgtacaaaggattatttgcaccttctaacaagtcgtagaacttatttgaatggttacggaccggttcttccacattctgataactatcatcatgatgatagttatcatcataccccacgttaaaattaaatgcatcgttcaccatatccacatatggatcttctacaacattacccacttcttcatgattctcactaaaatacatcctatccgtgtaactcgttcctatatccatattcatttcttctccatgcttataccaaacataataatcaggcataaatccttgactaaacaaataactactaacttttctacccaagatgatatgttttttattcttgcaaatactacaaggacaatgaaatttacctcgactactctgtactattggctgactattagcgaatgtcattaattgctcaactcctgcgacgtattcggctgacaaattccgcgtcacttcatcagatctcttgtacatccaatctcgatagaaa

SEQ ID NO: 20426 - DNA, 623 bp, Arabidopsis thaliana
tctagtaacgtgcgccagtgtgctctaaagccagaaagacaccatttgtagttggacttaagtgcgaaacaggcgcgcgcaaccccggtggtacgttgctgctagagtcagcatcatgaaaccagtaatgatgaacgagatataccttgatactgtgagcttcgtcaaggatgagcctgtgataatgaatggaatgaatgacacctagtaatcattagcaataatagcgtgagttgaagagtataatgcttactgtcttctttaacaatgccatcattgcgattccaacctttccattcttttcgatggattgactcaaggccagaatctagatgtaaatcagataaagcactaaaatatattagatgacgaatacgcacaggatatcataatcacatcgaactcttcaaggtctctcttcctcataccctttaccttggtgttggtattgtggtagacgagaactttgagcttcccatctgtatattcctattataggaggtcagagaacgaatcagcattctgattagtcaacaaacctggatttccgattgccactgcattagagcaactgggggacaacaacagcgacggcctcctgccgggtaaccgacattagaagt

SEQ ID NO: 20427 - DNA, 1306 bp, Arabidopsis thaliana
tagtaacgtccgccagtgtgctctaaagtgaagcgcatccgccaggctgcggcgctgcgttttcgccagctcaccggtggcggtttcaactctgatgagtggcgtgaagctccccggctgataaatcgtctggatgcgggttctgtcgttctgtattgtggtcagccggtcgccgtcccagccgtaccaggtcacttgcggtttccgtgacagcgacatccagcccgtcaggtcccgttcacgccgccacacccgttttgccaccctgcggcccagcgggtcgtaaagatagcgactttcgaccagcggctcttcatattgtgtccgcgtgtagtgcaccagccggtgctgactgtcgtaatggtaccggtgagtccgctcatcatccgtgcggataaccccttccgggatgaggtcggttttctctgtcagcctgccgtgacggtcataccggtaaagatagtgcgcgtcacgggcgatacggttatccggccacatgctgagggtgctgtccgggtgcagctccgggtcgggcaggcggttacctgccgggtctgtggcatacgggatgcggatatccagattcgctgcggtggtgtgaacgccggtcagcctgccggtggtgctgtagctgtaactccgggtctggcgcgggctgctgatgcggatgagttcgccgttgtcgttccaggtgtaatcgcggtcagacagcaggctgttcaggtgctggctctgtaactgcccggcaggggtataagcggtggtgagttcataacggccgaagctgcgcagcgtttcccggtgcaggcggtcgcgggtgtactccaccagcggtgtgtcgccgagtttcatgcctgccaggtaaccgctgccgtaggtcagccattccacggcgggcaggctgtccggtatacagcggttcgccagcccctgcgcgttgtacgcatgtctggtctcatgctgccagagcagtgcttccgtctgcgggtgatgcaccgtctgacgctcaccggtcagccggcctttctcatcatacctgtaatgcaccgccacccggtgcccttcgctgatatggctgatgtctgtcagccagccacgttcgtcatactgccaccgctctgcggtttcacccttcacggtgcggtgcgtgaggcggtctgcttcgtcatagtgccagtgggtgaccagaccctcatcctcgctgcggataagtttgccggtcaggtcgtggtgataacgctgtgtgcggccgtcaaagccggtttcctgtatcagccggtcaagtacatcgtaacggaaggtggtg

SEQ ID NO: 20428 - DNA, 1986 bp, Arabidopsis thaliana
tccatcccttatgctggtacgcctgttcgattatctctctatgagtttcatctcgtaactggtcttgcttgtggctaatatcttgctgttcagcgaaaaaagatgaaggggactgctgtgaaagagatgctgttttatagcactttattcggacttgagtcggatgtcactgttgcccgtgtaatcacaatgcttaagaagaaagttactgatgacccttcattgcggattcagtatgtcgttctcgcgcttgataagtaggttttttaggcctatttataagctggactgagtgttcagttcagttcaattccccttaaacactaacatgtcgatgcagctatagggggtgtcaatccagtccactgttattgctagcaatcaagatgtgtacagaagcaactaagtcaagccagattataatgatagtgggtttctagcaacaatcctaggtcaggattcaaacaggtaaaaatgagaacttaagagccctactcgatcattgggtcgagtagaaccaacaagtgacaatttaagaactaaattgcaatcaacatgggatacaaataacaggtaaataaaagtgtaatcaggggtgaatacaaataaatctaagaagaatagaagtcctaaggatggattcattgataagggcaactctagggttcatcaggtggctaacaggtgaaaggcagaaaccctagacaaaagattcaaaaaccgggtcaatccactctcgtgacagagacccccataactctaccacttcctaatctcaactctcgttgatgaaacatagcagagcagggtttaagcaacaatctaccaaagccaataaacagactagccaatctcttggtctatagcctacaaatctctggaattcgtagattagacatccatttgaacgtcttttggacgctggacgtctatggtcgaatttccacattagccatcgaaaaccgcataggggccaacgaatccagaagggatgtaacctaatcttaaccacttaactaacctagagattaccctaatctaatccatcctcaagaaccctaatcactactcaagcaacataactaagaacacaaacctagaaattaatgaaatcataccaaaatgtagatctaaacaaactaaacaactttactcaaagaacgaaatacaaaaacgaaatagattaagagcaattaaggtttgaagattcaagaacacaaagaaaaactaaaggataaaagctagatcctttggacaaatcccaaagtgatctatttattgtaaaatgttgaaaaccctagattcactagaagacaagagggtgctgcgaagtctgcgcctttgtgtctatgctccgagtgatcaattggatgagtagatgcttcttcctctcctatctgtatgctcagatgtcaggttgagtggggaatgaggaggatccgaagacgctttgatagatcaacaagtcttgtagagtaggtcgcccttgatcgagtaaaggggtctagtagaggatcgagtaagatgggcgagtagactgatctactgcttcctctatggctgcctggatcgagtacaggggttgagtgaattgctgcctcctctatagctgcctggatcgagtgaactggtcgagtagaatccttttaagctcttctacacctgaacacacaccaaaagatgcaatatgtatgcaagatgatcctaaatgcctaagttggcaaaataagctaaatgtgatgcaaaatgatatgaaacaatgagtgatcactaagctaaatgatgataaatacatgtctaaaatgagtaaaatactgtgttatcaactcccccaaacttatctcttgcttgcctcaagcaaacaaaaaatcttaagttgaaggagaggtttgaaggtggggatcaaaaaccgaagcatgcatatagaacgggtatgccaatgtcctggtagctaattctaggttgcaagatgatagacccttactt

SEQ ID NO: 20429 - DNA, 2661 bp, Arabidopsis thaliana
  unsure (1)..(2661): unsure at all n locations
caaaatctaagatctctaaaattgacccgtgttataatctcctgagttactatcaaaaccgtactttgtataataagatccctttaggtagacaaatatttgtacttttttatgttagtatccaacattatattttgttgcctaaactgaacattattaaattgttaattataagatttcacctatagtataccttcccgtattaatatcgatccaaactcgtcccaccatataactatacaacactggttatttagaatttcgattgccctttaaggataacaaaagaaagaaacaacaaatgttgttttcaaatagatattccaaaaccttgtctagattaattaaaatggtatgaattttttatttatttaattacttttacatattaattattctacacaatttatgaaatactaattgttttttctttagtatgtgcaggttgacccattaacgatccgatccaacgcttcttcacctgaaaatttgcttggattctcttcgtttaaaaacaataccaaataaacaaacttttgcctgatgaaatcaatgaccgatcttggatgcaagtttaaagagtctttcctcatcgttcgttcagtttcttaatcgcttctttgtattttcaaattcgattgatattctgtaaattccctcattttggtcaattgctttaatgtaactttcaattcgagtcttgtcattctcttcaaactctgtttttaatggatttgatatggtgaaggagaatacactaaacatggatgggaagaagaaggagaagccagcagctcagtttcactcaatcgcatagccggaggaatcacccactctatatcgttcacgtggcaatctttggttgatcacggactttcggtgcgggattcgacaccaacaattagccctccaagtctttcgaagtgttatcctaattcggaagactttaatgctttaatgtacaaagattgcgctagatgattgtatgatttccaccaaaatcttgtaactcccttgattccggcactgtccatatttacccgtatgacatctgtcaccattatgaccacatcttaattatttaccattaaagcgggaaaatccttcaccttcccccacgactcccaaggcggttccatcatcatcaccagcttgcgtgaggtaaatttattttatatctttctttttttttacgcttttctctcttagaacaaagatcctctctgttttactctaccaattttttcttcgaacaccggatttttttattctctacgatgaatcctgatactgaaagacccgaatccccatctttcaacgagtgtggttatagcaatgatatatgcactcgcccgaacgacatcgccggtccacactatatgtctacttgtacccttcaatgccttgagcgactgaaggagctttgccggattccgccggagattatgacggaatcaaagatgcatggtcccatggagtccccggaggaccatcgctccggttatttttgcgtttacgagatctatttcaagggctgcgggttgacctttccttttcctgaagccttggtctgttacttggaaactcttggaattgccctgtcccaactaacccccaaccttctctgaactatcttggggaacataactgttacggcggaacgganctacgttatcgaggttcctgaactaaacaagcttcttagcgtgagaagttcatcgaagaaaactgggtacttttcggcgtacccgaatgccaacaggaacctcatctcgcacctcccgaacaaggatgagaactggcatcaaccttggtttttgattaagaaaacccttgcttcaatcggaaatctttccgatgtgcttccatcgaagtggtctacgaaacccggtagaaattaggtcgcatataccttctctgtttacctttactgtttattgaccaaatctgttgtttcacttcgcagctttcatcgctcggactctctcgaccgaggaattcatcgaactcttcaaaatcgtcttcgaaggggaaaccctctggaattccttcacccgtgaccggtttatagaggccaatcacaaactcagaatgagccctcccggacagcttcatcaacttccgccacctccttccctatctcaaggaacattagcccgtgatcttgcttctcggtggaaggtgatatcaaagccgatggctgaggcttgcgaggtaaacaagacgttccttgctagttgacaatggtagcgccgaagggccagatcggccgatgcgtttaggtcaacactccgtcctgaacgccatggtggtcgttctcctcggagaaaaagatatccccgtcgtgactctcctcgctcttctccccgaggtggactgagcagcgaacccattggtaatttagtttgcaaaaagagagacagaccggctcgtggcagctcttctccccgaagggacaaatcaaaggcccggacttttgacagatagcgtcccggaatttgagaacgcttcttactccatgcttactattcatcgcggggtagtttcatttcccttttactaatcttgctattcctttacgtactaacttactttctcgggcttatactcagtgccaggcaaacagcaaacttaacgacatggttgagcactatgaaggat

SEQ ID NO: 20430 - DNA, 1600 bp, Arabidopsis thaliana
cctcgcgattcaacgtagaattgcctttacaaggcttaattgtataatcattttcttattacacagtagaagtctttctaaccttggtttaactctaaccaactcttgtactggtttcatcgtctttgtcccttagacttagataatcttttactaggtcaagacatgcatattgtttgctaaccactctaagcctaacaatcgcatattcctttatcctattttcacggtcaattaccaaacatctatcttaactaatacgctagattgtacataccttggccaatatgcggatttgattacttagcccgtttgtcgccttactccattcgttcaacgactcgtatccgatcgtgaattgatgaaccaatccctatcgttacttagccatacaaccaaccaaccccactggtctaagtacaacgatagagattggggatcttacgattctcttggttcatgatgagcgaatcaagctcttggcttattggtccatgtgttctccaaacgtacgcccctccggctacatggtggacgattgagccctcggcttatcgaaccatccatgtttccgttccggtcgtttaacactacgaccgcccacggtttactaaccgtttacccgtccagtccatggtggtcgataaagctttcggcttaatgatccatccatgcggtccgaacgatatccttatcacacccaagggtccgtggattcatccactggatcatcgtaggctagcccatgaaatctttcttccgtcggccttaggtttgctcgcgggtccaacatccgttttgtccatcggttctcaccgtggactttcccgtgggttatccatcgagtcaccctttggtcttactgatctctgatcggtttcaccatggctgaggagatagatacatgaaggcggccgcgatgttgatcctatatggtgaatcacgttccttacccattcttggtgctttctccctttaccggtaagattgcatccatgggcgacccttgggtgtgttcggatgcacttatccttgtgcttccttgaacacttttctcgatccatcccatccgacgatcggtttgttcgacccgctccgtcagacgatcggcctgtcccatccgacccgtccgacgatcggtctgtccgatccgtctggccgatccgatccgtctgacgatcggtctgaccgatctgatcccacgatcggtctaccggatccgattcgtctttaagacgaacggtctaccctctccatcctctacactccatcgaaccgttggaccgggaggtagcatgcgcatcagtttggtcgagttatactcgccgagccgcaccccctttccgaccaacaactctaggatgtgttgggactcctttaagaatatttaatggtgtttggatgttgtgagatgatgtgagatatcgttgggcgtcctcccttatatagggggcgaatggatgcttcccgaagcatcacatcccttcctggcaccctccctaaaggtcacatccgctccttgcatccttccgaaaggtcacatctgttccatgcatcttttggcgatgcaaccgctttgatttcggctttaaaaaataaa

SEQ ID NO: 20431 - DNA, 1726 bp, Arabidopsis thaliana
gcaccgacagagctcctgcaaactattgcgcctccttacccgtttatgcgttggacgatggatatcgtcggacctcttcatgcatcctgccaaaagaaataccttctcgtcatgaccgactatttcactaagtgggtcgaggcagagtcatatgcccgaatccaaccgaagacgtccaaaattttgtttggaaaaaaattatttgccgccatggccttccgtacgaaatcgttaccgataatggctctcagttcacttcacttcaattcgagggcttctgtgcaaaattgagaattcggcgagtacgtctacacctcgttactcgcaaggcaacagacaggctgacgccacaaacaaaactatcattgatggactaaagaatcgcctcgaagaaaagaaggatgcatgggcagacaaactcgacggtgtcttacgatgacatcgtacctctcctcggcgatctattggtcaaacgccttctcccttgcttatggtatgaaagccatgggaccatcggaagttggtctccccatgatctgaccttctatgcttgtccacaatctgccataaacgataagatatttctcgccaacctcgacaccgttgaagaataacgttacctgactctccttcgcatcctaaactaccagcaggccgcagcaaaattttacaacaagaaggtgaaatcccgctactttgtcgaaggtgatctcgttctctgcaaggtgtttgacaataccaccgagatacatgctcgcaagtcaggcgctcactgggaaggcccttatctaatctccaaagtcgtcaaatcaggcgtctatcaattgtctaacatggacggtacttcaattccttgctcttggaactcgtccaaccgtaaacgctactactattgtaccgctccgcatcactaccgcggcacactatcaccaccatctgcatcattccgcattccaaaataaaaattctgtaacaacctttaccgtatcgaactacggattgcttgatcccttctaaagggtacgtaggcaacccttcgcgggcacatctataacaaaaaaaaatgccgaacaaagtttacgataccgaaagagataaaacaaatagcataaaagcgacccccatcctcatgccactttggaaggtcacaacgacctaagtaccaccaatccttgcttcgccctcagctgtcgtcatcgatgcctcgtcctcaaactctggaaaggccacgaggtcatcatcaagaagatcggtaatctcaagagcatcgaccacttcgcgccaattgtttttgtcaaccttaagctcgcacatagtctcccttaggattgcggtaccgtttttgatcaatttcttcaagagtttccgagaacctacggcttggcattgcatgaaaagagattcgtctgcaacacgtttgtcaagcatatgcttctttagccgatcgatcctggctttataaatagcaacatcatctttaaagcggctccattcggaacgagcagtacgaagagcatcgtcaagggaacttctcaaccttgattgctcagctcgactaaaattatccgactttttgagactttccaagagctctgtgagttcaagttacacaaacgagttgctgcaataaattccgcggtctttcgtttttctgaacggccaccgtttcctccctcacctctctcgcctgttcctcgagaaaattgtataatgcatttccggtggt

SEQ ID NO: 20432 - DNA, 776 bp, Arabidopsis thaliana
ggaagctaaagtgacagcagggatggtagttaataccaataatgaacaagaggttggcctattggtgccgtcaacccaatctgtcaccaaaggttctgagtatggtccagaagcaaagtacatagcaggaaacgatgtcatcactgcacttctgttcgctttacctccacagacatggataaggaccaaaatccagatctttcagaacaaaatgaagaatctcgtttccattggtaccctcttcactatgatcagcctaaataagatcaatctcagcaaaaccaataacatatgcaatctaatataatatataagttattaaccataatcattacactctactgcagattatgaatcaactctcacacacacatacacaaagtaagtaacattaagaccctaaaatcctcaaaagtctatacctcttatcaccattccaaagaccgaatcctgcgtaaaaactcgtggtggctgctgcttcggtttctcaacaacaggaatcacaaactccatcaacttctggtatctctctttcctcttatcttcaatctccttagaaagcaactcattctcttcctcaagtcgcagccaaagcttctaactcaacttgataagcttgtttcctctctctagacctagctgcagattcacgattcttaatcatccttctctgtctctgtgcagctgctttatccaatggctcaaccatcactctcgctctcttccctctagctcctcctccgtaaacatctaaaccattcccaaacgcaactatt

SEQ ID NO: 20433 - DNA, 2156 bp, Arabidopsis thaliana
tattaataagacttttttttggccatataacagttcccttgtaaaaaaaaaatgttataattggcatagatgaagaaaaaaaaagactaaaaacattttgggctttggccgtaggtttgacttcacgcaaaattaatactactagttttatagaaaacagaaaatttcagttaagtttcctccataacggaaacaagtttctttcatatgctcgctctcaatatcccactataaataatcctcgaatgctcccattcatttacatatcacaactcacaagtaaactaatccatcaaattcacaaaaatcacacacattgttcaaattactggaacggataaatgtctcagggtgcatgtgagaatcaacttctatccaaattagctttgagtgacaaacatggagaagcttcgccgtacttccatggctggaaagcttacgacaataatccttttcatccaactcataatccacaaggagttattcaaatgggtctcgccgaaaatcaagttcgtcttcttattagttacatcctaatgagttcgttatactttttcttcttctaataagttttttaatttagtttattttattgtgatttgctttcagctttgttcagatttgatcaaagaatggataaaggaaaatccacatgcatctatttgtacggcggagggaattgactctttctccgacattgctgtttttcaagattatcacggtctcaaacaatttagacaggtatttatctcatttcttataaggttttattattattatacagtatctattaaattattatatacttatatatgttacagtatcaagtatttttatgctcattcacgtactcttgtttggtagtaattatacaccttacatttatgtaagattatgaattgagtatattataatcttaggaatttgagatttgtatatttctagaactataatttgctttcaaataatgttttgtttggggacggaaaataaacaggcgattgcgacgtttatggagagagcgagaggcgggcgggtgaggtttgaggcggagagggtggtgatgagcggaggagccaccggagcaaatgagacgatcatgttctgtcttgctgatcccggcgacgcttttctcgtccctactccttattatgctgcgtacgtatatatacacactttactagtattcaaataaatattattttggtcattaataattaaaaagacacatgaattagggattttgatgttatgaaatagaataagtaaacattatactatattaaaataaaagtaatcgaaaagggcaaaagttctaatgatttcataattacataggtcaaaaaacaaaagactcttttgataatgggttttcacttttcagaattatttgtgaaatatacctcatttgattgattcaatattttaatttggtaagcaaccccgtccacacaagttacaactatgatcaaattgtcgattgactcttcacaaaagtcaaaccattaattaacacttgcttgacttgctctcttcagtactaattatactgggtttactaaaaattccagattcgatagagacttaaggtggagaactggagttagaataatccctgtggagtgtagcagctcaaacaatttccagattacaaaacaagccctagaatcagcgtaccttaaggcccaagaaaccggtatcaagatcaaaggcctgatcatctcaaaccctcttggaacatctctcgatcgagaaactcttgaaagccttgtcagcttcatcaacgacaagcaaattcacttagtatgcgacgaaatatacgcagcaacggtttttgcggaaccgggattcatcagtgttgcagagatcatccaagagatgtattatgttaaccgtgatctgattcatatcgtctacagtctttcaaaggacatgggtcttcccggtttccgggttggagtggtttactcttacaacgatgttgttgtgtcctgcgcaaggaggatgtcgagttttggattggtctcgtcgcagacacaaagttttctagctgctatgttgtctgatcagagttttgtcgataactttcttgttgaggtttcgaaaagagtagcgaagagacaccatatgttcacggaagggcttgaagagatggg

SEQ ID NO: 20434 - DNA, 609 bp, Arabidopsis thaliana columbia
  unsure (1)..(609): unsure at all n locations
tgcaaagcattttaaacacaaagtccgatcccgaataaacactgacgtaacacttgtgcattacagaaaagaatgactatgacgagaagaagagggtggtgtatccatttggagtggtaaaaccaggtggtcgagaagaagatataactctaaatgacattaataagaggattttaatgccatcggctaggccggttcgacatccggttggagactttgcatgtcgtccgtgtgtctctgcagatggaccgggtctatcaggcaaagccgtggttgcattcacgaagatacaaacattagggaggggcacaattactattataagaactaagggatgatatatcgatatatgtaattaatattggctattagaggggggtcgttataatatgtactggagatgtttcaaaaagactaatcattggttgacatgttcaaacctattgttgtatataatgagaaatggtgtatattagtatacatgcttttccattttcttagaaatcttccttctaattatttagaacctcttaaaaaagaatcaagataatagatatcttagaaacttactanacaaattttcttaagaaatcaagattttgtatgtat

SEQ ID NO: 20435 - DNA, 891 bp, Arabidopsis thaliana
gaccctgcgtagatcttgaaaaggagttccttctggagcatttgccaagcgcacctgtaggtctgtcccaaaaaacccttgttcaaaccatgaaataatgtcagaaccaatgaatggtccctgaattactccttgaggatcaatatacaagaataagaaatcctcaggtggcatagccgcttctgactgatccacttcaacatctggttgctgcagcttgcgcatataatcttgctcgaacgacccaacaacagattcgctcccatccaacacaggggacttagtaaaaactgatctaactgcttcaggacttccatgagaaacttgataaccagctccaaaagatccataactttcagaagccactgaattcaatcttgggacgctagaagctgcccccagacctccattatgactaccaagtaatcctacaacaatagttgttggacttttagacagaatatataggacatgaaaaatgcacgtaaactgataagaatggacgttttatctaaaaaatacatgatacttaagaccaagacccggttacgtttacacccatcatgcacgtaccggaatcattatttttcatggaaccattgtcaccattcataaaccctagcaaagcaccatccacttttgtctcacctgactcaggaatgcggcatttcactgcagtacatacaaaagactaaagtcagagaagcattcgtcatctcatgctaggtggaaagataagaggccaagtaactagagacaagataacatacacagactgtttccacctaaggactcttccccagatgaagtgtaaacttcgctactaatgatccttcccttccatatgccgttaaggtttgcctaatagataaaatttagatactcaggaag

SEQ ID NO: 20436 - DNA, 864 bp, Arabidopsis thaliana
cgtgtggcagacttcttgttcttgtttacagttgtgagcccatgctttgagaaacatggctgttgttttaccatctaaaacggcatgatgtgcggttacgcgagagaaaatccttggtttgggaaaaacgttacctgaacggcgagaacgcgagctgattcgtcggaaaccggtaactcagggactaaagaatgaaactccgtggcgggacgaggttcatctccggaaagatgggaaaggtcaccgttagactcagctaccgtgagatacacggcatctttgtcgtcaggagaatagacaatggatggtttggttttgattgaatcccacacgaggcggccggcgagtgggagatagtggaggagcgtggctgagagagaggacttaagtttagagatgagagaagagcgagtcagctcggggacgtggtagaaaagaactcggtcaacggggtgaagtttgagccaacccaagtcaaagtaagtgagtgggagtgtgagcgagttagaagacggcgggctaacttggaccacctcaagtatgttaacggctgagttgaaattcaccattactgaatttcaaagttttattgttttgactttggctttgagcgttagactatgtatacttctataggatagatattagcttcttttggaggttatgggtccttacttacttctctcccaagaatatcaaccacctgctaggtttacccaaccggtgggtgtatatttatatatgctattttttattttattttaaataagctttatgtttgagttttttcttttccaaatttataaacaaggttatggactaaaaaaggaggcgaatttctagttcaagttcatgtaatttata

SEQ ID NO: 20437 - DNA, 2427 bp, Arabidopsis thaliana
caatccccttcttcttctgacacttccttgtagatctccactgacttttcatcaatgaaagtcccatcaggtttgcgatgagtcatctcaagaaccaccagaaaatctggagttgaatcatcagtctcctcagactaaaacaaaagaaaaaagttaagtgtcagttcaagggaatgtgccactaataggcacttttaggaaaacttattccgtttgaggcacttttcagggatgagacactttcctttgtttttggaggataaaaagacaattctatccttcccacattaaaccatcaattgattaaccggttctagagattttgtttgatttggtatctaataaaactaactgaacgtgtcaaaaaaatattattcgttttcaattttcgaaaatctctcaatcgttcgatctaagacttattcatggatgtcaaagaagagaaacttatggaggaagagcaatgattgccagagaagacgatccttgtgttcaccgttctgaaaaacggcgctattctcaagaacatcttcgttgtgaacagtcgcgatttctcgtcgccggagagaaacggttccactgtaagcgatgatgacggtgaagtagaagagattctcgtcgtcggtcgtcatccagattgtgatattcttcttacgcaccctagcattagcagattccacttagaaatccgctcgatctcttctcgtcagaaactcttcgtcacggatctatcctctggtatgaatcatctctaactcatgtttatattcctctcgcgagattgttgttactgtggaattggatctcgattatatgtgtttctgattgttgattggattgtgttttttcgatttagtgcatgggacttgggttagggatcttagaatcgagccacatggttgtgttgaggttgaagaaggtgatacgattaggattggtggttcaacaaggatctataggcttcactggattccgttgagccgtgcgtatgatttagacaatccgtttgtttcaccacttgatgcgtctacggtgttggagcaagaagaagagaatagaatgcttgaagcagaaaatctagaggtagcacaacatcaggttcgatctttgatgttttctcatatttagctgtccttattttgctttaaatctatacttatctgatgttgtttgcttagcctgatagtgtaatctgcctttactgcagtcactagagaatactacatcaggtgatgagggagttctgcatctagatgtcacgtcagaaggaactggatcatcagttcctagtgaggatgaggatacgtatgttacgacaagggagatgtctatgccagttgcgtctccaagtgttttgacgctagttagagattctgtcgagacacaaaagctacaattcaatgaagatttgcagacttcaccaaagtgggacttggatgttatagaatctgtagcagagaagctaagtggcagctttgtccgtagtacgcagcagagtggtggcgacgtggagggattaggttgttctgaactttttgatgctgcagaggcggatgaatgtgatgtcagaggagatggaggcttgcatctgaatgtgatatcagaaaagatggagtcatcagtgcctaatatgattgaagcagaaaatctagaggttgcacaacatcaggttcgggcttctctcatatgtttctggcttttagtgtttgagacattgttttaagtccctcgctgcagtgatcatttgttgttagtttagttgtccatattttatttatctgatgttatttgcttagtctgaaagtgtaaactgatttcgatgcagtcactagcgaatactgcattaggtgatgatgaagatctacatctggatgtgacgtcagaaggaactggatcatcagtccctagtgaagatgaggatacatatattacgacaatggagatttcggttccacttgcatctccaaatgttttgacactagctagagattctatcaagacgcaaaagctacaatccactcaagattttcagacaccgacaatgtgggacttagatgttgtagaagctgcagcagagaagccaagtagcagctgcgttctaggtaagaagctgagtggtggctatgtggaagaattaggttgttttgaactttttgttgctgcagaggctgataaatgcgatgtcagaggagatggaagtttacatctgaatgagatatcagagaggatggaatcatcaatgtctaataaggaggatgatccatttctagctgcaaaggagacttcatcgcttccactctcaacagatttcattaatccagaaacactatggctcgtggaagatgttcaggcttcaccagagttttgcacaagtagtgtaaaagccaacgctgaaaatccaagtagtggctgctccccaagtacgga

SEQ ID NO: 20438 - DNA, 1225 bp, Arabidopsis thaliana
aggatccccatagaaggaagaagaactccgatattaaatcttggggttcaagtatcgatgagagtgttaaccatcggagctgcaatggcctcgatgtgggtcatgatcactaaccgtgaagtcgcatctgtttatggcatcgcttttgaggctaaatacagctactcctctgcctttaggtatatatcatgttaaatttattctccttttctatcatcatctacttcttattttatgaaggtgcaatgatctagttattgaaataattcatatatgatacaacgaagcatccatctgcatgaaatgtcatcattcacgttgaaaatatgaagaaaacagatcacacattcggtagaaaagattgaaaagatgaacacatttttctaaaaaaaaacatccctcacgtatgatgtaggaagaacaacatgtgggacaaatcataatttggcatttttcattcatcgatatgatcatctttattgaaagtaagagatcgagtgattaaagtgtatgatttgatgtttgacaggtatttggtgtacgcacagatagctgtctgcgccgcgacattgtttacgcttgtatgggcttgtttggcagtccgcagaagaggacttgtttttgcactcttcttctttgatttggtaactatattacatgtttttgatctaaacattttcatttctatacgtgaatactctttatcttttaatttgaattagcatgttcacaaattatataaataaacgttttgagatgggtttgatattttgatgtacagcttacgactttgacggcgatatcagctttctctgctgccttcgcggaaggttacgtagggaagtacggtaacaaacaggccggttggcttccgatctgcggttatgtgcatggttattgcagtcgtgtcactatctccctcgctatgtccttcgcctcttttatcctcttgttcatccttacggtcttaactgcctccgctgctcgtcattactgattttcttagattttatatcatacaattcaattccttctactccaagataattcagtctttgttatatataattggatttcatgagatgcaaaattgatttgatataatgaaatgaaattgtatgattacttgcatgtatttatctttgagatcacttcttctgttctttgctgtgcttaattagtctcctatttgttttcttggagagaactaagaacaacaaagtat

SEQ ID NO: 20439 - DNA, 543 bp, Arabidopsis thaliana
ttcaggcatgactgtaatttcaaattttaaaatgaaacgttgattcgtttaatatgttcattggtttatttagctgattcggtttggtttggtttgtaattttgtatgcacatattatcctaccatgattcacatatatacatacgtatggattcactgtttcacttcacatgctaatgttttacattttttgttccttaatgttaaatatatgtttggtcagcagagacgatatggatgcagagcgatgatgctagagacagtagctgcagtaccaggaatggttggaggaatgcttcttcacctaaaatcaatccgaaaattcgaacatagcggcggttggatcaaagcattactcgaagaagcagagaacgagaggatgcatctaatgacgatgatggagttagtcaaacccaaatggtacgagcgtcttctagtgatgcttgttcaaggaatattcttcaactcttttttcgtttgttacgtgatttccccgcggttagctcatagggtcgttggatatttagaggaagaagctataca

SEQ ID NO: 20440 - DNA, 2217 bp, Arabidopsis thaliana
cccgaaataaataataattgaaagagagagaaggactataactaagtaacctgatcgcagatagatggctctctcaggttgagattggtgatcctttagtcgatcggaatcacaagtgagatgagagaatgaagacgacgaacaacaagtgtatgctagacaatcttaatctgggggagaaactcttgtctccgtataaataacaggagcgttgaagaagaaaaggaaatcactaacggctagttatgaaaaaaatggaaattaagtaggggaaaaatgttatttaatacctcaacttacaaaaaatggccaaattaaccgtgaactcgtgaaatgaccgttttaactctcaacaaaaagttgacttctgttttaacttttaagtttgcgttgactcggcctaataaaccaccgttaaaaattcttctaacagcgtaattaacagccgttacagaacatccgttaaggtgatacgacgacgttttgtgctatcaacagacctcaaagtcgacgaaacctctgaaaaatccccaaatcaaaacccaaaccctaaaaatcattttctctcaaatttttcgatcaaatctgcattatgagctgcaactcaaggaattcgagtggtgaaagtggaggctgcaattcaggcatgatttcgaatgctgaagctggaggtttcacgagccgtgggtctcctgtcaagtgtaaatctgggctcgacgtcgtcatgtttacatcgagcacggctcagacccctggaaggcctttctttcggtgcaaaagctgtgaagatgtaagtcgatttgatatgagactgtgatgtttttcgtgtttggtcgataaaagcttgagatggaattgcaggaccatttgttcaaatgggtggaggattgtatgtatgaagaggttatagatgctctacccaaaatctccagcattgataacgagataatcaatgcaaaagctgaggttgctgttgaaattgcaaacttaaaggagctaatgatagagttgaaagaagatggaatgtggagcaaaagagaaattcagagatggaaaaagatgacgaaagtgtgcttggtgtgcctttgttttagtgtgattgcaattgtaatatcaatgttctataagaaaaaaacccagaaatttgttcttggttattagtgtgtaatcgaatgggagcttagtttgaatgtgatgtctttgttgtttctcttgttgttggtctttgttgtctagtttgtgtttggttatgcttttactatgtaatgacatgtagctttggtaatggtaatgaatttcatttgaaagaaaaggtcaacttcttaaaactgagactaagctaatcatatagagagacaagtgcaaacaacaataagtaaaaagacttagattatgtcataaagacaagttcaaacaacaaaaacaaaccgagaatgtcataaagacagaaagacatatgtcataaagacaagttcaaacaacaaaaacaaacatgagactagcttatcatgttccacgagaacattcaaaccatggtgcaagtccagcaagtccttgcgattgtgcttctccttgtggttgttcagacacttgtgatgttccacgacctcttcccctctgtctttgtgctccacgagttgttcccctttgtctttgtgttccacgacctcttcctctttggctttgtgtttgtgacccattgttctgccctagtgagccattgttctgcccttgtgacacattttcctgcccttgtaacacattaccctgcccttgtgagccattatcatgtccatgtgatccttctacatacccttgtggttcctaatacaaacattacaatcagtttttgaaacagaatttttgaaaatagaaatgaaagatatacaaacctcatttatccttggtcgacctcttggtctctttggtggacttaaaacagtagcatttttgcatgatttcttgttgtgcccttcttgcaagcagttagagcatgtcatgatcctcttttcccttgacattttgttcggatttgaggaagaggcaacttcatttcttcctttccttcttgcataattgcttggccttccggcattgcctcttctccatggtggtggcaagacaggcagcctacacaatcgactggacttgcgtaacgaaagagcatcagctaataccacggaaatatgtttctcgccacctatttcttgtgtagta

SEQ ID NO: 20441 - DNA, 2001 bp, Arabidopsis thaliana
gaaatggtttatgtgttttaggattttattaaaatcaaaacgtttagctaagttgtcccggttggccggtcaatacacaacttaaaatacaagagtagctaagttgtcccagttggtcggtcaatacacaacttaaaatacaagagtagctaagttgacccagttggccgggacacccagagacagagtagctcgtcagctcttcaagctccttagctcgtcctcaagctcctcatatcgtcctcaaagctcctcagctcgtcttcaagctcttcccatcacggcgaccatctcctcgcctagctgtcagctagtcagctcgtccgactcctcgtctagctatcagctcatccctcaactgcaaaactcatctacctcctcgcctagcggcagttcgtccattgactgcatagtccacctatctcgtcgcccagctcgtctataccttcagcagacaactcggtttgtccaattcgcctctctaccacggttcatccagctcgtcgcacatctgccggctcgttacctacctgccgacctacctccaatgacggcctagctcacttattctaatatgaactacgtgtggcttgatcccatttttcgtacttgtgtgattcgtgcatcaacattttcgtacacataacttaaaatacaagagtagctaagttgtcccagttggccggtcaatacacaacttaaaatacaagagtaacatatttaggttcaaatgccatacaccatcctcaataacagaaatcacatcataatcaccatgtagaaagtaatgccctaagcctatcaatctcgacttctttggcgagtaacctttctttaagggtttcaatttcgccttgcatgagatgaatagtttcccggatggactccaaagcatgattgcatgctagttgtccatgtcttagtgcggaatcaagtttgtgatttaccttctcaagctcctcagttaccgcctgatcccaccactgaataaggtggtttcgggactcgtactcttcagcctgcgaaagagagaagacttcataaatataattcacttgtactttgttgttccaatgaaatgaaaacacaataacttactttaagcattgggcatttgtagactctgtcgccttgcctgtaaccagttttgcacacttcaagttttacaggcttaccacaaaaacatttttctggaaccccccaatttgcatcggcattcgcctctccactattccaactagcttcggacgtggatggttgagagtaactatagggcatctacagaacagagaaagaaagagatatgaatcatgaacgctataaaccctagatctactaattacagcggctagaaacccgtaagaaaccctagatctactaattacggcggctaaaaacccgtaagaaaccctagatctactaattacagcggctagaaacccgtaagaaaccctagatctactaattacggcggctagaaaccctttagaagaagagagaagaacgagagagaggaagaactccagtgcatgtaataccttggttgttgacagctaggcgaggagatggtcactgtgatgggaagagcttgaagacgagctgaggagctttgaggacgatctgaggagagaagtgaagaagagagaagaacgagagaagtgaaatagaagagagagagagaataaataggtagaaactttgtagtgtgaacgcaataatcgtagtgtgaacgcgacttcgtggggtctatttttaaaaaaaattatttattagaatattcagaatacacatagttgtatgtatatgtacagttggccggaatcacaaacagttgaactattctaaattttgtgtttttgaagttgaatctgaaaaaccaactcatttttttagttggcccataagttttacatattaatggattttataagttttgatagaacatatttagtaaatatctgttttcatcatacgtatgtcattggacaacatgactatatg

SEQ ID NO: 20442 - DNA, 1302 bp, Arabidopsis thaliana
ccgacatttgcatgtctattaacaaccaccccatgtattatattcttgagcagaacctatttggaatcatcgaaacttaaatgaaagataccaaaggtacaaaactaccgcagagaatatatgtattaattggaacatgggattggcggcctatttactctccatttccgaggcccaaacaattaataagatgagaaatggtctctgatattgtaatttttggactttatttaaaacttttttttaaacggatgaagtaccaaaattaaaactgaatataattaacttttttttttttgatcaaagataatactgcattaaaccgaaaataaaccagattgggccggaaccgaaataaagttttgaattgtgagctttgcaagagtatcagcttcacgaattgagttttcgagggacataaacaaatctagactgaatgaaacaggaggatagagataggatatgatggagaatcccatagagttccaacaatggaattcctgaagaaatggcttcgatgagctgcttagagtctgaagcgatggtgatggttttgatgcccatagagtcgtcttcttggagcgcatgaacgacggcgagacttcggcgaggatcggtgaccgtatgtgatcgagtttcaaagatccatggcggagacgctatccattgaaggttttaaagatctagccaagccctgcaacttttgaatcgcagattcaggcggcatctgtgtggcaggtgaccatccgagggtctctcaaggtcgaaatcagggtagagtgcgtggtagataagataagaggactagggggattgtgcgattgggcgaggttccattcctgagcgagagccaaaacctgggttagggtttcagcgggtgtggaggacttctcgttgaagatcctttgatttcggttgatccaaatcgcccaaatgatccatggaaacagagggccaaaacctataccacaaggaggaagacagataagaatcttcgcttgttcaatgagggctcggagggatgggattgcattgggatccaggtttctttgaaagggggcatttctccagatccaggatgcaaaatcacacttagcgaagagatgtaaagtggtttccctttctccacagaacgggcaggatgcgtctgaattgatgcctctcgctcttagattttctcccacgggtaaagcgcctctcattgccttccaaaggaagaatcttgtcttgggaaagttcgtaggtgccatatatcctttgaccatttgaaatctgtagctgtagttgatgtttgtacttccg

SEQ ID NO: 20443 - DNA, 1841 bp, Arabidopsis thaliana
gcgtgcgggcaaaattcccactacgctccgacaatctctgatatgtacacaattaaaccagagaacatcagcttccgatgttttacgggagaagaaggcgggacgcgaattactcctctggggcatggggcatgagtgtcgatcgaaccagaagctgctccaaccagatccgtttacacaccgccttggaaggcgaggaggcagcagcaatccaccaccaccactccacccacatcctaaactccgccaaatcaagctattgactcaaaacaagcgcttagtggagttaggaatcatgatctatatttctcatgttttttgccgagggtgtcgatccagtatgcaagttcccctttgtttactctctaaaaagaataagtttggggagagaaagaacaccgaaaaaaaaatatatatatatatatatatataaagaatggtcaatttatcatggtatagtacaggaatgagtctagaaggatcttgaatgttggcttgtttgatgagacccagcgatgaaagcctggtggatatagttgtggaacttaggtatgaaatctagaatgttgtgtaagcttgtagagaagtacatgttggttaggatttgattagacttgttaggcatatggacttagtttggatgatcatggcaataggccagagaatgttgggagttcctttgttttaaaaccctctttcacgggttcggcttttgtgttttgcttgagggcaagcaaaaactaagtctgggagagttgatataacccgattttcaccgattttctttatgttttaggtatacgattttgagtctttatgttatttctcgaatcttttttgtgtcttttcaggtattctatgcaatgggacaacaatggagataaggagacattttggagcaaaaactaaggaaaaggaaactaagaacgattttggttcaggaatcagcgaggagtgcgatcgacacactcttggtgtcgatcgacaccagtttcggcccagaaaaaaccctagatgcctccgagtttacagaagatcaagtatgccccagtagatttccctatttgcgttattagtcccttgatgtttttagggtatatatatattagttttagacctaagtttcttttatcaagtcttttatcaagttttctacaaaccctattactgagagacataaaccagtcgtcgattgttttcagagttttattcagatctatatatagtgaagagatccattctttccccttctctatttactgtgtttatgctttcacactcaaatatgttgtttgcttcatccaatatgtctgagtaatcttcttgttaggaatagggtttctcattagggattcatatggtttagtagattgtccccctttgctaggttatctgtagaattcttcatctttaattatgcctaatgctagatctagagtaattaactaaatcttgaatccagaaaatagatattcccgccataggtatctatagttggatctattatttgatgagtctggtttataggtgtgtaataagaatcaggtaagatgaacaattaaactcgttaagaatgcatatttaggttgatagtttctcggcttctccggttattattagctatagatatagggagtttcgcggcacacccaccagttattcgataattagagtttgagtttaagaatggttcgataacaacctagttttcattagatctactaaccaatagtttcctgagaataccatgtttctacctctttattaaatctttcacaacacaatcaatctgctgttttcttgctttgtttacttactacccttctagcttaatatcgaca

SEQ ID NO: 20444 - DNA, 1179 bp, Arabidopsis thaliana
aggatccgcgaactctccgccaaactaagaatggcatgtccctccagggtgaaatcaatgactcacctctctctatacttcttctgatccatctgtgtggatacaagagctgggctatcagcaataatcgcaagagagcacgaggcgctctgtgcataggtggcgttgtgacaccgattttgatagcttgtggagtcccaatcctttctgctggactcgagccacgagcaatggatatcgagcacctacgtcactgcgaattcctggagtttgcaatggttgacgatttccacaggttcaggtttgagcactctacagacaggagagctaacatccttctccctagccctgaggttacaaggataatagagggagataacattgattttaggcctgaggttggacgcctctactatgagaacgctccgccattggatgaggacgatcttcttgaagaagccgcttcggatgggatggatgaagatagggcagtggcgttcgacactagcatgtatcactttggtgaacatgtacctccagcgaggcagagcaagagcttgactgaagctcataaaaataacagtaaactgtagaagtggtgcaagaagcaggacaagctgctcgccaagtgtttcaagactatcaagcttctgacagataagctgagttgttcctcctccaccactgctattccacagggacagcctcctctggagatgccatcaaggagatttgatgagcctgagcacaggcctgagcttagcgagcagagagtatcacatgtcctggctaggcattcgtcgttcgaatcccgggagcacaagagaagaaggaaggctacactcactcgatctagcagcagatcacgcctcattcacttgagaaggtcactcgaccgcggtgctggccgcagcagaaggagagaggtcgagtttcctcagagcggtgctggccgccagagagctgatgaggtcgagtacccacttcctggagctgatacagaacaaggtggttcgtctatggcctgggagcaatcacaggcagccattgacgagcaactacgttcattcttcaactgaggtaagcgcctcacttcaccattgtattatatcatctgttgtgatttgtttcttcattttttgtttctatgattggatttgtcctgagtactctcttcca

SEQ ID NO: 20445 - DNA, 2169 bp, Arabidopsis thaliana
gcaaacacaaatcaatatcaacagtagtcactagacataagaactcaacatactcacaagaaaacagactatattggattgaaaacagaaaacagaaaactctaacttatgagaatctgcagaaacacttaccaattcatcttggatttcttgaaaagattttggcccagagtagtggacgtgaggaccgataccgttacggtcagagagacgagctttggaataggtccgactccttttctgtgctgcttctgtgtcccagtaagcacacattgttccccacagcgtttctccaatccatggaggctgctctcgagttgtccttgcggtgctaaccatgtccttcaagcgcctcttgacgatctcattgaagtaatactggactgtccctgttagtaagggatcccagtggtgagttttctacaaaaaaaaggaagaagttagtgaaactacataaacttaacttgaacaagagcagatatagaggaagcttaccgcaaactctaaaaataatctttctcttttatcaactggaacacatgaccagttatagaagggagcatcgaatttttgtaagaaaattctagtgatcttcctaaccaagcgagatcctctgtctcgagtaaacctccaaacacatgcaacaaagaaagaagtaaacatgttacaaaagtgaacaaaattattttcccaaaagaaatacaagtcacacacgactataaaccatgttccacaatagtactgtctcaacaatatagcatcattcacaatcaaagcatcatcatgataataggtttttaagatcaattaatcctaaagcactatcatgtcgttgtagtactgaaggttgtcaatccaaatgggtgtgatgctaacaatcaagatgtgatcagaagtcactaagtcaagccaagcaataacaggttttggtgtgttctagcagtcctaagtgaacatgcagaaaacagaaaatcaaacagaaacagtagaacactcgaccaacacagctctttgcagagcactgagtgaggtcagctctttgcagagcactgagtgaggtcgagtgaatggtcgagtaacagacagaaaatggaacagggtactcgattgcacagtctgttgccagacaactgggtggtcgagtatcaggtcgagtaacagtaaagaattgcagaaactaagcaacaaatgacaggatgcagtaaacaacagtagagtaaacaataaaatcaatcagataaagaattcccgaggatggggtaattgagtagtttcgtttcctcagtttacaggtgattaacatgctctatagattaaccccagacaacaagttcattaaccaaatctaagtgccaccgcaacagagactctcaagttaacctagtcccagactcaatcaccattgacgagagacaggtattacgaatcaacaagttgaagccaaaacgctcgctgcaaccaataccttggtacagggtcacgaatctctggaattagtggttcagacatttcatcgaagacgtcggtagagtgatgaggtcgagtagtggtctggcagtgaaggtgaaggcactcgacctgggggtcgagtgatgtgatcgagtggtgtcagaagatactcgacttccaggttgagtgacgaggtcgagtggtggtctgatgatggaggtgaaggcactcgaccttgtggtcgagtggtgaagtgaagtggtgatgtcctttgctcgacctgggggtcgagtggtctcttgagatcttgaagctcctactcgacctcttggtcgagtggtttgtcgtgatcaggtccgcttcttctagatagctcgtcaacagctccaaatcacctgaaatcaacgcaaatatgcaacatgcatgcaaaactatcctaaacatgcaaagtaatgacaaatgatgtgaaatggtataaaacagtgatgatatgatgctaaaatgatgacaaatggatgctcaaaacatgcaaaatacacacttatcattatcgcagaaacatttggtggtgctgaagatgttgatgcgagcgtattgacgattaagtagattatcggcggcccaggcaaatcaatagttggcgcagtcatgcgtgtttgtagagggagaaagatcaatacttgggtgatcgatgctctcgacaggtataatacgacggag

SEQ ID NO: 20446 - DNA, 1294 bp, Arabidopsis thaliana
caaatctgaggacagatcaaacacatgacttttgcatatccgtaaatgattcacaaagtatgctaataacatcaaatctgaggatcagtatctgaattctctgctctgttatattatcaaacatgagtatttgatttgataactatttcataccttgaattcataagtcaaaccagcttgttgaagaaaaggaagagctgcttgaccagcttcgaatagtacagccttttcatcaatgccatgagaccacaagactggtgtctgcatatgcaaaatatggagaatcagagacccgaaatgattctgcttattgactgcaaacaaatacgaaatttaaagattgactaacatgttccatagcagcctgagcggcgagactgagcttgaacggcgagagaagtgatatggccgtggcactcattgctctcttcaacgattactctccgactcggagtcgtaaatctccgagtaggttaacctcggttcgcacgatggagcggctgtggagacagaaatctccggtttgatagccatcgccagagagagagagagtcgagagatagacacagcgtttttttcttctttcgtcaataatattcagccaatcacgacatgacacgtcatcacttttctctggttgcaacccacgtcaatgcttttttatttaattttattctacccagagtttttctttcccaatccaatattgtgattaaaaaaaaagaaaggcaaatcagatttatgtattttaaaaatgaaaaataaataagataataacaaaaaaaaatggaatctttccaaaagaaaatcttctcatttaaatttcttccatcaaaattctcatttaatttgatttattgggatcattggagaatgttagtggaagaaacgtttacagagatcagagaaatgagtctatattaataaagcaagagcaaaaatgtgcctattcataaaaccttccaaatagtatagaaattgaagtattagacactaaggacaaaatagtctttttagataccactggtgttacttacttcttttgtcagattatgatgttaaaaatttaataactttattgtacttatttcttttgtcagattatgatgttaaaaatttaataactttttccacaatggttacttttgcaaaagaccctataataaataatatgattccaaatcccaccaatataacaaacgtagtagaatcctctacaaataacgtctgtgacaacaacataaacacacaagaaccattttagaagtttgatcaactttcacctaagcacact

SEQ ID NO: 20447 - DNA, 1526 bp, Arabidopsis thaliana
ggagaaatcgatgattttcgttatccccttggctcggactggtaacttgatagtgccgagagtcatggtggtttccccaaagaacccgagcacaggtcgcagagttggtacgatttgcgtcataccgaccttcatttcttgcagggtcgttagaaagatgatgtccagtgtgctccccttgtcgactaaaactcgttcgacgttgaaatcaccaatggttagtgttatgaccaaggaatcattgtgtggactgtctaagccgataatatcgctctcgtgaaaagttacttcgtcatctggtccgttaaacggtagcgtccagttacgatttgagttggccttcctctgataagctttgattgacaccgttgtgtcttgacagaaagctgaatctcttaaaattgtgaaaatccttccccgagcagcttctggctcgtcgtcatctatctcgcgattgcctctgcctctgcttgctcgggatttgccatagcattgaccaactcggtcttggctttctccgcctctaagtcctcgatggttaggcctccaccgatttctccgggtaggaacttagctgctaactttgccccgaggctacggcatctggaagtatgatggccgtaacttttatgtaattcgcattattcttgctcgtttcccacatgttggttcttcgtccaggtgtaggattctcgtccgcgacctcggccgcggcctcgtcctcgacctcggggtgtatcagcttgataattgtgggcttcggagaaattctgtccttcatggtgtacgaacgttccgccttgagcgcccttttcgtggttcggagcgctaggttgggatttttcgctatgaggcgtttgcttcagcggctcgtgccttttcttcatgggaaacttaattcgaggctcggtgcaaggcgtctcggattgtctatggtttggacaaatttaactcctttcggaattcagacttgtaccatagggctttttttagagcagagagagccgctacgtcgttgatgccttcgactttggctagggtggattgcgaggaagtctcgaagtggctagttcggctgctgagacaataaccaaagatcggcgtcggacgtgccagatcgattagcaccgaatattgcttgagtaagagtgtagatagctcctgaaaactgtcaacggaatttcctttgagtcttgagaaccaatccagagctggtcctttcaaatgctcgacgaacaggtgacagagaccggcgtctctttcgtagggtctgaatttggcttgggccatagagattatgaaggacttcaaaagccctttcgggttagatgatccattgaagtactcgatccttagctttcctggatctgaaattatcgcgttggagatcctacgaatgaaaggagtgttatgggactcctccagaatgcggtcgatgtttggggcaaaggagactacgttatgcatttgggatctgacgagcttcatcttggtttgatagcgcttatttcttgttctctagcata

SEQ ID NO: 20448 - DNA, 1642 bp, Arabidopsis thaliana
gctctacattgcttgggagaaatgggtgacaagagtggagttggaagtggattcggagattgtggttgggtttctcaagaccggtattggagattctcacccattatcattcctagcgcggttatgctatggctttatctcgaaggactggatagtccgtatctcgcatgtgtacagggaagctaatcgccttgcggatggattagcgaactatgcttttactttaccattagggtttcatttttttcactctagtccggatgttgttgattcggttaggctagaagatactagtgggacttcgtgcccaagacttgttcgaatgtaattttaatttttcttaataaaacgggaaacactgtctccctcattccaccaaaaagacaatatagtcactaatatgtcagtagtttgagactaatataaatagtcgtagtatagtcgccaaattaggtgactaagtagctactaaacatatagacaccaaattaggtgactattagctattgtttagcgactatgttatttcattagggccttttagttgggattttgtagacttgaaccatttacgatagcttaacagccatattataaaatcactgactctttcgcaacaaattctaatcctctcctaacaagccctaatcctctcaattccattacgatctcttttatctctctccaatcttcatcgaattgaaccctaatagatattcatatttttttttgtggaagaaggaagagaggaggaggaggaagaagggttatcacacctcaaattgacccattgctccaggtgattcacagactttgaatcaaagactcaccagtcttcctaggaactacacattcacgtcggtgaaccctcaagccccatatctagagtctcatcgaaatcatgtcccaatcggccatcctccaacgatccctacttacaaagactattcacctccaaggatttatagtcggcgaggagcactcccatattggagcctggaaccacttggtaagtatcttctcttaacatcttatagattgtgtagatgctaggaatgtttgtgtacgaactaggaagatagataatatagattatcaggaaatctctatataggaattaagaagatagattttgtaggaatctttgtcttgatttaaaatgtggtttgattgaatctcattgattgaatcttatagattgtgattaaattttaaatatgtgtacaattaaaatctatgtctcaagatcctttgtagtttgattgaacctttatagtcttaaaattgtgattttttttcaatctttgaaaattctcttttattgtctaattctccatttagctactagtaattacgaggaatacattcattgttcttttattatatgtttctaattgcatgccttttttttattttgtgtttgtaggtttgataagaacaagtttaaacttacctgaagattacaaaggtttttacaaaaagtttcatgggtcatattacaggaagttcataagttatataagtagaacgaggcagctaagttggttgtcttgagaatgacgagtctgccggtgatacttcgcctcgatcagagctatctcaagacaaggatgacgagatctttttcaagtaatgtgcttct

SEQ ID NO: 20449 - DNA, 2403 bp, Arabidopsis thaliana
gactctagccacaggacaagaaattgctagatgactttggtgtggagcatgtctacgaggtccagtctctgagatacgatgaagctcttcaagtcttctctcaatctgcattcaaccagcaacaccctccagctagttttgaatcactctcctttcgtgctgtccgggtagctggtttccttcctctgcttcttaaaatcctcggttcttctttacaagacaaggatggcaagtattgggagaaggaactgcaaagactggagggaggccaagaaaaagcaattatggaagtaatgaagaaaagctgcacaagagaaaaagtccctacatttatctttcctctaaactgatgaaattctccaccacagggagatgttggtattccaaactcgatcaacaatgccaactgatagatgagttgtcatgaatcatgatgtatgatagaaagtttttgctatgtaaaatatctctcttatggttttttgaaattttattgtctccatctcaaggctaagctaatgaaagtagtaacacaaaagtgcataacctggtaaagcttgttgagtagaagcagagcaatgtatagtaaataggaataggatttacgtcgttgaagcaaaatttacaaagcagagatttttccaatgttttctagagttcagagtaatcacaaagatttcacatgttcaatctcttcgaagttcgaaccctggtcctgattcatcttcatttttttttgtatccatctctagtctaaagtaatgaaagtatgaaacccttgtttatgggttcctggtacaaagagctagcaacatggtaaaacttgctcaatagaaagcaaagcagtttcgtaaaattaaaattaaaaatcttaaaagtattcaagacagtcgtgctctgttttgtagtaaagcccggttgtttaggaatgatgtcccatcactggttaatttttggttttagttcgaaaacacgatagaacctaaacaaccaaacctgattataaatatatacctcaaatagactcaaaccaagccgaagttatactggatttgtttagtcttcttcgtcaaagtcctgatcaacaatgccactgaaccggaaatttgaatctggcgtgccatcttttgatctgcatgccattcttgtagtggataatacctatttacccttaatgaattatatctattaattttaaaagaaaaatcaaaaacaaaatctaaatcgaaatcaaaataatcccgacccaacccaattaattccgacccaattcatttaattttgacatttaactccgacgagataggcgatttccaattaacttccgacatcggcaattttcgacattggctccgtcgagtctggagaaactttgctaggtcagctaatccaattctccggccgtcgatttctccggtgctgcgtgctacgtgagttgatactgttggatcgaattctttatcgatctttgttgcggctaatctggaaacgatccttctttagttcttccatctcctgtaagtattataattagtacaatgtaattgaattgaatcaatgtgtaagcagcatcaaaccatggacgaactgaaattgaatcagacactggtccatctcgtggttcaactggtactaatatattgtttatatttgtaggaggcgatgaagaagaggatccagacgaacctacactttgactatggagggtactatacagcagaccatgagtggagttgcaaaaattcaatatacggtatagtgtttaagacatcatctttggagagaataacatatgcggatttaatagataagatctgtagaaagattgctctaggtggagagaaaaggaatctgaaattgagttacaagatatgtaaagcatggagagagtcttatattgtagataatgaggatgtgttgatatatttaacgtcattggataaagagggatttagacctgttttgcatgtagagttatgcagtgatttggaaagtaataatagccaagttccaatagtagagcgaagaagttcatgcggtgtgaattttggggaattggctgccaagcttgtaatggttgcggatgcaaatacaggaattctgagtactaatgaacctattattgaactagaggaacaacgtgagacagttagtgaacctatgatgctagagaatggagtttctaaaactgttattgaaccgttgatgatagagtgtggggttaatgaagattctgataatgattatgttagggaagaatatgttcatcttgcacgtccggtacaagaaagtgtggctgccgttgtcaaagaatgggaagatggtattggtgatttagtaggtcaagaatttcgttcaaaggaggcagtatgggatttgattaatagagcttcgaaagaggaa

SEQ ID NO: 20450 - DNA, 777 bp, Arabidopsis thaliana
caagtgcagaaaagaaaccttagaacactcgatcaatccaatgaaaaccaagctctaaattaatttctcttttatcaaagcctttcatagaagagcaagctagcttcagcaccaagaacatcactctctgaaactctgcaaacttctgaatcagatatactaaaccagctcaaatcctcatcacaatcttcttcttcttcctcttgtgagaacactctcacacttctgtatacagtataatgcccgcttccggttctaccaaaatgctccactactgttacaagcctgtacatgccgtgattttttgatgcttctggcttttggtactctgacgacatctcaatcctttcttctatgtttacgcctattgaagatggtgtgaacaaggagaggttcaagacaagtggaaatgcgatatgtccctatacagatgaactgagattagaaggaatagaactcgagacatgaaatgtagacaggaaagagagataacaagactcataccgacagtttgaattcctcaaacatgttaaacgaagcgcgttgcacttgaatgcataggagctgtaacaatttagctagacagggtcaaaatgggactcaaaagaaaagagattttgatattgtaatggattcaactttactttcacgtctagtttcaatgagtaagcaaatacctttgggaaacgggcgatgattaactgtttcaatatatgggaatagctatttgaccaaggcattctttgaagatgaagagaagttttacagtcacattgg

SEQ ID NO: 20451 - DNA, 545 bp, Arabidopsis thaliana
ttgtaaagaatctcattccaagtatccggtaccccagagagacaccagtggctgcagtcaccggagacgtttcgcccgcctagaccgtaaaccgaaggatgagcatctttgcgaacaacgaaagcatcgtaatgtctagcaatgtcaccggtttcgatattttcccgagtgctctcttcaaaactcccacttctgctggcaatcctcctggatattttgtccccaaaagtggttccttctgtcccacgcaactctttgccgctggttcgccccacagaactcctctggtaaacaacaaagccaactttttaaatacaagtttctttagttgatcatctttttaatcaacaaaatcaacttacttgtaatgagatggagaaattccttgaaaaaagactctagttttcttagtatttaagacggtatcgacccatttcccccaagtcccaagcgcaatttcaaacgcggccacacggtccatgtcttttgtaacgttagtcctatttgaacaaatccatctgcaaaattacaaacaaatcaaactt

SEQ ID NO: 20452 - DNA, 571 bp, Arabidopsis thaliana
gcatggactaaagtgcgaaaatagtatgagtaatccgaacccagagaaaacgaaagtggatgttactgaggaagagaaagaggaatctgatgagcaatggagcgatgaagaaaccaatatgagagaaattgttctcggcctccctgctttgaatatcagcagtagaatatttggagagagtagtagtgtcgttgaggaagatgcagaaaaagcgcgtttgaatgagcaagcggttcttgcggcggggttgattttggctgcggcagaggaagcggttatgaaaggaatgaatgagggaagtgggagtggtgggaagaaaaagagtagaccaaggatatctacgcaaaccgatgacgaaggggatggtttgggtgaaggagaagcgaaaaagccgaagaagaaagcaaaggaattgactcatccaccgaaaggaccaccggtttgtcatatctgtggaagaggtttcggttcgtggaaggcagtgtttgggcatatgagggctcatagagatagaaactatcaagggtttctccacctcctacattctctgcgggggctgaaaggtttgtga

SEQ ID NO: 20453 - DNA, 485 bp, Arabidopsis thaliana
ctgaaaaagttaaatacccacgttatacatcatcatgataaaaaaatgaactagaccaataacttggaactacatggcttgataggatcaatcaatctaatggttattgcttaaagagaacgatctagactaactactcgaaactaggccacatggctttgtggttgggatcaatcgacctcacccaaagggtttcaaaacgcagaaccagagttcttggtttttccaagcatcatgtctttggcttcattgatcttagacgcaaggtaatggcttcctcctgcatctggatgattagccaccatcactctacggtgagcttccttcaccttctctgccgctacactctccctattcaaacaccacaagtgacaaactcatcaagccataataatgtcgcaaaaaccaccactaaacatatgcaaaccatttacccttgtgtaagaacatagtttggccctatgcaaacttgttaaaactagtgt

SEQ ID NO: 20454 - DNA, 1036 bp, Arabidopsis thaliana
ccaacatagattgaatttgagggacaaattcaggcgagttctccaggagggtttctggtttaacatctctcagtttcgtgtgattccctctacacacagagtagaaacgtatgtgttgaaccgtctccatatcatgttcagatgggatactgtagtgttcagaatgtcagagttagtgaaatctgatttcacagactatcttttctccaatgaacttgaggactctgctacagacaatgttcctgatgttactggtatgtttataacgatcataattctttagatcatttcatgagtttatatttgagtactctgctgcagacaataactagcttttgattttttgttttcatagatgctattggtgtggttgcaagtgtttcttctatcaagaggtttccttatgtctgcaataagggtgagaccgactatgaggccaaatatgtttctttcgagcttatagataattggtaagtttataagttatagatttaggattagttgatctagcttgcagactttacatttagattattgcgtgtgattatttaccacagtctaccaatggtacagggaacaaaaactcaagtgtgttgctgttggttcatgctgtgaagagtttgttaccaagtggtctaggcgtatcactagaccaacatacaactatgaaccagttgtatgtgttgtgcgcttctggagaattgcttcaattgatggttagtattctaaatctgctagataattgtattgagttgtgacccatgaaacctgtgtttaaatttaaatttatgttctgttttgacaaatgaaacctgtgttttttctgtgtgtaaggtgaaaacgtttgaacgaagtgagtttggatgttcccgtctacatatagacccaagcttcccttactttgatcttgcaagttatctgtaagtctagcaattggttttaaatttccgtagttacaattaagaatagttacttagttttataatctagtgtctctgtaccaggcggaagttcaaagatgctgatgtcaagaagt

SEQ ID NO: 20455 - DNA, 1332 bp, Arabidopsis thaliana
gttcaagaaaataaaaaggatgaggcgccaaatattttcagaagaacatgataaattatcagaaagccaagctgttgggatatcaaatgcgactcaaacactgatgactaatacagcataaaaaaagtcacaacagattcaggcttgtgaacaactatgccctagtgactatcgaaatcaaagtctacactaccaaaataaatgccctcataatgtctttgatactcattgaaagcttataaacatatgtttgggatgggcaatcaaagagaagtttcaaacaactgaaggaaaaagtttctatcatatagctatttatgctagttacctgctcgaactcagtagcccacccattcacaccatgttgttgctcaaaagactggacccatgaatcaggaccaccatgatccatcccatgttggttaaattcagccgcccaattgtcagcaggatgtaaattaggtttcacaacagcttgagactcattccagtaatcatctagctcccgaaatctcccgggaacatgacctcgagcttgtatcccatcatcaatatctaaagatgacaataatgcgtttaccttgaaaaacaatgccgaacaaaatattcagccaacgacatggagaagagaaaacggcttaggccatcggcgacaaacaaaaggcttaactatactgcacagctggcatggtctcgagaaatccatactagataggaacaattaccaagtaaaacaacagctataattcccaaacaaaagccctgacccacagatgattgtgatatatgacagtgacagtgctacctcgttgcattccaaaatgttacattttgatttaaactcaagatgaaggagagtggacctgaactttcttgtaattacacttcgttatataattgaatagatcttgatttcaaaagggcaatgggcatgaatgatataacaccaaaatattaagtatatactcgacccttaaaacctaagttgaaagcatataacacaatgttgcagctacagaacactatcagataaatggcaaacctgagaattaataaattcctctcccctatcggcaaaaaaatgccgggccattatgctactacgatcacgtatacattgtttgtcactttgtgacaatcctagaactggaacaggtgctggacgaaatggaataccaccacggctactctcaacaaatgaatgcagaaagtttgataaaactctctgtgggggtcctgcaatatataagcaatggaaaaactaatcaagcaagcaaacgaaaaatgcgtcactcgacattaggctatataactaagacagagctatgaata

SEQ ID NO: 20456 - DNA, 583 bp, Arabidopsis thaliana
cccacaaaaataatcaacattccaggtccattatataaacagaaacagagtcaggaaaccatgacagaatcacatcttttagagattcaataaacaacattttacacattttcctgtctatattatcagacaaaacttctaatcaggcaacagattaactttgataagccaggaactactatcctacaaagataagattggttttactcatttatcaatcctacttctaatcaaaatctcaagcaaaatcatgttactaagacgacaaaattgattcagtaaagttcacctggcattgaacatcaatcccactcttcttatactcaacatgtagacactttgtgaactgatccacgtacctaaaacaacaaaacaaacaaaaaaagtcactactttacaccactcaaaagcatcatctcacacaaacaaatacaagacaagaagattcacttacgttttagcaccagcataaacagagtaacacggataagaaggaataagagcagcagcaccagaacccatattaataatagacctttcttctcttaagcatattaggaacacagcttgagtactttagtag

SEQ ID NO: 20457 - DNA, 572 bp, Arabidopsis thaliana
tgacttagacttgacatcacttaacaacaatgctgagctacggaggttacttatgtctactgcaaatcgttccattctagttgtggaagatatagattgttcaatcgagttaaaagatcggtctactgatcaagaaaacaacgatccgttacataaaacggtgatgcattttgattcactatcagttatgttgttatgtgatcttttgcttattagcattactaatgttttggttagtcattttcaggtcacactctctggtctattgaattttgtagacggactatggtcaagttgtggtaacgagcggattatagtgtttacgactaactacagagaaaaattggatccagcattgttgaggccaggacgtatggacatgcacattcacatgtcgtattgcacaccagctgcttttaaggttttggcttcgaattatctcgagattcaagatcatatacttttcgagcagattgaagaatttatccgagaaattgaagttacaccagcagaagtagctgaacaactgatgaggagtgctctgtggataaagtactccaagacttgttgag

SEQ ID NO: 20458 - DNA, 555 bp, Arabidopsis thaliana
cttgtgcgtaacaaatgaacccctttgaaggatccctacagtgatcaagatgtaacaatcatcttatcaaaataatctcaacaagattcaccagaaccaatagtagtagataaacatacccaacgattaggaagaaactgcaaagcatatcctgcaacaattaaaaacattgccattagtcagcaatagagctcgaaccctcactactcatctcagaacgcaatggaacttaacgtcttagcgatgtaacaattcacagtgagaataatcgaagaagaaggaagcaaaacagtacataatcctagatctagcacaatcagcgaaaggcaacaacgggaaacttacagagagagcaaggtagaagacgagcttgaaagagaattttagaagttctttgaagaggcagtagcagagaacgatgaaggctgagcagcgaatgagagactagaagcgcaggtgttaacagcgtaataatgctgcgatcccggcagttaagcctccgcggctgtgagaacagccgcattgttatatgtgattccaaactgatctgagaga

SEQ ID NO: 20459 - DNA, 2093 bp, Arabidopsis thaliana columbia
gttttccggaaatggttttatgatcttgcatcggttcttagtcttctccttggatacaaagtttctcccgagccgggttaagttggtccttgggtcgcggtcgggcggctcgtctcctggagatacgcctgaaccggatgacgtttacctgaggcatttcgagatccgcttcaggatggttctctgaaatgacgctcgaactgtttcaaggtcagatcgggataactccataacaacgtccgaggcgtttcagggtcggctcgggatggctctttgaagtgatgccagagacgtcttggggccggctcagtgtggtcctttgaaatgatgcccgagccaacgatcttggccttaggcatttcctctggtcggctaggttacttgggtaaaatctgaccccaacagtttgccccccagctttttaactttggcgggaaaggcgatgagcttcatgagtggatatccgagctgactattcatcttcccaagtcgtgaccttgtcgcttaatcttcctggacggtcaaactttcgttgcatgtagccgactctttcttgagaagtggaaacatttttggcttattcccgagggtcacgcagacgtttctctttctgccaagcccacgcgcttctaacgcgtttcatcatttattgcggacccaacgcgcctttaaaaatcttatatatagcgagccatccctttgagaatttctcatttgaagttttcgaagaagaaaaaatcaaggtttgtctccttctctctgatcttgatattcttattgttttttctttttccggtgaagctccatcgtttatttgttattttgattttgccgattagaacattttgttgtttcctcgtcattcctcatctcgttagacgtctccgagccgagaatggattttaaatctccttcaaccccgagcgcctctctcttcgacttcaatgattcaaaccatccagacgaccttccccctatatacaaacggagggcggtttggacgtcttcggaggaagacgccgtgtcttcttcaagcgcccccgagcagacaacctctttcacggctcgggaagacactactgccgatatttgctcgggaactggatttgcctgatgaccccgagccgcctctcgtctggaggactcttgccccgatggttgatgaagccgggacatccaactggcaaggcgcgcccgagcccttaatgccgtaaataaagatcgaggactttctttatttcggcccgaacgagatggaggatattatgcgtcttaacgagcagagggctttcgagaaagcctagaagaagaggaagaagaaaggcaacagggcgatagtgccggatccccctggcttgactttgtgcaccgagcggtcgctttcggatctgagggcctgattcaatcttggtgaggtcaccgtgcgtgtgtcgatccctgatgagcgagctgacaatccccatgcgggtttctacactctgtatgagggatttttctattattgcttcctgtggcttccggtcccgaggctggttttgcagtacgtgacatcgtaccagttcgccctctcctagattacgacgcgatctttgagacatttgctcgggattttggtgcgaagttatgaatttaagaccgacatcacgctcgctcatttgagaaatctccttgatcgatattatatctctcctgccaaaggtaggaaggttattgacgggttcctgagcaaagacgagccgtataccgatcacttcttctttgtggcccttgaagatgctgttcacgacgacctcctcaggacggttctgacaagatggggaactttgggtagttgtagctaacattctgtttgtgtccgacgcgatcttatgattttttctaactgttcttttccttggttgcagaacgcactctcaaattcctcgagccaattccagacgatttcctttcgacttttcaccaattatcggctatgaaatgcgattggttgaagcatttctctcgggatcaaatcgagcgagcgcttcgtctacttcacggtgtttcttgccttctagctcggagtccttggatcatggaccagttcttcgtag

SEQ ID NO: 20460 - DNA, 1983 bp, Arabidopsis thaliana
tgttttgatatgctttttagtgattttggaaatcaggaaataaatgaggatttgtagagctgtgaactttgtgatcaagaaatatctgtaacagaggcaattctactctatcaattggtcgagtaaaattgcatcaccattttactctatcaattggtcgagtatagtgactagacgaccaagcatggtgatcgagtggcccacctgtctctccatcactctattactcggtggacaaagcccttaaccatcatgctcaattactattcggtcaaactttcttatcccaccaaagcatgggagaccattctcctccactcatccaatcaaaaccaaagataagatatcactctctctcattttcttctttgtgcacacctaactatcatctctctcttttcgagttctgcttcaaatcatctccaacaattcagttttcggttcccttcaaaaaaatccaccccccccccccccgcgtactttactcaaaccaaactgcaagtgtttttccttgtttgagacttacctactaagctttagttttgatttctaagagtttagcttcaccatgagttcaaacagcaatgaatcttccatggatgccgacttcaacgtggatgaggctgaatcttggtctactaggcttgagagagagatgcaagaatacatgcggttcagtcaacaagccgccaagttcctagctagtgatagaagaagagtagagattgcaagaggtaagagagctatggcggaagagagaagcctcgtggatgaagaccttggtggggatgaagactatataactgaaataactccaagagccactaaacccttgatgaagaagactaagctattgctggatggatactatgagcttttggcggctcacgaattccatggcactcgataccctaactcccaaaccatgaatgagtttggcataacagaagatgtcgagtacctctttgaaaagagtggtcttttgggtctcatgaccaaccctcagtcagcctacaaagtagaagcgcttcagtttcttgcttcactggaagggcttgggtatatcaccttcacagtctatgcaaaagactatgttttggccatcaaaactcttgaggatatgttaggattcccaagagggacttatgttaaacacaagttcaagaaaaaggagctttcggatctttgggtaacaataggagatgacgtccaattctcgtcctcaagggccaagagcaacgcaatccgaaacccctgcatccgttacttccagaaagcattggctaacgttctctacgcaagggagaagacaggaccaatcaacaatggcgagatagagctgttggacgttgccttaaaggatcttctagtctacaccaagaacaaagtctatgaagggtgacacaaacgatgcctcacaatcaatgcgtttattgaatcaactttgtgatttcaggaaatgggcactagcgaataagcacaagagaaccatttttataggagggtgataacacctatactaatggcttgtggagtgccacttcagtcgactccctttaccacaagatggatcgacattcctcacctgaggtgggctttgttcattgagcatcaaagtcatgaggggatgcacagtctcaagtttcagcacagaacggaaatggatgccacacttctccttcccagccaagagctcacaaccatcatggtgagaggtacatcgattttcaacccgcctaatgaagaacttttcttcatggatagcgcacccccgacaagagaggctcgacacaatgaagagagggctaagaatgaagaaagggctgagaattaagaagtggaggagatggattgggagaattacaatgcgagtaggtttcattttgaggaatacgaaccacaccaagagtgagtaagagtctaaatgtagcgcataagaatattggttcgatgagtgcttggaataagttcaagacaagatgt

SEQ ID NO: 20461 - DNA, 616 bp, Arabidopsis thaliana
gttgctactccatacggtgcaacaccgttgactctaatcccgtacttccccaacccgccacacgctgatcgaaccaacccgagaagcgcgtgtttcgacgctgtgtaactgtgaggtcccggaccaccaatctcagccgtcacactcgttgtacaaacaatggagccacgagttccactagccaccatcgaacgcgctgcatgttttataaacgcagccgcaccgcgatacgttgacggccatcgttcgatcaaacgcctcaagatccaaatcaagaatgcttccatgcggttccatgaccccggcgttactaaacagaacgtcaagctttccgtgtttttcaacggtgaacttaacggcgttctcaacttccgtctcatccgttatatcgcaacggtaaaaacttgctttgtctagcccgatcgaaacggcgacgttttgaccaagctcctcttgtaagtcaacgatgacaactttagctccatggtccgtgaacaacctcgctgcttcagctccgatcccactagccccgcctgttataattacgatcttgccatccaatcttctgtatatataatagacaagtaagtatattaatcaacgtatgtatgaatga

SEQ ID NO: 20462 - DNA, 561 bp, Arabidopsis thaliana
ctcgagattgaagttatgaacgttgcacgccaagtgtttgtgttattgtctatgttagttttgatcttttggggtttggagagatgtgaggcttctgggaagtttagcttcgaagttcaccacatgttctctgacgtagtcaagcaaactcttgggtttgacgatctagtgccagacaacggaagtttggagtacttcaaggttttgtgccaaccgtgctcgcttcatcagaggtcgaagtcttgccttccacaactgagaaccttcttttcacttcaattggcagcaacctcaggcttgaactcaattccctgggattgtcattcctcttttccttttgattcacaacatttcgttttcttctttaacgcaaacacaatttggtagtgtatgatgcttgactccatcgcctcttgaatatggtttcagtctgcattacgccaatgtatctttgggaacaccggcgacttggtttctggtggctctggacaccggcagcgatttgttctggttgccttgaattgtggtactacttgtatccatgacttgaaagatgctaga

SEQ ID NO: 20463 - DNA, 560 bp, Arabidopsis thaliana columbia
tcagggatcaatcttgaatccgccagagacaacatggattggtcaagacgatttagaacttggctgtagtctactagacccgaatcatgaacaccgtttagcaactctgtgaccgccacatggtcctcgatgcaaacacatccggaatcaaaacagatcaaaaacgttccaaaaggtttgaagaagtccatcttgatacgagtttgtgctgatacaacgtgaaggaaacatgaattcctcacagagttctcaagaatctgttgaagagaagcgtctccgatcaatggcgagccaaatgtgatgcataagggacgttttaacgtcggttcgatggtttcaagaagccatagcgtatagagagatgcaacagaccctcctaacgcagctccggtgatgatcaccggtttctcagacttgagcgtttggagcaactgcaagagacatataactttcaagttttctacgtacaaagaatctgtttcttatagttggtgacttgtaaaccagacaatacacgaagaaacatatcctagatcaaacaaatctgaacagagtattaa

SEQ ID NO: 20464 - DNA, 1308 bp, Arabidopsis thaliana
  unsure (1)..(1308): unsure at all n locations
catgatatgtgtaccatacaatttacttgactttctgataaaaagaactaccctcagaacatatgaagcaaaattaaaggatatattagttttgagggctttttaagaattaagctctggacctctctttcccataggggatcatacaccagaccaaatgttcatttgttgtaattcattaaatgcatttaagagactgtttgtccccataggtgggtctatattttctggagttttattagttaggcgcttacttgtttctctttcctgcagcatactgcttgcgttatctagttggaatatcatcaagatgatcgtgtttgtgcatatctcaatcgtttgtgctgaaagacaaggtatgttgtggtgatgtttttaatatacagctggagaaaaattagggaaatgttgtctaaaacgtgattttgaaaatttggcaccaaaagacaggaaagtctctaatataaatcaataggcactcagtaaatacactgttaaaaagtcaacggggcattccgagaatcgaactcgggacctctcgcacccaaagcgagaatcataccactagaccaaatgccctctttgaaaaatttgtttttcatttaatttctaaataaacattaataagttcacaatcatcaaaaattacgtaatcaaaaaaaacatagtacaacaacggtacgtagatactgatagactccattcaatctcttgattaatataaatcactgtatatagtatagttagttagttaaagagatacggcctcatctcataatgtgaatcttatgattccgtctcaagtttaattaaaaaacaaaacttagagagagaagatgaagaatccggcggcggcgacagtgccggcgatggagagcttcacattagtcgtggcgccacttttgggtgactcggcggcggcgggtccatcagatgagggtccgtcggaggagggaccatcggcttcgggggtaggagcgggtggggaggagacggtgggtgcctcggcggagtcactggggctggctgcagagtagtcgtcttcaggggtgggttcctcagcaacaggggatgatgctttcggtgcggcggcggaggatttgggtgcagcggcaggagccttggttggggatttggttggtgaggcggtgggtgcagctgaaggtgcatcggcggcgaatacggtgccacgccaaagccaaaagggcagctacgacaaatagacgtgccattattttctactttttaaatatagttatagagattagtaagaggaggtgccaaagctanagcagtatattttatttg

SEQ ID NO: 20465 - DNA, 2467 bp, Arabidopsis thaliana
tgcactcacctggtggaagatcttcaggtatcatccttgccccaatcacgtgaagatccaaaatcatgcccggatatcagatgtgactgtcgaccccaatatcgaagaagtgcaagagttaaaaatggtcctcgagtaatgcaagatggaaggaatcgggttattaccattgtttacttttcattcctcctatgtatccttcaaacaactattctgggggaacttcattttgtctttgccttcaaaattcagtttgataactcagccgtattataattaaataactcagacactaaataacataatacgaatataactcagtcgtaagttaacatagtttatctataactcagccgtaaaaggtaaaatgaactcaactcggccgtaacatgtaaaatgaccgaacctttcgacttccctaattatataactcggccataacatgtaaaatgaccgaacctttcgacttccctaattatataactcggccataacatgtaaaatgaccgaaatacataccactgttgccaaacaagggaaagaagacacatacagagtacaaacagtactatgcacgacaagttttaacattgtgccctgtttctttacatcgagaacatgcgtgttccttcctagggcgtttagtctcaacggcgacttctagtgctgatttcatccttagtttcttgggcctgcctggctggttcgcaacaatcggaggcaaacacggttggtcaattacaatttgaggaacagggacttctgtatctgaaggcatgattgcaccagcgtacgcattgaccaaatgactgctcttatgataaggactgcacagggatatacgagacacacccatatgttctgcagctgcgattgcatggatgcatggtgatttctcttggtcgaaaagacggcatgtgcattgtttttcatccacatttacaacatgcaaagatgctcctaagctacttgaacgcgggaagcatcaatcgtttgtacatctagaagtcttgacgagttgacgcgggtctattagagagaagagacaagaaacaaaaaaaaaagttatggctgaattattccctttatagctgagttattctcgttatggctgagttattctcgttatgacggggttatcgttattcgacgactgagttatgcactagttacagctgagttacctgtaagagtttctcaacaccacgtgtgagctgagtatgttgtttgctcgcatcatctctccattcagcaaaccatttagtcatcatctgtcttatcgcttctaacagtcgaactatgggaagatttttggcttgtgacagtgctctgttcattgattccgctatatttgtagtcattaaattgtatctatcaccgggaaaatgagcacgcgcccacatttcaacacctgctctttggaggtatgcatgtagtagaggatcaagctcttcaatctcgttgaacgcgttagtaaaatcattcagcctataacaccttgctgcttttttcaccagagggaacaaatcttttcttttgaattttaccaaaatgttcttatagagatggtaagtacaaatcccacgagcagccaacggatacacttcaccaattgctttccctattgacttatgtctgtccgagattatcgccaggtccgttgcatcaggaataacaactttgagttgcgtaaaaagccaacgccaagaatcatcattttcagtgtcaactacaccgaaagctaacggaaaaatctgaaaattaccatcctgagcaagggctgtcaagagcgtccctttgtaactaccatggagaaaggtaccgtcgacaacaacaactctgcgcatgtaatgaaacccagcgatactggcaccaaatgcaatgaacatatagttgaatcttccactctcatcaatttgaagacgcgcgactgtacccggatttgcccgtcttatcatgtataggtaagaaggcagttcttcaaaactactatcaggggttcccagagtgagctcccttgcaaacctgagcgtcttgtatgacttcgaataactcatctgttaacacaaacatattagttgataagtcagcctaaactataccacaactcagccaacaagtgatcttaagtcagccttgaaagtcataactcaaccagaatgtaattatatgtcagcctatatcaataagtcaaccgtaaaatatctataagtcagccagcagctaaatagtaagtcagccaaaacattgtaattacctttactcgaaaattcttagtgatgattattccgactgattttggtttaacatccggaccaacgtcaccaagatagtccctgtaaagaactcccagaacatcaggtgttgcttgtcgggatcgaccagaacgttccgtcacagaacatgtgtgttccgaatcgtatatatccccatgacacttgggatcatttccttgtctagatgcacg

SEQ ID NO: 20466 - DNA, 1559 bp, Arabidopsis thaliana
tacatcagaaccttataaaaaaacccgcgtctgcaaacctttctcgataaaagtgcaaccactgagtaaacagatcaatggaagtaaattccaattgtttattggatttgcccctatatttccagacatctgttatcacttaacccattacaagcccgctgccgcagatattcccgtggcgagcgataacccagcgcactatgcggatgccattcgttataatgctcgaacgcctctgcaaggttctttgctgccgttaacccgtctggtttgggcatgatactgatgtagtcacgctttatcgttttcacgaagctctctgctattccgttactctccggactccgcaccgccgtgttcttcggttcaagtcccaacatccgggcgaactggcgtgtttcattagcccggtagcatgaaccattatccgtcagccactccactggagacgacggaagatcgttgccgaagcggcgttccaccgctcccagcatgacgtcctgtactgtttcactgttgaagccgccggtagtgaccgcccagtgcagtgcctcacgatcacagcagtccagcgcgaacgtgacacgcagtctctctccgttatcacagcagaactcgaacccgtcagagcaccatcgctgattgctttctttcacggccactctgcctgtatgtgcccgtttcgatggcggtacagcaggttttcgctcaagcaacagcgcattctggcgcatgatccggtaaacacgtttggcattgatcgcaggcataccatcaagttctgcctgtctgcgaagcagcgcccatacccgacgataaccatacgttggcagctctccgataacatggtgtatacggagaagcacatccgtatcatcagtgtgacgactgcggcggccatccatccagtcatcggttcgtctgagaatgacgtgcaactgcgcacgcgacacccggagacaacggctgactaagcttactccccatccccgggcaataagggcgcgtgcgtatccacttttttgcccgtccatattcaacggcttctttgaggagttcattttccatcgttttcttgccgagcaggcgctggagttctttaatctgcttcatggcggcagcaagttcagaggcaggaacaacctgttctccggcggcgacagcagtaagacttccttcctggtattgcttacgccagagaaataactggctggctgctacaccatgttgccgggcaacgagggagaccgtcatccccggttcaaagctctgctgaacaattgcgatcttttcctgtgtggtacgccgtctgcgtttctccggccctaagacatcaatcatctgttctccaatgactagtctaaaaactagtattaagactatcacttatttaagtgatattggttgtctggagattcagggggccagtctagatccgccagagggaaaagcagcgccgcccgcagcgtgtcaatgtccatacttaatgtcgagaggatctccaccatctcaacaccacgccacaataacagactggcatccggactttagagcacact

SEQ ID NO: 20467 - DNA, 1021 bp, Arabidopsis thaliana
ggtctatgtgctgtttccctctattatccttgactgaggcatgaaaaaaggacgagtttttatcaccactgtgcatccatttcgccctgcttttttgactccagaaggtttcttcttcatgatttgccttacagagatcctcctttaacgagttaaccactaagagccttggaaagaccgaagattgttccgtctctaaggctgctctggcttgaaggatctttgtctgcgagttgaaattgttctcctgtttccacttacttaaaacttttctgcacttcttcaattttgtcaagactgtaggaccctcattaccactccaagcattgaaaatcgtctcttccactcttggcttattgaacattctcttctcaaacctaaaactgcctctgttcatctcttttgttgaagaaagtctaaccaagaccggtcgatgatctgatcctcttttatctagaaattcttgattagaaaccggaaaatgtctataccagttcttgttgccaaaacatctatccaatctactctggatatagagatcacctcttcttccaccccaagtaaagggatttcccgtactaggcagttctaacatgtcacaaacttccagcatttccttgaaaggtaagaaagaagagtcaccctttcttggaccaccaatcttttcaccattatgcaatatggcgttgaaatctcccaacatacaccaaggctcctttcgctgaataccaatccttttgattttctcccaaacattaggacgagaactaaaagccgggtctccatacacacaagagacaaagaaatcaaaagaaccaaattgaatttgaaaatcaatgaggttcttgtccgcatactttatttgaatatctacaccttgtttccacagcaaagctaacccaccactaaggccaatcggatttactgtgaagattctatcataacccaaccattcttgcaggtcaacgacaacattactacagttcttagtttccacaaaacaacacttcagggaaatgag

SEQ ID NO: 20468 - DNA, 2351 bp, Arabidopsis thaliana
  unsure (1)..(2351): unsure at all n locations
tcataacttactcacagagaagaagcatgtccactttgcagctgaggaagagactattgagcctgagcctgagtcaaaggaaggagtcttctacatagatggtcagggatacaggaagtttgggcagccacagggcaactttagtggtaacaggtttacagngaaccaaggttcctccaactacactctaaagcctgctttctaaaagacctttcctcaaagaagctttcagaggaactacggtaattcaacctaccaagccccccctccaccctcagcagagacaagaatggaatcaatgcttgagcagattctggagagccaaacaaagcttgttgtagagtttaatggcaagtttgatgctgtctatacagatcttaatggaaagattgacaatctgagctctcacttgaagaagctagatgtacaggtacctcaaactgcataatctatcaagagagaagagggttttcttcctggtaatcctgatgctaacccaaggaagagctgcaatgccatcttgatcagagaaggagatgatatgtgggaggaattggacactgaagacgagtcagagctcgcagttgcaaagatcgtgtcgaccgacaccctcctgtgtcgatcgacaccatatgggacgctctttttagagacgacccaatacgacgctgtcgatcgatacccctctagtgtcgatcgacactggattcggacatcaccctgcgaggtgcaaatacctatgcagcccgagtttgtctaccctcttcttgtcccttaatccgaggaggcgtcgttctaagcaggagattcatgctgccaagtgcacaaccataatggagaagatcctccataatcttcctaaggatgcttctgagacatcttctgcttcactcaacaagtatgtcaagcgtctagttgacaatggaattagctcagatgaagctaagctgcttaccaaagacatcagtgcaatcatgctgcctaaggccaagaaggagtaggcacagagagtagacatagctgagtacatctgcaccattactcctggtcaaactacttagaagcttccagatccaggtagctttgttcttaattgctctatctccacaagcagattcagccgctctttgtgtgatctaggatcaagcaacaacatcatgcctaagtttgttgctgagagcctaggcatgactcattacaggccgactcgcatcactcttctcttcgcggatctttccaagcgaatccctgaaggaatccttgaagatgttcctgttaaggttggtaactctattatccctgctgattttgtggtcctggattatgagaaggaacccaaggatcctcttatcctagggagagcattcctagctacagctggtgctaggtttgatgtgaagagagggagaatctctgtcaaggtttgtgatttggagatggagtttggcatggatggttcagagcttactaagcctatcacttgcattgcttccagcacagacacacctcctcagactgctcagaatcccaccacagaatcacacacaacgctcccattcgctcagctcgcaaatgagagttgtagagcaacggtgtcgatcgacaccactacctctgtcgatcgacacccacgggtttcacagacagatgattctgcacattctctttagcccacaccacttgaggaccgttgtgataagttctcttctatctcctctcctgctttacctttgattaattctttagattattcgaagaatgcttcacaagataacaagcctagagttcctcgaaagcttgtttctcctgttgttcttgcaggtgacgagaagagtgtcgatcgacacctacaactgccccaaccagatccgtttacacaccgccttggaaggcgaggaggcagcaaaagtcttccaccactccacccacatcctgaactccgccaagtcaagctattgactctaaacaagcgcttagtgggaggcaacccacgggtttgatttttctttctctgtcttttattttcttttatttttgatttatttttctcgctttttcggatttgaatgccactggggacaatgtcgtttaagtctggaggaggttcttattaattatgcgtttattttttattcttattatttcgtttttcagtttattgagtcatttctttcattcttttaaaaaaatacatttttctttattttagttaggaatcatgatctatatttctcttaattattgtctggttgatgagtgctacaggttcgactcagtccgactattggaaagtctagatggcaaacaaacagacttgaggatatcctagtttccaacataaccaccaaggc

SEQ ID NO: 20469 - DNA, 2019 bp, Arabidopsis thaliana
tccatacatcggatcgataatttcaaaaggtgcagaaatagaagcataactgaatcaaatgtaatctagtgtgttccccaattgacatgcatgacaaagagacatgtcaattttagaacaattaattaagggaataagttgagatttagtacgtttatgaaacaaaattatggaagtagtacactcactatttataattaaggaaataatcgggtccactatcgactgtaatacgcgtcgcttgtaatacagaaaaacatgggccatgattcgtttggaaaaattacgtttaggggtcgccgtttgttttgttcgtttgcaggaaaccctttgactgagttcgggggtttgctttacaagatacaacaaacgtcatgggcctagcgtatttctagatgggccttaatcaaagtctgtttacagatttataattcgtagcgaaggcgttgaagtcaacttctttatcgtcggcttattcaatgccggagtgcgagctgagagaaacaactgcatttatgaatgtttcaaatcaacggaattagttaacaggttggtgaataaaatgttataataatcaaattctctttaggtttttctcgaaagtagctaaattttttgggggaatttgagctcgtttttttagaggattagattatgtttaagtaacatagagagatgatgattatcagtttcggttgtgtttctttgctacctggaaaattcatctttgcgtttctcctatggaaggtggaattctaatcagaaaatggttttgtaaatttctcctaataatgtttaaaagccttcagtctgataaaaagtgaattccttttttgcagtggatgatattgtcgttgtacaggttggtagatggattttgtatagcaccggtgaatgggaattcaagcttgattcttgtggtcacggtagggcgatgagcttgatggggttaataactttaagggatttagagcttaaggttcgtcacatctttgggctggagaaaccttccatatctttggagcttagctacatttcgaggacagactagctctgttatctggtgttcagccgggtccgacaatgattgggtatgattggcagtttagatgctttaaatctctaagtattggtgataaatctgtgaatctgtttgtgtgttttagagaaggcgattcagttatcgtcggtcctgcctgcgaacctggacagactagcgcaagtgttgttaagtattttgaagctggagaaccaacgtttgcaggcattgtacagtctatagataaacctgttccggcagttggaggaggttactttgcggggttatgatctactgttcaagataatatggatgcccagcctcccaacaatcactctgcttttgttcagagtacagccgtttgtgattcatccagtcaatgggacataagcgatgaacttctgttagaagccctagaagcagtggagaagtctggagcttttgtcaccgctgcaggggtggatacatccctaccggcagaagtacctgattcaggtgatgattcagagtctttagcagaatctgacgaatcttcctctcttagtacaggaagtgactcagaagtttctgagttcgacgacgataccctccacgaaaacatcctccaatctgataaagagattgttgtacacaaagacatcggggatgatgatttcgttgagcagccccccaaaaagaaagtttggcttcaaaataccaaccctggtgctatgacagatcttttagaaacttgtcataaaggtataagcattgttcaagtgtatgggtacgaagttctcgagccgatgtttggtaacgatgatattgaagctaaagcagcttacgttgatttgacaaaagaggatgacaatatgtttgttggaaggacctttgcatcgagggaagatttcaggattgccttgtccatttatgccattaaccgtatttacagctgacgattttttttttttttttttttttgtggtaaacacagctcggca

SEQ ID NO: 20470 - DNA, 1431 bp, Arabidopsis thaliana
tctacctaatgtgccatgcgagtgaatcgcgtctctgctgacccacaattgcggcgaggttcgatgcgcaatttcttggtttctggttaagttgatcaagttcatgatcattacgcagagctcggccaattcgctggcaggtcgcggagggacttgattagacgggttggccgggttatctccgtttggaggctgtatcgtgacgtttcgttctccgccccttgtttgcggagggggagtgatttgatcagatccagaagaattcgagttttgggagatgttctccgtgtcagtgttatggataacagcaacctgggctccgggagggagatccgttgggaggtgcccgtccgtaacgtcatcgtttgggatctgaactggtaagccagatctcgatgaattggatgaattgggatccaagatcgttggtcacaagtgatgtgttagtgttggtgttggaatgatctatttccgtccccatagacggcgccaaatgtgggttttgaaatccacactagagatttgtatttaagattatgagaaaggagggctagatcttcactgaaatcttgagagttatattgctaagaacgaatggacttttgtattaattatggcaaagcttttacaatgtgaaaagagattacaagtgtaaaagtgtgtgtgtgcgaatgtgaactggattgaatgtctcttccaagtcgtccttgctcccttatatagatctacgcacgtggtagcttcgtccgggatctgcggagatcctcctagagattcatcaggtcagttccaaaatatcaggtccgctccgcgaatatctcctcatcagttcctaggtcattattcgcttatctcccttcatcagatgactgggcttatctggcccaagtacccattcgcgtatgtgggctcgtcagctgcataggtcctctacttggtgggcttggtgggcttttgtgggctggcttggtattttcgcaggtggattcctggaggggaatccagctccaacatttgccccccagcccattgagtgagtaagcgaactcgatgagcggacatataggtcaggtaagattgcgaaaatattcttgatgagaagataaatgtgattagatcactcagttttgaggataaactcaacaatttcgatttaatttcagattcccttaaccgaaagatttcgaggaggatacgcgagataagtcgctgctgatgtggacggctgagatggagcgtctcttcagcgcaccgcatctgacggtccagatcaggcgcggagaagagatctctgcaatctcgaaaatcgtggtgatgatggctttaaataacttcccacctatccatttgacgtcacgtcaactcacacaactctcaaggtaacttctctcattctttattatttatcgctctttgtcttgtagaagtaga

SEQ ID NO: 20471 - DNA, 1840 bp, Arabidopsis thaliana
tcactcgaccccgatgtcgagtgtcttcatctcatcacctgaccatcactcgatcacatcactcgaccccgaggtcgagtgtcttcaccttcatcgccagaccactactcgatctcgctactctagcttgaagtcaagtatctccatcacaaccactcgactacaaactcgatggcaagcttcagagtcttcttcatcccgcactcaaccagacactcgagcacaaggaagaaaagaagactccagctattcactcgacctcccactcgaccacttaggtcgagtacagttattaatccgtcctaatacttcgtcgttttgagtattagggtttcagaatatttggctataagtagcatgtacttcacattttcgcaaacaagtttttatctagttttatttcgcagaccttgtgttctaaaccttttgtaatctggatttctctatatctattcagtattcagtattcagtttctgttcttgatttcgtttactgttgttcattctgttatcatgatgctgttacactgctgttatcacgttttcaacttgttcaacgcttatgctttctgttatgatgtctgagtagtgaataggtttctgaggatgggttagagtagtgtaggattcttagtatgctaggtgattgagtattgattgatagatccgttatggattagttgttcttaatgcatattgctttttgatcaaccggaatttgagcccagacatttccgcgcccaaaaggtgttcgatgaaatgtgtgaaccactaattccagagattcatgaccttgtaccaaggtattggttgcagggagcgttttggctttaacttgttgattcgtaatgcctgttaggttagctctcgtcaatggtgattgagtctgggactaggttaacttgagggtctctgttgcggtggcatttagatttggttaatgaacttgttgtctagggataatttattgagcatgtcaatcacctgtaaactgaggaaacgaaactactcagttaccccatcttcgggaattctttatctgattgattttattgtttactctactgctgtttactacatcttgtcatctgttgcttagtctctgcaattctttccttttactcgacctgatactcgaccaccctgttgtttagcaacagactgtgcagtcgagtgtctctgtttcgtttagtgactgttactcgaccaagtcactcgaccacacctactgttctgtaacgagctgtgttggtcgagtgcttttattattctgcttgaatttctgttttctgcatgttcacttaggactgctagaacacaccaaaaccagttattgcttggcttgacttagttacttctgatcacatcttgattgttagcatcacacccatttggattgacaaccttaagtactacaacgacatgatagtgctttaggattaattgatcttaaaaacctattatcaatttggcgtcgttgccggggagaatcatgagtaattacagtggcagttctttagttgattctcactacaacatggatgagacagagtcgtcatcttcaaggccagagagagaacagagagaatatgacagctttagaagaaaagctgagatagctcgagggaagagagtgatgacatagaggtatgagcttatagatgaggatctggaagacgagtacatgcttgagcatactcgcagagccaccaaatttctgcacaaagccgatgtattgcttgctgaggaatatattaggctcttcaaactgaatgagttctgtagcacgaggtatccttgctcgaccacacttgcacaactcgaattattggaggatgtt

SEQ ID NO: 20472 - DNA, 589 bp, Arabidopsis thaliana columbia
tcaacggtaatatcaagagagatgctgtgagaccaacaagcacaaccattgattctaaactgaagtaactcgctgatattagcctccttggactgttctgcgacgacaatgtccgaaacaattcttgcttccccataatcggagctggagctgaaccacgaaaactcgtgtttttccggttatgatctcctctcacgtccatgttgttgttgagagaataatgttcttgaatgtttatgatgtcgttttgtagactggagaactcacgaatcatttaaagaaggctttttctcttttcgaagtttgatctggaaaatcagatcgatgtatgaagaagaaacttgagtttgtttatccaaacgcataaaaagtaacgaacttttcttcttcttcttcttctgtaaatgtagtttggttgaagaacctgacgatgaaatgattatcccgaaatgcagacaaaatctaaggtttagaacgagtgatcttggcgtttccagcctaaaaggactaatcttttttttttgctggtagagagaaaagattcaattggtgtttcaagaagctgcaagagaaaatttgtccaagtttt

SEQ ID NO: 20473 - DNA, 476 bp, Arabidopsis thaliana columbia
catcttttgattagatttcgaggtcagactcactgtcgaggcaatatcgaaggaggattccggtgtagaaagaaagaagaccatatacaaatagtatcataagtcctaaccatcctccttctttggcagcataaggcgttgaaagtattccaaccccacaaagaacgttcaatcctgcacatgacccacatgttatacaagatgatcataaatttactaagagcaaaagatctcaatcatgttctttgaacctagacgtgtatggtccaacatgtgctccatgtgctataggacaatagagttgattgttgtcatgtacgattcacttaatttatacagagacatacatctttaaaccccgaagaagacggtcttagaccctcttacacacacaatctagattcctatactgataatcatacaacagagaaaatgttgacatatgttcattagtattcaacggtgaatgaacacaa

SEQ ID NO: 20474 - DNA, 529 bp, Arabidopsis thaliana columbia
tccaaatccacctgatccgatcatactatcagcactaaacccgtttgtggcttctaaaaggtgtgcaaaagtaagttttcgcagcggcttctcaaatgttgcaacgttgatgctcaacggttcatgaacactagagagcttccagctgctgctaccagatgtcggaaggctctcaatgtacttctctctctgtttttccttcttctgaaccttccttgctctataaagcgccataataagcatcacaatacacatgaaagaaaacacaatccccgcactcatcccagtcgcaatgctctgttttttagggtgagcatgagatctcgtgggccgggaaccagagctacaaggtggtagaggaacccgcagaggccagagttgttggcgtatcttgtgagtgggaacgtcgtaagttggcctccgaatgggattggtccggttagattgttgttagagacgtctaagtcgcttagaaaagagagtcccctagtgatccaggtaagaatccttggagatcattgtgagatag

SEQ ID NO: 20475 - DNA, 384 bp, Arabidopsis thaliana columbia
agaggatcccccggcgacatggatgctagaagtgagctcaatggctgcagaagctaagcttgagatagattttgctgagcattataaaacatcatccttatatcagtaagttcaacctaatattcaaagctaagatcattccagatattttaactcaattagaattgttcgtggtgtagacaaaacaagaatcttgtaaaggaactaagcacaccaccacaaggagcaagcgatctctacttctcaacgcggttctcacaatcattgttaggacaattcaaatcttgtttgtggaagcagtggataacttactggagaactcctgactacaatctagcaagatttttctttacattggctgcagctgtcatgctcggatcaatt

SEQ ID NO: 20476 - DNA, 419 bp, Arabidopsis thaliana columbia
gatcctcgataaaaatgaagggggtgacgattcacaatttttgttactcttacttcaaggtgtgtctacttgtgatgtcattggcatacggatccgccgaatgggatggaagctccagccaaatagctaaaactatcatcgtcaatccaaacgatgctagatatttcaaatactgtccaaagttgcaatcgactctatccctctgcaaaaccaagattggatccgtatcctcataagtaacggtatttacaggtaatgtataatgttacttctttctcaatacttcatatgatttatcttgtcacatttttcttacaaatagattctgtttaattaacaagattttaaaatggtatgacttgtcaataattgaaaatgtagtgagaaagtaacaatacctaggggcaaaggatatatat

SEQ ID NO: 20477 - DNA, 500 bp, Arabidopsis thaliana columbia
cttccatggctgatttgcgaacagttccatagacttggatacattcacgagagtaaccggcggcgaccattcgttgaacaatcgatcttagatcagaaactgcttccggcgaaatcagatccatttctcgtatactgctagtggatctgtaactgcttcttctacgagttaaccggcttgaaccggaaccacctggagaatttaattcttcttcttcgggagttacggtggtatcttctccaacttcgacggttaaagacggagagactgatggttcctcgaggaaaagtgaatcaggctcgaaagtagttgtgtgggagagaagaatgttacggaactcgtcttcgagtctagccatagcgatttgaatagctgagttggctttgacctcgtgttcatcgactacggtggcggcggaggtggcggcggaggaggaagaagaagagaaagagacagaagataaggaccgttggatttcatcaacggctcgaagaaaccga

SEQ ID NO: 20478 - DNA, 776 bp, Arabidopsis thaliana
taagtaaacatgtccttaactgtataaaatacgtttgtagattactatgtccgcagtaagagaatgggctgcatctcaaaatggaaagcttttagaggtaaatcaccaacatctcatctctgatattgtggtgtctaagagctttcttattgtttctcttctttttgaatcatgaaatggcgttgattgatgcttgcaggcagttgctgtaaataacttgggcaagtggaaaaccgccacgcagatgacagcactaaccatacttcttgcaagccgagatagcaatgttggatggctcgtagcttcaggtgctggcttgctttatgtatcagcaggactatctgtttggtctttagccgtttatatgaggaagatatggaaagtactaatgaagtagtattagtagtagtaattcatctattggttttgttttgctttgacctgcatttggatttatgtattgatggaaagggtctcagtcatcgcctgtacaagagcacaaaacttgaatgctgcaacatttaagtagtttgagaatatgtagatgattttgctttgcacttttccaacacaatatagagtgtgcaacatagtcttggttgagattaaagccttataatgagtgtattgtataaacgatgaatacgtatttccacatatggaacaaacattctttattcatacaccgcagtttcaaattacaaacaaaaagtctcttctgattagctttgtttggtcaatcactttctcatatgcatcaatattactgtaaatga

SEQ ID NO: 20479 - DNA, 738 bp, Arabidopsis thaliana
ttgcaaacttcggtttctgaatcgtatccggttttggtgatcacagcatgaacctgcttcccttgtttcatgttagctgtctcagaagcagctttcacagcagacccaaacgtgaaattattattgtcaattccttctctgttcattcgaacgaagacacgaagtgcttcttcattgtttccactctgctgaaatccggataccagagcattccatgctatattatctccagcttcagtttgttcaaacgctaaatacgattcctctatttttccgcatctagaataaagtgtaaccagtgcattttgaaatggcaggtcagatgagaaaccagatacacaagcttgagcatgaatttgctgtccttcctttaaggcttgaagaccagcacatgcactaactgcatttgtcaatccaacttcatcagaccgaatccctcgatccaacatctgcctgaaagttgttaaagctttgtcgtcgaaattgtattgcgtgtaacctgcaatcattgttgtccaagacacaacatcttttccagcaaaccttataagtatatcccaggcagtatccaactttcctaattttgcatacatatcgatgagcacactacaaacataggcattgagctgaaagttagtttttattatttgactatggatttgttctccaagctccagatccccaagtcgtatgcaagttttcaaaatactcgggtaggtatattgatttggaacaatt

SEQ ID NO: 20480 - DNA, 562 bp, Arabidopsis thaliana
tagagaacgtgaaaacctttgtgtcattcaatgaaggacatacatttcatcttactgtagcttctcttcttgaaatgggttaccaggtaatatttatttcctaattctattatttttgtgtcatggtcgttcttattcatgattgctctttagtagaagttggctacatatgatataaagcaatggttttcatataacaagtttgttgaaacatgtaggtgagatttggactcttggaggcaggagcatatggaatatctcaacctcgtaaaagagctttcatttgggctgctgcaccaaacgaagttcttccggaatggccagagcccatgcatgtttttaataatccgggttttaaaatcccactatctcaaggtttgcattatgcggctgttcaaagtactaaatttggtgcacctttccgttcaatcactgtgagagacgcgattggtgatcttccaccaatagaaagcggagaatccaagataaacaaagaggtgtggtttaataattgcaccactagaagaaagtatctatacattacattaaatacaataacatg

SEQ ID NO: 20481 - DNA, 511 bp, Arabidopsis thaliana columbia
tcaacttttgttaacctatgttctcttccagttacctccattgacgcgtagttacccatatgtgcgcaacgaagtctgcagtatgaccaaaaagcttaagttattagcgacagaaagatgagaaaaatagctaaattcctacaaaaattgtttacctcattccgtcattagtcaagtttctaccccttactattaaagctgtttcttcaccggctacaacagccaacgggagcaccgtgattagctctggtaaattcaaagttctccaagatttgctcagacgaattctacctgtagtattgcatagaaatgactaagttatatcttgcagaccatacacaccaacagacacagaagtaccaggttatgagtactcaccatgtttgtgtgacgcgagctgtctgcctgcattgaccaaaaatcttgaattactccaaaattctgaatcttgaaccaaagatctaactcgttgcagtaaatttcctcaagctgaaaaaggagacatgaaaac

SEQ ID NO: 20482 - DNA, 448 bp, Arabidopsis thaliana
aaacttgaagggaccttttggttgtgtatttccactagcaaactttattcgacaccgcagatgatccgaaatccctcctgcttcaaaaatactataaaccgcaggaaatttgcgagtccatacttcatttactagaaccctatccaattttttattgactaaaccctcctctcttttattgcaccacgtaaacactggcccgtgataactcatatcagctagggaacaatatcttacgacgtcttgaaagtctcgcatgccctgtggaatgaatggtgaattcacaaaatttgaatgatcctccccatccaaaatttcattaaaatcacccagtatcatccaacctttattacgaaacattggcaaatcgtaatgattcctcaaatcttcccaaagttctctccgttcatccacataattcgatgcataaataaaagagacaaaaaaa

SEQ ID NO: 20483 - DNA, 610 bp, Arabidopsis thaliana
tttaaaattacgaccgtataccaaatcaataagtttggttagttcgatggaaagaaagatcaatggaatcatataaaagaggagaaaacgaataatatgattttaaagtaagaaatttaaataaatattatacagttgaatgacaagtgaatttgattacgtttttaattttttatataacagtaacatttatgagtgattattttgtaattaagaaagctggagagatagagacagagttcaagaagttgggaacagagaatgtgttaaaagagttcctcacatacaaaacccctggaccgctcaatctccccaaagacaaatatttcaaacgctcagaaaacgctgcgtctgcgttaccactgtggttaacacaagaagaccttgattattacgtcactaagtacgaaaacaaaggcttcaccggacccattaactactaccgcaacattgaccggtacgtttaatcaccacacggttcaatagtatcatcacataattttcatattttaaccaatcggttcgcagaaattgggagctgactgcaccatggaccggtgctaagatccgtgtaccggtgaagttcataatcggagatcaggatttgacg

SEQ ID NO: 20484 - DNA, 1198 bp, Arabidopsis thaliana
cttgttatgcttctcctgtgtctgttgtatttgagggatctgatgcaagtgatcagatcaaaagttcaacagaaacatccaaagactccgccctccaaatcagcgctgaaagtaaagatgaagtttgcagagagagtaacaacggaaggcttgtggaggaaagcagtttcataaacgaaccaaataaaacggaatatcctataagccattttggatcaacaggcactgcacctgacactgttaatacagctaatcagacgtcactggaaatcggaaggacagaattcaatagagttgttggtggcttgggggtaattcaagcaaatgaggtcgacggtaatgtcaaagcacacaacaattatgctgaggtcccagtgacaatagaatcaaacgatcatcgagattttgggagattgcagaatctttcagaagctcacattagatctctggtttctagtccgctagtcactagaaataatacatctaatgcttctgaatctaacttgggaccagtttcaggtacttatcctatacatcttgtatgagcgaaaaaacaaaactctcttcaagatataacactcattaaaatgaatattgtgtatctctgtaatagccaagtcgattttgatggaacaggtctaagcgctggagttaacaaacaggaagacgcatctcagaaccaagagatcaccttggagaagacaacaagctggggcacagcaaaggagcaacacgtccctctaaagaaccttctgagtgaagcaagatcaccaaggctacaacaacaagcaaaggatcacgagagtaacaacataccgagagtgagttcgatactgggacaggagacatcccctgaagatggtcactggccagagaaaagagaagtgagcgaggaatggaattcaccagcaaagtatccagtggacttaaagagagaggagaagaaagtgaaaggaagacccttttgggtgccatttgtttgctgctccaatgttaaatagaccaccactctattgtataatgtgtaggagatgatgaatggtttctgaagacttgctagtacaaagacgtgttagtagtttggttcttgtaggcgctactgttgcttaggctttgaatacttttatgcagaccacttttgaatttgacttttttcaatttctgtttgcgtttgaaatgcctagtttgttgaatgagt

SEQ ID NO: 20485 - DNA, 519 bp, Arabidopsis thaliana columbia
caacattttaagttgagaaaagaaatcttaatttagacctttacataataaaaaatatatgatcaatatcatttttactgaataactctatatcactaaaatatatttggcgcgaaattttttataaacttgaaaattatttagaatcaatacaaagtaagaaaaaacaaatttctagtgcaacataatcgcgtgatcatctactgtttgtttgtgagttttcttctcagatttgaataatggttttcagcagattgtgttcgcgtcaaatgttgttttgttcttaggtagaactcctttcttcgactcatctctcttcccctgcggctccgtccttgtttcaaaaacttgaagctcatgtcgtggtttacaatctatggagacagtgaaataacctccttcataactcgcaacacctatcaccagctcttatcttcaagttcgctgatcgggagcttcacaacaacatcacctcaagaagaagtaggaagagctggcaacggttgatgcttttttgga

SEQ ID NO: 20486 - DNA, 485 bp, Arabidopsis thaliana
tgacacgcaagaaaatgaaattactgtatatctaatttcttggaacctgagtctcaatggtaaggacttgacacgtttaaaataacaaccgttgggaccaacagagagtagctgcaaaacaacattcacttccaacggctagtttctcttcttcccctatataaagacccaatcaatcacaaaagagcccaaataagcaacataaaatctttctctttatctctatatagctcatacacaaacttcattctaatggctcagagaactcttgttgcaacattttttctaatcttcttcttgttgactaatctcgtctgtagcaaagagattattgtcggaggcaaaaccagctcctggaagatcccttcttcgccttctgagtccctaaacaaatgggctgagagtttacggtttcgcgttggcgacactctcggtcagttttctttccccaattcattccaaaaatcagcacttttcctttgaaa

SEQ ID NO: 20487 - DNA, 948 bp, Arabidopsis thaliana
ctccaaaaggcccaaccaattccatattaaaaatattagttcctctcggttccttttatcatttgcataaaatcgttttgcctccaaaagactaaaagctctagactttgtctctttgtccttttatctctactcccaacaaaaccagtttactcctcttaagaatcatgtgtaattcaaaaccatcttctgcttcatcttccttattatcttgtaaagacaaaacccatatctcaaaactcgaaacctgtgatacagataatcctcattattctgaattcagggatactgattctctagaccttaaaagatggccaagttttctggaggtaaattatttctttattattcctatacgtaaatgtttgtatttttctacatagatatgaacataataattcaagaatctagttcttgacaaaactagattgtacgaactataccaaaagcatatatacatatacatatatataaatagaaacaacagtttcgcaatcctttttatatatatacctaaatctttggtcccggttggtgatttggttttgtcatttttttataaaggtttaagataagctttatttgattaatataattaaccattaaccagggaaaagaaaaaaacgatctactgacgtggacggttcttggtcttgacttttcttttcttaattatctggcggcagggcttagaggaagtgaaggcgatcggaaaaatctctgggccgacggcgatgaccgggcttcttatgtactcaagagcgatgatatcgatgctgttcttaggctacctcggtgagcttgagttagccggaggatctctctccataggctttccaatatcaccggctactccgtcatctccggtttgtccatggggatggaaccaatctgtggccaagcatacggagctaaacaaatgaagcttttaggactacccttcaaaga

SEQ ID NO: 20488 - DNA, 1972 bp, Arabidopsis thaliana
ttgacttctgtaacaccttccttcttaggaactacatgaactggactaacccaactgctgtctgaaatcgaatagataatacctgcttccaatagcttaataatctctttcttaaccgcttcttttggattagattcagtcttctctgatgttcaactgaagacttagactcatcctcaaggtggatcctatgcataaatacatccggggatatacctgcaatgtcatcaagagaatagctaagagctttgcgatgattgcgcacttgcttagcaattaggtgagctctacgggattaagagaagcattcacaataacatgataaaaagaattttcaccaagaaaaacgtaccttagccctgctggaagtggtttcaagtcgatattaggagcctttgctggatcccaatctgaattagtagtcggcgttggagtcacagatggaagagtttcttcaatcgtaagttgcatcacatgttcggtctcatctagcaacttagtatatgtagaagtttcactatgcatatctgcactatcttctacggaagagaccaaaactcgctctactgggtcttctaattccatctccgaaatactgtctgaagctgaagaagtcaaagaatctatcaagaaggttttccttctatgatcggtttcttgaccaaagtgttcatatcgaactgcatagtaagatcgccaacattcagccctatccttccttgtcgaacatctatgattactccagctgtgtgcaagaaggatctcccaaggattaatggatccttaggttctttctcataaggcaagactacaaagtctataggaatcatgctctttccaatcatcacgggaacatcgataagaattccatctggaattcgggaacaatgatctgccaacacaagtgtgataaaggtaagctcaagattggagtacccaagacgcatagcaactgaacgaggcatcaaaattcacactagaaccgaatcgtggttgatggtagcatctagtacaaagggtccaggatcaggtagctatctcggaattcgttcatgaatatcgctaccatgctctgaactcatcataacactacatttattcgtcaaattcttagtgaccattgtcttgacataccttcttattgtgggagagagataaatagcttcaactagaggcatctcaacaatcagcttatcaatcatagtcttgcatctgacatcatctaaggcttgtcttgactttttaggactcttggggaaaggaattcgccgatttgctgacttggtttcagccggaatttgcacattgtctgaacaagctgggtgttgatcgacatgggatggggtgtcgatcgacaccatctggaataatttccttctcctctgtgaaattgtcgattccactcgacaaaggcaaaacagagtcatcaagagtaattgggtcgatcgacaccctgatgcatcgatcgacactgagtctttttctacaactggaaaagatgaagtctgagccgaacgttcgcgttgatgaattgggttgagctgctttccactgcgtagtgtgactgcattgatagatactgatgtaggagaaaactcagatatatgagatcgtagattgtcgatcttcccattaagatctgtgtagacagattcaaacttgccaagaatctgcgcaagcatggattccttcggctgtctaaggagggtcgaagggggggggggggcttggataggagcagagattgctgaaacatgatcctctgtgcttgtggttgcaatctcagctgaaagtctttgttctgtgtctacttcatgtgtcaaaagactagttaaagcattggtgatgaggagtaatgcttcactagtggttcttgtcatgaagttacagtagcttgttgcatcgagttgactccggtatgtcttggttattcctctttagaatagattgatgagttggctctcttggaagc

SEQ ID NO: 20489 - DNA, 1841 bp, Arabidopsis thaliana
cggccgcatggtcgagtatcatcatctccatcacctgaccatcactcgatcacacaactcgaccacctggtcgggtacctctatcaccttcactcgatcactctaccaccaagccgagtaccaccatctctatcactcgacttcgtactcgattgccagcttcagattcttctccattccgcactcaacaagacactcgagcacaatgaagggaagaagactctagcttatcactcgaccattcactcgaccacctgggtcgagtgtcgttcttaattcgtcccaatactgtgtcgttttgagtattcgggtttcggaatatttcgctataagtagcatatattttacatttttgtaacaaaacgttttattctgcagacactgtgttcttgacgtttttgtaatccggatatctattaatttattcagtatttgttttttatttcgtttactaagttgttcaccatgttatcatcctgctattactctgttgctatcatgtgttcattctcttcatcgtttatgttctctgcaatgatgtctgagtagtgactaggtttctgaggatgggttagaatagtttagaattctcagtatgctaggtggttgagtttgatttatagatcccttatggattagttattcttaatgcatattgttttttgatcaactggaatttgagcccagacattcatggctctgtacaaaggtattggttacaaggagcgttttggcttaacttgttgattcgtaatgcctgttaggttagctctcgtcaatggtgattgagtctgggactggtttaacttgagggtctctgttgcggtggcatttagatttggttatcgaacttgttttctagggataatttattgagcatgtcaatcacctgtaaactgaggaaacgaaactactcaattaccccatcctcgggactttctcatctaattgatttctttgtttaatctgctttgtttactgcatcttgctgcatgttgtttactttttgcatttcttgcgtgatactcgaccacccagttgtttggcaactacccagttgtctggcaagagactgtgcagtcgagaatccctgttacattttctgtctgttactcgacctgtcactcgaccacacccagtgcttggcaacgagctgtgttggtcgagtgttttaactgtttctgcttgaatttttgttttctgcatgttcacttaggcctactagaaaccccaaaacctattattgcttggcttgactctgtgaactctgattgcatcttgattgctagcatcatacccttttggattgacaacattcagtactacaacgacatgatattgctttaggattaattgatcttaaaaacctattatcaagtagatggggtatccttacatagcgggtgggacccacgataaatggttcttaaagttttcaaaagcaaataaatacgattgcattgcatatataaacaaatgcaatcataccagcactaattcaccggatcccatcagaactccgcaattaagcatgcttgggcgagagtagtactaggatggaagacctcctgagaagttctcgtgttgcatccctcatttttttttggtttttctctttttctttgttaaaaatttatgactgtataacttttagactgtgagtccaaacttgggatgagataccttttcgcaaagctcaaagagagctctccgacatagaggaagggcaatggaataattccattggttttttttcctactccaaattttgaacataaggtacttttttgggccttttcgtgatctatgctatattacggggcaaaaattatatgttcgaa

SEQ ID NO: 20490 - DNA, 572 bp, Arabidopsis thaliana
  unsure (1)..(572): unsure at all n locations
attcttccttctaaagagatcactactattgaaacatcatcgtgataccgtcttcgttcaccttgtggtatctctagcaattcatggaaatccatacctacaatacacaaataaaacatcaattcagataacaaatatttactgaaatcgtttttttcgaatgtatgaatgttcaccataccagctttcttagcagctctaaacaaaagctcttgcacaaggtgttgagctggatccccttcaggttgtaatgtgatgaagagctcaacctctgaaacagcttcttcgtttgtgaagtattggtagagaccatccgatgatagtattagaaaccggtccttggacnctaatctgtggtggtagagagacggtaagcagttgatgtatggagacttcccaacgtaatcaatttggaacatctcaagaagtgcattgttccatttaggctgcaaaataacataaccaaactgtcatcagactgaagatcacacatactcaaacatcataactaaagtcagatgaatatttcatacctgcttaaggaaccagcaccaaacgctcttgtgaccttt

SEQ ID NO: 20491 - DNA, 1280 bp, Arabidopsis thaliana
cacatgtagtataccatcttgtattaatatcgatttagggcctgactgttttaaacgcagcgggtgcggttgcggttgcgggagtttgcggaaacgggcggttgcggtttcaagcgttatcaagcgttttgaaaattccttattgggtagagttttagtaaacccgtggatatccgattggcccggaaattacccgttacccaaaaagagtattcaaaaacccaaacattaatttaacatccaaaatattaattatatttaatcgtaatattatctaattatctaagattataattataaatctaaatatgtcaattaaatttggacctaaatatccaaaacaactaaactattgaatgaataaacaacgatgctatgaaatagttaaagaattacactagctaatgaatgaataaaaggatagatgatagttatgtttgattcttgattttgattttcatcgaatgccataattgagataataaggttacaatatattgattaaggttttctgataaaaataagatatataaaagattagattattttaattatagtgattagaatttgggtggaagccaccattatttaatttaattaaaaaaatattatttttttaacctaaccgctaccgcccgcaaccgcaaacgcttgcgggaaggagcttttgaaaactggcgatttcgagcggtccaaagcgatatctagcggcttctatgattggtgtcaatcgctaccaaccgctaccaaccgcaaacgctgcgtttgctggtggtagaaggatatccaatcaagacctaactctctcctacaacttgacacatcagcacatgagagcttgccacctagacttcataaaataagtaatacataattagtaattaattcaacatatgaacctatcataagtcgaaacttcaaccatcactctttctatattttttaattcaatatatccttttttatttttttaggcatttgggtagagaatattatgagtacattttccggatgtaatcttttctttaatggatttctgagagatgtttatatatgagacttagaaaaaaatttagctggtatgcttcattagttacgttagattaagtgattatctcaaaacggtattacactacgtgaaacgtgttttatctacaaacaaatgtttaagtttatctttctgatataacttaaacacatcatctagagagttagaaccgattttaaaattaacaccaatgatgttttaggcgatgaactatctaaataaatttatgttc

SEQ ID NO: 20492 - DNA, 2062 bp, Arabidopsis thaliana
caattacataatgtaaatgtgtacgtacatatctatatgtctcgtacactgcatattaactttataacataactcaagtgataaattgatttgacagccaacgcttaccaacacaagtatgacattcatttcaactgtaattgccccaaccaaattcacagtagttgttattaaagtgaagaaattactgacgatctctgactatctcatttcaaacatggttaacccgactcttcccgacgatttactctcgaagatagctaagaacctggctgaccaatgctggtccgaccttggtccactggtacgatcaggcactcgtggaagagacattgtctaccgtccggatgtcctcaaagatgccaatattctcaccttgtgtaactcgcccgatgacttccaagctggagggggccacaatctctccggatccgctgatgaaggccgacatcgaccattttttttaaggtgttttgcagctaataatcccacggccgtgtattacgaaggtattcgtgttctaacgcatgaacgaaacatcaatggagccatcaggctcttacagcatcatgctccagtacgagcaaatgcaacacttgcatgcgccattgtattcatatgtgctgggtatgattatatgggcggcttgtttctacagctcttcacccgcaaccattatccattggactcggttgccactcgaattttgggtgatgagttcatcgaggaaataaagaagtttgaccctccatacatcaatacatatggtcctacgttctcttatcctaccagccatggaattagtatgcctccttgcgccttatattgttacatggtatcaggagctttccaaaacgtttgcaaccgctgttacctctggtcgtgtgctaggcgtgttagtcaaatgctatagttattcaattctactttatatgtttgtttatgttatccgctatgtcatgtttcaaattatgataaggcttctactatgttgtttatgtttatgtagaaattatattattgcttaagaaatttgcaaggtgtgttatgtttctcaagttgaatatttttcagccaaattcgcatatgatatttagttcccgtagtaaatataaattgtggatattaaaatctaagcgtccacaactacgtacacgtgcatctaccaaataatacttaaaggtttttggtttatctcggaaaactagatatggacgtacgctagcatgagatatcaactctcacgtacactaaaaaatacacatgcaaacatatgaggtctttggtttgtctcataaatggtgatatttatgaatagacgtacactgatagtacactacagcgtacactgtttgttgggcaaatgtagaaatgtaaatgtggacgtacactaaaacgtacactacagcgtacactgttttttgggcaaatgtagaaatgtaaatgaggacgtacactaaaacgtacacgtctagttttaagttgttattaaaaagaggtttctcataacaacaataacaaattatatatggaatactattacgttgatttgacaatacgaatacacatcatcatttaatacctttgcaataaatacaaccataacttacccaactatatcttcaatgatgcttatttaagtgttggaatttcattttgttgaaacaccttactcctaaatatgccaaacccaaatattcctgatgatttgcttgcgaagatagccaagaaaatggctgacaaatgttggtggtacctcggacctatgttgaaattcggtcctcgtggaagagacattgtctaccgtccagatgtcctcaaaaatgcaaacattttcagcatgtgcgacgatcccgatgacttatacgcggcaggccacgatccaaatgacatcaactccgaaagtcgctatagacccttcttcaaacggtgcttagaagttggtaaccccacagctatttaccatgaaggactgcgtctcgttacacatgagtctgacattcagggagctatcctacacttagagcgaattgcccaaggaacgccgctgcaatccttgcat

SEQ ID NO: 20493 - DNA, 2444 bp, Arabidopsis thaliana
aagaacctcctccatagataaacaaaaaacttcccaaatctttgaaagattccatagtgtcacccaaggagattcttgcacgtaacacgattgtgacctatacctccacatcttccacacttattaggaaattaagacttattatttccctacagaggacagaaaagtattgtaacatttgaattatatacaaacaatatggatatatataacataactgacctcatattccccaactgagtgtattcgcagctttgggggtctcctagagttatatttattttcggaggcattaaacagagaacccttatattcttacggacatccacctccgatggatcgcgtacaaggaggattggttcttggaccgttggtgaccacattcctagcctatgcatctctccaaccaaagatctggattccaaacccctatcatgagcggcagcattgcatgcgtacagggtatttcgattttctgaaactccaagcaagtgaaagtctgttgttccaaggagacgtgggactgtactccatcctttgcaactacttagaaatcccaactcctcccaacagccggaacagacattcccaaagcacctttgaaccgcttcataagttccctttcaaccgcaataggtatgtccccgactaatctagatatttttttcctccttgattcaaaccacctagcaagcattttccttataaatttaagcaatgccacaactggacttcccctagctggtagtaaagcattgttcaaagactcaacaatgttattagacatcaaattatatctctcccatgtaaaatgaaccctactccaattcgcaagacccatttcttctatatatttccaacagcccatactccttttcttgatcctttcacatacattattaaaatatttgagccgaaatgtgttacctgcttgccacactaaagctggaaggccactcttctttccttaccttcctttaacattccttcttatgtggaccaaacaagctccatggtgtgcttgagtgaacacaagactcacggatttgaatattgattgattgcaatttgagacaaatgtcaagtctgggccatctttgattatttctgaaagcttattcatgaaccatgtccatgattcatcagtctcgttgtccactacagaaagctattgggaaaatctaaaagtttgcatcctgccaactagcggtaagaagacagccaagaaacttaccaaaaaggtgtgtatcatctactacaatgactctccgaagatatattaacccttttacactagcccccaatgctaggaaaccatatttgaatcgctcatcaccaataccaactctgtttccaaatgataaattgtgccaggatttgcaagttataagacgtgaagatatactggtaacaaggagaaagagctctcatttgtgccctgagctgtctcaacacccagttctttagctttccaacatccacaatacgtcactccgcacattgtgctccctcaacagagaatcgggtaagtctctcgctcttggcccacagaacgccttcgcatacttagcccttaggaatgcagctataaccttagaagtaacatgttttgaaaagcggctcctagtctcaaccttacacatatgttccgactttgccttcctgaactcatactcttcactgtccccaacttggtgtgctctgactctccaatcacagcattgtttatcataacattcaacaaccaagtaatgtttctcatacctagtaaatttgaagcggaaaataaagtttatggcataaatggacaaggcaatcctgaaatcttcccttgatgcaaaggtccttccgacaaacatattgtcattctctttgctcaagttaacatgagctgcttttgcatccatatcatcatctccaaacattggctcaatttcgtcgtacccatacacttgatcaatgcttatacttttctgaaatgtttccagaaactctttcatagcaccaacattactttctttttgcatgactttctttttagggggctgcttaacaaaatcatcatccccattgtctccatatacaacggtttctttcccagcttgaagcggacctgtagtgtggttatcgtcatcgaactcatcatcttctgattcactccctgtactgagagagaaataatcatcagagtttcctaagaactcatagtcatcacccgacacaagaacttctaccgctatagatgtattcacaccattagttgagttctcactgcttctagggcttctaacagaagttcatcgcttatgccccattcactggatgttttacaacatctgtactctgaacaatagcaaactgagggttgggaggatagacagtggtattaacttgaacagaagataacagaccagcaaagtatcctcttccactgcagcaagggg

SEQ ID NO: 20494 - DNA, 1760 bp, Arabidopsis thaliana
tcgtatcgcagccttaaatcgcttcatcgcccgatcgatggttatatgtcttcccttttacaaacttctacgtggcaacaaggattttcatttggacgataagtgtgaatccgctttccaagagctcaaatcctacctcatgagtggggcgatcttagccaaacccaaagtcggagaaaccctatatctctaagtctcggtgtcaagtttggcggtgagtggggtattggtgagatatgaccgtgggaatgagaaacctatcttctacaccaataaggccctgaatgacgccgagactagatatccgaccttggaaaagctaacattggcagtaataacggccgctcgaaagctttggccttactttcagtcgcattccatagtggttttcaccgatcaaccacttcgaaaagtacttcacagtccaaatcaatccaggcgaatcacgatatgggccatcgagctaagcgagtacgccgtggagtaccgatatcgctctagcctcaagtcgcaggtcctagaagatattatgaccgagctatatccggatgtgatcgacgaggtcccagacgagaattggatactttacgcagatggctaatcatcattaccaggttctgatcttggaattttactccaatcaccaaccggggatatcctagaacagtcacttcgagtccaattcaaagcatcgaacaacgaagtagagtacgaagcacttctggcaggactttgccttgcgaaacgtattggagccaggcacatcaaagccttcagtgactctcagctcgtagttagccagttcagcggagagtttgaagccaaaaatgaaagaatgcgagctaatctttcattagtccacgatctgtccaaacaattcgaccagttcgcgctggtcaaaataccccgaaatgacaactctacaacaggcgctttagccgccctagcctcgaacacgaatcctgacctgagacgaacaattcctgtcgaaagtatagcgaaaccaagtattgagttgtcaagttcgacctgcgtgatcgtagatcccgtaacggccatggattcgaacatagacgcaaccgatgcaccaggaatagaagtcgacccagaaccttcatattggctagatccataaaactctacatcgcctacggagaagtccggcagatcgatgggaggctcgccgtctaaagacaatggcggcaaattacatcatggtggatggcgggctgtataggcgaagtgcgacaagagctttcctcacttgcgtggatcaaaaggaagccaccacaatcatgaaggaaacacacaatgaggactgtggtaatcattccggcggacgagccttggctctcaaaatcaagaaagatggtcactactggccaactatgttggctgactgtgaggcctacgtggtgaagtgcgaacagtgtcagcgacatggcctgatgaagaatgttcctcccgaaatattgcactcgatcacaacgccataccctttcatacggtgggctatggacatcgtgggactaatgcccccgtcggggtctaaaagatttctgttagttctaaccgattatttcaccaaatgggtcgaggcacaggcgtactacgaggttaaaacaactgatgtcgttgcattcatttggaaaaatattagttgtcgacacggtcttccctatgagatcgttacgaataatgggaagcagttcgtctcactcatcaccaggaacttccttgctaagtggaacattcgcatg

SEQ ID NO: 20495 - DNA, 550 bp, Arabidopsis thaliana
tgggcaggaatcagattcataccatttgatgcaagttggcctcgttatccacagccttcttgccggttagaagctcaagaaggacaataccgaaactgtagatatcagacttctcgttcagacgcgaagttcgagcatactctgggtcaatatatccaatggttccaagaacataggttgaagcataagttttggtggctggtatgctcttggcaatcccaaaatctgacaaacgcgcttcgaaattcccatcaaggagtatgtttgatgacttgatgtctcgatggattatcctaggtgtgcagtcatggtgaagatatgcaagtccttgcgcactccaacagctatcttcagccttgtttcccagtcaagcttcaccttcttcccaggccctgcatcatacaatcactacgtttaagtcttccaaaagtagaaaactggctgaaaagaacgtaactggtccaagagaagaagaatagcaaaccatggagaagatccaaagagaccattttccatgtagtcgtagaagaggaggttgccaagggagata

SEQ ID NO: 20496 - DNA, 1206 bp, Arabidopsis thaliana columbia
ggtatacgactcatcgtcggcattctttatcgtcggcattaaaggctcgggcacatctcgccaattggatgtcccggcttcatcaaccataggagcaagggatctccgaacgagaggcggctcgggatcatcgggcagatccaattctcgagcaatatcgacgttggtatcttcccgagccatgaaagaggtcatctgctcgggggcactcaaagaagatacagcttcatcttcagaagacgtccaaaccgctctccatttatagattggaggaaggtcgtctgggtgattcgagtcgctggaatcgacgagagaagcgctcggggtcgaaagaggttgacaggaactaatttttggctcggggacgatcgatgagatgagaaacgaccaaaaatgacaaaagaacgggggagcttcaccggaaaagaaagaacgatatagaaatatcaagatcagagagaaggaagcaaaccttgtttattttcttcgaaaacttcaagtgaactcccgaaggaatagctcgccatatatatagaatttttggaggcgcgtcgggtccgcatcaaacaattgaaacgcgtttaagcgcgtgggctcggaagaaggaaacacccgcgtcatcctcgggaataagcgagaaacgtttccacttcttaaaaaataaaatcggcggcacgcaacggaagtttgaccgtccgggaagatgaagcgacaactaagtctaaagagataaacagtcggcttgggaacctatctatgaagctcatcgtctcactgccaagtcaatgagctgggggacaaactgttggggtcggattccacctaataaaccgagccgaccatgtttaacgcctcggcgaccttgtcgaagaaccatcccgagccaagcccaaaacacctcggggattatgtcgaggaaatgtcccgaggcgacgccaaaaacgcctcggaacatcgccacaaaggattccccgacctgatcttgaagcgcctcggacagcaatccggagaatcacccgaggcggaccttaagatgcctcaggagcgcatcattcgattaacaaagtccgagccactcaaccacaacctgagagccaactcaacccggctcggaggaacatcggatcgggacagaacattcaagaaatgacttaaccaatatgtgatcaaacataccatttccgaaaaacccggaagagattagaa

SEQ ID NO: 20497 - DNA, 1915 bp, Arabidopsis thaliana
gtgtacatatatattgtttcatacattactaaaaagtttctttccgatgataaattctacaggttgaggcggcaggagaatccaaattagtgacaaggatggaagttgaaatacctgagaagacccacagtgatccctcatcaccatttcaagtagttaacaatgtaagctaactcttgcaacaaataaaatgtactatttactgttcaaatgtataaaatttatattatgcaggtcatacgggagtaggataccaaagccgttggtgatttggctgcaactactgatgtggaggtaacaatttgtgtgtttcaattcctattttcggaatagcatgcataggattatatgtgtacattatatagacttgtgtacgttaacttgcacaagtagtcatggaagagccgggtattgtcgaggggtctgtaggaactgaggatcctaacccagggtcagatgaagcagacaagaccgatattcctaaaaataatgtatgtacctattttaaacatagaaaaacgtatgaaactgttgttgacaatcatatttgttaacaggatgaatcagacaatgctgctgctgtcgaagcaaaagaaaaaaaaaatcgtccccaaaggtcccaaaaaaagtgaagaagcaacttgtctatgaacaggatgatgcacatcctcatggttttaaggcaaaaacagttttggtgcccgatgtaccaactcaacagatagaggttgttatcagggctggaaatgtctcatacaaccccctggacatggttgacccttcaaaagtagaggaattcagcaatatcattaaaggaccctctatgtaagtacattatattaaaatagattatttaatatctcaatcatcatttttccaagtcttaaggttgttatcaaatattttttttggatttacaggattcacactctttttcgggtttcgcaaagtgcccaacgagttttttgcgaaccttctaacacctggtgaatgggtcgaaagttcggtacgttgcatttatatacgtacactccttgttataaattgtacatagatgattaaatttttggtggaagtgtacgtacactgatatattttttgaacatttcagcatttagaaatgatggcaacgttgatgtggcacaagaacggggaacagatgatagcaaacagatgtattgtattggacatgatgctgacgcatctacttaccaagcgggtgggcgacttcaagaagtgtattaataagaacgggttcaaatggggtaaatttctgtccgacattgctaatggagtacacgtaaactgtgaacccaatatgaagtggctgaaggatgtcgatgttgtgtatgatccgatgaactggaagggtgaacattgggttgctttgggaatcaaccttaatgaacggctaataactgtgtatgacgctttaatatcgcacacgcgagagtcggctgtgaaggcgagaatgactcctatttgcgaaatgatgccgtacttagtcagagcgatgtgccaggatgtattgatttttccgtactcagttgaaccttttgagtatgtgcgttgtcctaccgttgctcaaaacccaactacaggagattgcgggccttacacgatgaagttcttggagttgcttgcgtttggacaccctttttcggaattgacaaccattcgagaaacagatatggtcttctaccgtcagaaatactcggttgacatctacgagcacagcaagcgtgaggacggtactatgcaatttctttaatcgtccaagaacaatattctgattctttgcaactaattattttgaacaaacctatctttgatatatgattgcaactacatttaatttggagattgtcagaagttaatttagtttcctcgatcactctcttgtcgtacacatcgt

SEQ ID NO: 20498 - DNA, 1823 bp, Arabidopsis thaliana
caacactgagaatatcctcagacataacaacttgatcggagcgaaaccaagcttgataatccggatttgggatagcttcagtgacgccggcgtcttgtggaccagaaactgtgcctgttggagcagcataggcgccattaacgaaaccaagaaggccttgcccagagagaaatgattcaaattgagatttccacaaaatgtagttacggtctgtgagtttcaccgtaacacagtttgagatgttcaaagatggaagagtatagagatccatggattgatccatggctctgataccatgaaagagataatatgaaatcgaaagtttatgtttttattttgctttcggcttaacctttgtgattacaagctatgtctatttatacatctagattgatttaacctagtgtcttcttggtttgcatagctgtcacttggctgttatgtggcgtcattgtcttcacatgatttaagagcttcatagcgattcctcgtcgttacttccgtactgcttggagataatgaccgctctgcaacttctttgcttttgtcctttgttgttgcaggtttccgttgagctatgttgggcttggcttttggattgagcatttgtttcggattgggctttagtggttttgagcccaattccaaaactgtgtcgtttggagctgttgtgttgatactccccctcaaacttggaggaggtgggaaatcgacaccaagtttgaatcggagagattcgaaaggagccttggcgagagacttcgtaaatatgtcagcgagctgtagataacccggtatatgatggacgatgagctcaccaaaagctacctgctcacggacataatgatagtgagttgcaaagtgctttgtccgagcatgaaaagatggattcgctgtaaggtaaacggcagagagattgtcgtagaagagttcgggaagctgtaattgaggaacgccaagatcgcgaagtaaattaactagccatgtgatctccgaggctgtaacagacatagagcggtattcagcttcagttgagctttttgcgacggagtcctgtttccgtgaagaccaggagattagattgttgccaaggaatgtacagaagccaccggtggagcgacgtgtaccgtgacaaccggcgtgatcactgtcactgtaagctcgtagttgacaatccgtgtccttgttgaatgaaattcccatggttgttgttcctctgatgtaccggagaatccgtttgaggtgatgaaaatcagatactgtaggggcgtgcatcttttggcacacgtaattaaccgagaattggaggtccggtctagtaagtgtgaggtactacagcttaccagccaggcttctgaagtaagatggattgtcgaagagctcggtttgattaggggttctctcaggttgaagtggtaacggtgttgcaacaggagaacagttggacattgcggctgtggctagaagatcttctgcatatttttgttgagagagaaaaagaccttgagaatgaaactgagcctggataccgagaaaatagcttagtctgcccaaatccttcattttgaactgcttatttagctcactgagaagacttgagagaagctttgagctgtttcctgtgataaccatatcatcaacatagaggagaagcatgatcacatctttgttctttacacaaacaaagagagaagggtcagacatactgcaaacaaaaccaaagctgagcaaaaatttgctgaacttgtcagaccaggcccttggagcttgtttgagccataaagagctttatgtaataagccacatgatcaggatgagctttg

SEQ ID NO: 20499 - DNA, 1015 bp, Arabidopsis thaliana
tgtcaaggttgcgaaaccacagcctgcaggagcagttggtgggaaaagccgcaagaaggcagcgtggcggcggtttagacgctcagacaacctggggtggtaagtgggagctcttcttggaaaactcgggtgtgtcagggatgcatgcgatccttatgccagttatcaacaaggtccagtactatgacgccaccatttggagaatttcaaagattaagttgcctccaggcgtaccatgccatgtcgtggacgctaagactaacaaggtcgattgttgggctcattcgattctcatggatgtcaacaccggcgcccttaagcctctaggggtatgttcaaactcacgacaccatcttttttttttttttttgggcctaggcctagacacgggttatcttcttctcattaaatagaatcatattatacgaacttgaattaaatatttgcattcacatgtttcatgatagctttccaccgatacatggtgctcatccggaggtctgaccgtaaatggtacattggtgagcactggaggatacggaggaggagccaacaccgcgaggtacctatccagctgtgaaaactgcaagtgggaagaataccctcaggcattggccgcgaagagatggtactcaacgcaagcaactctccctgacggaaagttcttcgtgattggtggaagagacgccttgaactacgaatacattcctgaggagggacaaaacaacaggaagctctttgactcattgctcctcaggcaaacagacgacccggaagaaaacaacctttaccctttcgtctggcttaacactgacggtaacctcttcattttcgctaacaaccgatccatccttctaagccccaaaacaaaccaagtcatcaaggagttcctcagctcccaggtggtgcccgtaactacccgggatcaggttcttccgcacgtctccccatccaactttacgtgaaaaacccaaggtcatccagccgaggttctcgctgtggtggttcaaacaag

SEQ ID NO: 20500 - DNA, 1419 bp, Arabidopsis thaliana
ctggtaatctcatgcggtacagagacgacatcgacaggattcagcgtgaactcagagaacaacaagccacttcaaacacagtaccaatggctaatgaggcgaatgtaatgagttgccatgcaacattggagctggagatgcacctagaaaccaccatcagagagatggtattgtccccccctcttattcagaacaacaactttgagatcaagagtggtcttatgatgagaacatgaccaatgcaaccaaaccacttgaaccacaagaagacgaggagcagcttgtaccggaggaagcattaatcgttccggcgggtcctctaacaagatcaatatccaagaagttcaaccaagctatcaatggactactcagggagctaaagaagaatcaagaagacgtggctcaatcctccttcatagtgatcacggctcaagaggctcggtaaagggttaagtgttgcttatgcactctttttcccttgtcaagttttgtcccaatgggttttcttgacaaggtttttaatgaggcctaagtaacattttcaagcctccctttatcagcccaatttgtggtccaaggcccactcacaatgccttggcccattctctcttttctattcaaactctgcatttattgcttttgttatttccaaaactctttgcatgagcttgcatgagtgtggacttgtgcatgctcttgcatgtctttcttctctcacctcttccccttcttcctcctctcctatataaactcattgtatttctcatttgcaaacattttaatcaaaaaccttctcttttactagtttgatcataatatcttttcaacttgttttattcttagtgtgtaatatctaagttggatccaagctagtagtctaagagtctttcatcactcttggaagtacaattcgttcccctttcattctgctgcatccactcaatctcgtcttcatcccggtttatcgtctttccaccgctttgtcccaaatccatctattattcaccatcaagtacatcattttcaattcaaaatcaacaaagtgagtccttggagcatacatccacgtccaggaatgtatcatgtggtatcagagccactttgttatcaggttttgaagttccaaccctaaacttctgtttttcttctttcagatctccgttcaatcttgcgtgaattttataaaatatttggctcattcaaaaattgtgaaaccaattgcattcgaaccgtttacgagtctagtattcttggagttgttttgataatttttcagatccgtttttatttgcctgtttttggactgttttacttgttaaatttttaatttttcaggtacaatggtgacaagtgaagaagatgaagcgtcatctgcctctagcttggaaaggaggattttgaaaacagtcacatcagcta

SEQ ID NO: 20501 - DNA, 550 bp, Arabidopsis thaliana columbia
tactaacctttgcatccgcctaaacggtatgggttgccttggaaacccctagtgcatgagcatcttgcatagcttagataagcattgtcatcgcatatacaacttgttatgttaattcttctctgggtactagtgtatctttcattgttgtactcttttacactatagcatcccagagactttataaacgaatgattcgtcgtatggataaaccatcctagctcgaccgtactgtatcctctagcatgaagcttttgcggatcagatttattagacaaatattctgccttgtttgtcaagaaggcaactttgcaccctctcgttatggtgttttctattgtgacagccaacaatctgttgaatactaccgccgcgcatgtatgcattgcagcatccaataccattgcagcttgtttcatccataatgctttcatccatactgctgtcctcattacaattcttctcgtagccattgtaattctgacaatttagtactgcaagataatctttgatatgcgtatggggttttgtgctgcagcttgatgtgcat

SEQ ID NO: 20502 - DNA, 1143 bp, Arabidopsis thaliana
caactatattcctaatataaaaataaaagtggcggatgaaaaaatccacagcagataatgtccttcaattcaagtcgtacgttgctttctaccacatcgttttaaacgaagttttaccataacattcctctagtttgtgtaattgattcaatgatggaatcatgaatagtcatagttcagtcagtatataataatctataccttttctttctctatgaatggaatagtttatttacgcgtaaaggttcggtcagaatgaaaatgaattccatattagtttgaatagaaatctatatttatatataaataaataaatatagatttttttattaaaactcttagaatctgcggttctaccttacttacccgcatcacacaaattaaaaaagcaaatagattttttttgaattcggttgaaataatgaaaaattaagtttattcttcttttcatttcaatattttattcttaaaaaatttggatttttaaacagaaagagaaagatggtgtacaaaggcaatagaagattgattctgtaatgactgtactctgggacggaaggattcgaacctccgaatagcgggaccaaaacccgttgccttaccgcttggctacgccccatttcgctttttattcaagactactaaaagagtaatattcctattggttgttcgtcaattcaaaatgaaatatagattacattggtgctaaagttttaacacgtgtagatagcaaataaaacttactttattgatcattacatagaattcaattaagatattgtatgaaaatattatttctttcattctcataagagaataaaaggatttttgattgagtaagttcaacaaagtctttttagactatctttctttattttttccttatataaaaaatatattaaaaactcaatcaaaattaaattatccacaagaacaccaatttttgttatgcttaatatatttaatttgatctgtattttttttaattctacccttttttcaagcacttttttagtcgccaaattccagagcctacgcctttttgaatccaatcgtagatgttatgcccgtaatacctcttttctttcttctcttagcctttgtttggcaagccgctgtaagtttggggatcctctagagtcg

SEQ ID NO: 20503 - DNA, 510 bp, Arabidopsis thaliana columbia
tccctcttggcaccaacatacattgaaatgtctcgaggagacaccggttccaaaaaaaaatcaaatacttggacccggtcgatgaagtctcggacctggtcgacgaatcctcggacccggtcgatgaagtctcggacctggtcgacgatttcaacccctggtcgacaaatcctcggacccggtcgacgattcctcgtactggtcgactattactccgagatgatcggttttgctcgctgaggatgtgtaactcctgcttgcttttaccaattcgttcattagagaatcttggcttctcacaagatcaactgtttcatttagacacacagaaaaaaacaattaagacatttaattatcaaaaattgaagtaaaaataaaggaaatgaaagctgttgatttaccaataggtgtttgaattgttattgatcgcttctgcttccttttccaaaaatggaagatgatgaaacttaaaagaagcaaaatgctcactccaatactcgaacctatgat

SEQ ID NO: 20504 - DNA, 558 bp, Arabidopsis thaliana columbia
agattcccgtccataaggcctagtacgaagcttttggccttcctctaccatttttctcacacgatcttcaaaaatcttccactttattgtttcactgtctgataagattgctgcaagcctcttcttgttaggtctcaatgttggtgcctgaccgtttccgtagtagtttctaaatccagacactaaggatgatagttgactcccagaatcagtcattgcaaagacatctgatgctatacaagctatgaaatctagtgcagctagctgcaaaacagcgtccgaaaacatcgaaatgaagtttgagcaagaacagagtaactcgggaaaaagtaagtttaagattgtttatatctttttacctgagaagagaagttcttgaatggcgcaagttcttgaggtgtaaggagagtttctttggtcgcgatattcgggtacagtcttgttaaaggaagcatacgagaagagcctccatagatttgagatccagctaagtaaatatatgtttttctcttgaatccaagaccagcaagaaccagagttgcttcctctggtgttagt

SEQ ID NO: 20505 - DNA, 1432 bp, Arabidopsis thaliana
ctagtctataatgaaatgtgtaaaatcagattataagaattatggaggaatatagccttgtctcaggtcagagagtaaattatcgaaagtcaagtatcacttttggcaagaaaattccagagaccagaaaaactgaaatcaaaagcaagctgggcatccatcaagaaggtggggcaagtgtgtacctagggctacctgaatctttcaaagggtctaaggtggagactttgaagtatattcgtgaaagacttcactccatgattgcgggttggcagaataacttcttgtctccaggagggaaagaagtacttctcaaggctgtagccatggccctacccacatacactatgacgtgctttaagctgccaaccacaatctgccagcagttatcctcggtaatggctgaattttggtggaaaaataaacgcgactcaaaaggcatgccttggaaagcgcgggaacatctgagcaagccaaagtcagaaggaggaatacgcttcaaagacattgaagctttcaacattgctttgctcgggaaacaactttggagaatggtatctagaaaagactctctaatggctagagtttacaagagcaggtactttagtaaaacagatccactaaatgctcccctaggttctagaccatcttttgcttggaaaagtatccatgcagcacaagagctcttaaggcaaggaacccgagctataattgacaacggtgcgtccactgagatttggcgacaccaatggatagagtcaaaaccagcaaaggttgtgaatgtagtgaaaagagttctaccatcccatgctaggtccgtttcttctctccaatatgttagagatctattggatgaaagtgggagggagtggagaagggacttactctctgcattattccctgaggatattacaaaacaaatcattcaactacggccagggggtaggcatacattggatagagttgcttgggactactctagggatggacattactctgtgaaatcgggttattgggtcctaatggaggtggtgaatcgtagaacgcagactcaacatgtccttcaacccagcctcaacccgctttatgagcagatttggaaagctaaagtctcacctaaggtacatcactttttatggagatgtttgagtaacattatctctgtagcgggcaatctatatcatcgacaccttgtcagggatggttcgtgtcctcgctgcccatcacagctcgagtctgtcaaccaccttcttttcaaatgttctttcggcagacttgtatgggctatatccaaaattccagctccaccagagcgtgagtggtcagattccttctaccaaaacttgcacaaattattgaacataactcagtgtcatccatggttgggtgatgatggactggtagctgggatccgatcctctagacctgcagg

SEQ ID NO: 20506 - DNA, 1402 bp, Arabidopsis thaliana
taatgatcccaacatatctgtcttcaaacaccattttgcaatcgatctgctcacttctcaggttccacttcacacccttgaaaaacacatgtgcatatatgatcaattggcttatcagatcatatctttttgtatcttaacaggatggcttgaacacagtttgtcatggtgtggacactttgaatatcaaaactaatgaggtacacaaagatcttgtttctggtggtttgatcattcaccttatatcttagattgtaatgtaaaaaaaactcatgtttcttcaggtagtacgctttatatcgaaggtgacattgcttgcttcaggtggagctgggcatatctatccatcaaccacaaatcctctggtaacattttctatagactctctttttaacaaagctctatggaagtttcattttaccaattttatcagaagaaagaatgtgcaggatcaacacaacagttttgtgtgtttatgggaaatatccaaaaatgaaactttgattaagtaatgtgatttatcccttgaatacaaaagaaaatgtcgaaattatcacgggtatacacaaacatactgcattagagttttagatttaatagttcaaacagttgcagaaacaaagagattttagtcatagagtacatttttttgctaaattcggttgtgctagtcgcaatgatatttctctaaaagtgatatattatgctccattttaattatcgacatggtttttgtataggtggctactggagatgggatggcgatggctcatcgagctcaagctgtgatctcaaatatggagtaagtgaacaccgaaaaaccgactgaagaaacttgttgacaataaacttatgttttgtatttgtttttggttagatttgtgcagtttcatcctactgccctagccgacgaaggtcttcccatcaaactacaaactgctagggaaaacgcgttcctcatcaccgaggcggtgagaggtgatggtggcatcctctataatctaggaatggagcgattcatgcctgtttacgatgaacgagctgagcttgctccaagagacgtggttgcaagaagtattgatgaccagcttaagaaacgaaacgaaaagtatgtgttacttgacataagccataagccaagagaaaagattcttgcccatttcccgaacatagcttctgaatgtcttaaacacggtctggatatcacccgtcagcctattccggttgtccctgcagcccattacatgtgtggaggagttcgtgctggtttacaaggcgaaaccaatgtccttggattgtttgtagcaggtgaagtagcatgtacaggcctccacggggcaaatcgtcttgctagtaactcgcttttagaagctctggttttcgcgagacaggctgttcagcc

SEQ ID NO: 20507 - DNA, 479 bp, Arabidopsis thaliana
tcatagatgactactcaagaaaaacgtgggtttactttcttaagcataaagatgaggcatttggaacatttgctgagtggtgtgttatgtgttgaaaaccaaacggatagaaagatttagattctaagaaccgacaatggtctagaattctgtaataatcagttcaatgagttttgcaaggatagaggcatagtcagacctcgtacatgtgcctatactcctcaacaaaacagcgttgtagagaggatgaacataacgattatggagaaggtcagaagcatgttaagcgagtctggcttaccaaagacgttctaggctgaagctacgaacactgctagtcacctcttcaacaagacatcgtcatctacaatcgattttgagattcctgataagtgctggtcaggtaagtctccggtttatagctatctatatagatttggctgtgttgcttttgttcatgccggtgaagcaaactggtg

SEQ ID NO: 20508 - DNA, 488 bp, Arabidopsis thaliana columbia
cccttcatttttacactgatgctttgaaccgaactctaggtcttaaaattgattttataaccataaggagctgcttttagaactacctagacaccttttttatgcatgtttcgttatgttttgagatctgtaacacacaagaacgtagattcagcccctgtatgtgtaatcttgaacagaaaactagaccgagttgctcattctgtgatattggtggcagcgtctgttgtcagcttcagtagacaatagtgttcggctttggcagatcggctgtgaggactgtcttggaatcttctctcacaataactacggtaatgttcttctccgtctatacaatgtcattgttttcctttcctccctttttgttagtcgatcattcaatctgaacgctattttattgttttttttttccatttttgcagttacatccgttcagtttaacccggttgatgatgatcacttcatcagtggttccatagatggaaaag

SEQ ID NO: 20509 - DNA, 467 bp, Arabidopsis thaliana
caggacatctccacaagaagtagaatatgaagatgaaataaatgaactgttagagggtcttggtcctcggtacacggactggcagggaggttatccgttacctgttgatgctgatttgcttccagggattgttcctggttacgaacctccttttagggcacttccttatggagtgagatcaactctgggaacaaaggaggcaacctctttaagaagaattgctacagttcttcctccccactttgctttaggtattggatttcctttacgactttttgtagagcccaataaggtttttgaatagcgagattttcttttgatgtacaggtcgaagtagacagctgcaagggttggcaacagccatggttaagttatggcaaaagagtttgattgccaaggttgcccttaaacgtggtgtacaactgacgaccagtgagagaatggctgaagacatcaaggtaataagg

SEQ ID NO: 20510 - DNA, 551 bp, Arabidopsis thaliana
  unsure (1)..(551): unsure at all n locations
cactagaggtctccttcatcagaatctctctttcttgcagaaatatagggagtgcctctattgtcgaagttagcagaaaggtcaatatgaatgcaaagaggccgactctttctcgcgcaccttttaaatcgtctttgagattatgaaaaatcagacctaggacaattcctgaacctaacatctgaaccgtcctgcacgcaaaaagctccttggttctgaaaatgttcttggagaacctatgtgtgagtatcatagtttcttctaatcttgaatttgcaaaatctcttgtgaactctgttgctatgttcatcgttcctacatcagcgacccttgtttgttgaaacagctgttgtagtgtgaatttgccacttttgctctccccttgactatcttctgatctcttctcttgtaatgttgtttgtggtgttaggacatgagctgctcttctgctttcctgtagccgttgctgttttgtgatggattcgattgattcaatggcaaattcaacganntgtttcatggagagagggtgcaaccatttgaccttaagt

SEQ ID NO: 20511 - DNA, 528 bp, Arabidopsis thaliana
ctctcaagacacaccgaagcaaagtgtcccattttaacacatcaaaaacacaacacatcgggttgatccgtcttttcctttgatcgatcttgtatgttgaatctgccacggctttctttgtagcctatcttgtgaattcatacttgagaaaagtaggtttcccaaagtctcaatgttaccttcctcgtcaagtatacgctcctcgtaagtttttattcgtcccactatatctttgaaatggctttgttgagatctaagatttattcaagtgatgctatgatttgaatatacttggctcgtggtagactattaaggagcttcttcactaactttgtttcatcgattgacttccctaggtgatgtaggagagatttagcagttttaattttttttatacttccttatttcaaacttactactttgcatagagttttctaatttatgttttggttctactctatatatagagagccctaagttattttctagacacgttttatcattctaattaataaagtcatagatttt

SEQ ID NO: 20512 - DNA, 1146 bp, Arabidopsis thaliana
accacatagcatctctcgattcgtactttgactggactgttcaaaacaacataaagccctagaatcaaaaacctaaatcgattacttgcaaatgaaattcagaaaattcggaacttacagcgcaagttccaaggatcgtagctacagatgttgacctcgctgatggctacttcaacgtcgcggctagtgtttccttcgattttgttacggagatagtgaccaacgagctcctcgtcgttcggacggaacccaaacccaacttgatcctccattttcactaaaccgtccgatttcaatggtttccgggtaaagagcttcgccgtcgatctctctcgctctctgtaatctgtatttctccgattatgtatttgttttctctggtttggtatatctaataatttggagggaggaagacagtgaagtcagcgtttaaataagacaatttattccttttatttttattttcttaattaaattaatatggatctccggtttaattggtatggttttaccggtcctaacaattttaaagattattaaaacaattgatggtatgaaatttcatgtagtaaaccgagtagtattaactattaagatttattagtcttaatcatattattttttacttatgatggtttagaattttaatcaatgtaagtaaacagagttcagatttaaaccaatttaacaattaaaaaagatttaataataaattttataaaatcggtttgggtgaaccgtggattgaatatcatcctctgtagaaatttgtattccccttttagtattataatagaagaacatataaaatttaaataaatataaatcccgccttataaaggaaggctgggaagctgctgggcggtaataatgggtccctcccaaagcaaaacaaaggagagcaactcgaatctgtcttctagattatgtgtgtgaaacgccaaatattttcatctcattcgttttttaacattaataagagtgtgcttatttttaatcttgaatcctatcgatatgttgttaaatccatctagaaggttgactttttgaatcgctggctaattgttagcttttaattttgaccatgttgttttgcttgtcgcaaatggttcgtggggttgcattttatcatggaacaatgtatgt

SEQ ID NO: 20513 - DNA, 512 bp, Arabidopsis thaliana
atttaagacttcatccattgtttggtacaaataaacacttcaagcgtgtaatgggtaaagcagctcctaaaaggatccaagatgcgattactattgctaaatgcagactcggatgcaaccgaagagacttgcattgcaagtaaatctctggctattgccgataagacgggatacttagagctgttggtcctccaccatcccaagacatcaaatggtattccaagcggattgctctttacaactttcactttctctttcaaacataactccagctcagaacttgtattccaccatctctttgtatagaaaatcccttctttcatatccagaatcattctctaaatccattttgtcaaacaagtcaggttcttctgattttttttccccatgagatgatgtctaagccgtttgagatgatgacacattgagtctctctttggtttgagcattgttgtactcttcaaacaactcctccaaaacagcattgactaatttaagaagctctttagtgg

SEQ ID NO: 20514 - DNA, 523 bp, Arabidopsis thaliana
acatttagtgtttgaaattagtctatgaaaacacaatacttgttctcgactcaaaagaaacagtaggtgaaaggctttttaccttcaagagaatgtcgtcgtatgtgacgttggcgtaaatgagatgcacctttgtcttgtctgttgggttttctagaattgctctggccaccttcacaattaagaaatataacgcgtttaaaacatatacattggcttcaaaaacgatatcaaacgcaaatgtatcagacatacttggaacatgggagtgatgcctgaacctccagcaagcattccaaatgccctaaactgacctggttgatacttgaacctaccctgacaagtaaagggtaataaaacaaaaaaagttttgagattcaaaaaaagtatagaataacaatgttgcttgtgtaagatcaagtaagcaagacatctaacttaaaggtacctttggtccctttacggcaagatggtctccacacgcatctccctgaaatgatgagacatccgtccttgcggatac

SEQ ID NO: 20515 - DNA, 456 bp, Arabidopsis thaliana
attgcttttcttcgaaaactaaattgcatcgaatgtgattatgttctatgttttatttgtgctactttaccatacgaggcaaagtataagcacgacaaacatttcctcacattccgagaagggaaaaaaggaagtgatcaattagactggtgtgaggtctgcgaaagaaacatagtatactcaagaaaagatggcttctatgcgtgtgatgactgctgcaccactcttcatgttcgttgtttgcttggagaagacatgtatatgtcgaaacctggtcacaccataatgaataataagagggaggttcatattcttcccaacaatacccggtctcgaccattctgccatcatcatgatgaagaccgttgtccatacaaagtaattttcaaatggcaggacatgacattttgttcttaacgttgtttgataaagtaaaatgtcttcgctttgtaatct

SEQ ID NO: 20516 - DNA, 850 bp, Arabidopsis thaliana
tcaacatcacatatagcttataagtgccttctaacacccgtacattaaaattaacatccatggttatcttttttttttttatttggtattagaaaagaaatgctgagaacaaaccttgtaatagtctataaggcagagaattttcaaatatatatttcttttttgatatatgaaataataataagtattttaccatcttgtatattcaaatatcataattagtctatattcaaaggtaaatattttatagtaggacaattatattttctgacaactaaaagagatatccttccttatacggctattttgaagccctaaatatttgaaaacctttttcacttttcttgtttgtgtccctcttcttcatcttatctctctctctctaatcttttggctattctcatcatcggaaatgacgcctgccacccagtacccatgcgaccccgaaggtgtatgcatgcgatgcaaatcgatgcctccaccggaggaatctctcacttgcggcacgtgcgtcacgccttggcacgtgtcctgccttttgtccccgcccgaaaccctaagtgctactttacagtggctttgtcctgattgctccggtgaaaccaatcctcttcctgtttccggtgttgcggctggatatggatctgttggttcagatcttgtagcggcgatccactcgattgaggcggatgaaactctctctgctgaagagaaggctaagaagaagcagcagttactgagtggtaagggggtcgtcgatgaggatgacgaagaagagaagaagaagacgagtaaaggaaagaacccatcgatgtgctatctcacttcgagtgttctttctgcatgcagt

SEQ ID NO: 20517 - DNA, 1714 bp, Arabidopsis thaliana
atgcactagaaacgtatgtgtttatgctcaacagatgtccatcaaaatcagttgagaagacaccatatgagatatggactggaaaggttcctaatttatcttttctgaaaattttgggctgtgaagcttatgtcaaacgattgattactgataagcttggacccaaatctgataagtgttatttcgtaggttatccgaaagagaccaaaggttattacttttaccaccctactgataacaaagtgtttgttgctcgaaatggtgccttttggaaagagagtttctttcaaaaggaactagtgagagtcaagtattactcgaagaagtttgagaaccacatggtgatgttccaacttctcaggaagaacatacgttggatctacaaagagtcgtagaacctatacatgtggaacctgaggtacgtaggtccgaaaggagccgtcacgaacccgatagattcgaagattgggtgacggatgatcatactctatttattatagagagtgatgagcctacgtcatacgaagaagcactgatggaccccgattccgataagtggttagaggccgcaaaatccaaaatggaatccatgtcacaaaacaaagtatggactttagttgctttatctgatggtgtaaaagccatagagtgtaaatagatttttaagaagaaaattgacatggattttaatatacagatatacaaagctagactggttgcgaaaggttataagcaaattcatggtattgattatgatgaaacctattctctagtcgcaatgcttatgtccattcggattctcctagcaactgctgctcattatgattatgagatttgacaagtggatgtgaaaacagctttccttaatggaaatcttgaagaggatgtgtacatgacacaacctgaaggtttcactattcttgaggctgctaggaaggtatgcaagcttcatcgttccatttatggattgaagcaaacatctcagagttggaatgttcgttttaatgaggcaatcaaagagtttgatttcattagaaacgaagaagaaccttgtgtttacaagaagactagtgggagagcagtagcatttctggtattgtatgtagatgacatactgctaattggaaatgacattcatttgcttcagtatgttaagaattggattggaagttgtttatagatgaaagaaatgggtgaagctgaatatattcttggaataagaatatatagagatagattaaacaaaataattggactaagtcaggatacttatatagataaggtcttgcataggttcaatatgcatgattctaagaaaggatttataccaatgtctcatggcataactcttagcaagactcagtgtccttcgacgcatgatgagcgagagcggatgagtaagattccatatgcttctgctataggatctatcatgtatgctatgctctacactcgccccgatgttgcatgtgctttgagcatgacgagcagataccaatctgatccaggtgaaagtcactggatagtagtcaggaacatctttaagtacttgagaagaactaaggataagtttttggtctatggaggaagtgaggaacttgttgtgagtggttatactgatgccagctttcagacagacaaagatgatttccgatctcaatcaggatttttcttttgtctcaacggaggagcagtgagttggaagagtaccaaa

SEQ ID NO: 20518 - DNA, 1331 bp, Arabidopsis thaliana
ttttgaagaagcatggagtaaagcacaaggtagccactccttatcatccacagacgagcgggcaggtcggaaatctccaacagggagataaaagcaattttagagaaaacaatgggaattacaaggaaagattggtctactaagctcgatgacgcactatgggcttacagaacagccttcaagacccctattggaacgactcctttcaacctcctctatggaaaatcctgtcatttgcctgttgaactcgagtataaagccatgtgggcagttaaactcctgaactttggcattaaaaccgccaaggagaagcgattgatccaactgaacgatctcaacgagattcgcttagaagcttatgagagttccaaaatctacaaggagcgaaccaagtctttccatgacaagaagatagtctcaagagattttaaggttggtgatcaagtgttgctgttcaactctcgcttgaggctttttccaggcaagctcaagtctagatggtctggtcctttctctgttactgcagtccgaccttatggtgctatcactctagctggaaagaatggagacttcacagtcaatggacaacggctcaagaaatacatgatagatcagtttattccagaaggaacttctgttcctttggatgagcctataaacgcctaatgagtatgaagagtcaagctagagacctaaaacaagctcacttgggaggaagtcccatgcctatctttgtacatatccttaatttcccttgttttttgatgcattttgtagtgttttcaggagataagtatgaagagttgagggaaacggattctagctttgagagaacagcaatacactcgaccacaaagcaatcaaggacactcgacattgttctggcttctccaccccatgaaatcactcgaccacactctacagggaccgaatgacgatgtgatcgagtataacgaatgatgcaatcacaacgtctccatgtcagtaattcactcgaccgcggtgctggccgcaacagaagaagagaggtcgagtatcataagagcggtgctggccgtgacgaaggagcagaggtcgagtacccccagagggaagctgagacacaacagggagattcttcgatggcctgggagcaatcacaggcagctattgacgaccaactccgctcctttttccactgaggtaagcacctcacttcaccattgtaatataccatctcctttttttattttgtttctgtgatgtgttttgtactgagtactctcttccaaatttggtcacatagtggactgtgtgatttaagtttgggggagggctcatgaagtgtgtgt

SEQ ID NO: 20519 - DNA, 1952 bp, Arabidopsis thaliana
catgtacgtaaaatatttacctttcaatactataccgaatacatagttagtagtgtgcttatattattccaaaaatcatgtcttatctcccgtttaggactcacaaatgatcgaatgacttaatttttttctaaatgatcgatgctttttcaatcaagaacatgttcattagtgacactcaaatgcagaaaaagatactcaggttaaagatgactgaaaaattacagttatacctttcatcggatttcttcatgtatatatatttaatttataatgtacgtacacaaaattatttagtggaacgtatatgtacgattcctaataaatatctaaccaaccacaacaacaaatttgatatatatgttagtttcatgtacttttttcatgtgttgttcatacatgatttgaatgttttgattttatggtcaaaaaaaatttgaaccgtaaatatacaaattatttagatatttacgtacatatatacacacacattactcccgtatacgtacacattactccggtgtacgtacacattactaccatgtacgtacacattactatagtgtacgtatatattattacggtcagagtaaaatgaagcaaggcgacgattattggtagtctctatgcgggaacgcattccctacaacaaatcatcatgattagtgacatgtacggtatgtgaaagtaaaaaacgttataaacacattggcaaaatattactcgattatctgccaagatgagacccaggtcgaactcatttattcccacgcatttttgaaacacccagaccacaaaagcgcgtatactccatccgactataccatcatctccagttacgttctcagctatatcatctgtgtgctcaactaattcaccttcgcatcttgtctactctgcacagactctagtgtacgtacattggtacaaaccatgttgacacatcggggatggagcagaggtgggtgtactgtcaaccaaaacaccagtgggttctacgtgaggtacatgtgtactcgtcgacgtacacgatgccaatagacgagtgaattcccctgggggttccacggtttgttgagtgtcattcacgacgtcctccttaacatgaccatttccatattgttccacaatcatgtcaccccatttattgtaatcgtaatcttcgccactaccttcactaccgtctactgtagggtcgagggtacttccacggctttcaccatcggtgtcatcgtcatgtacatccatatcttcgtcctttacattatcctcgtcctcatattcatcctcatcaccttcatctatgtcatcctcctcatctacatttatatcttcgtaaaaattatgagctgcatcaacatttgtaacctctgtctttgtatggcctcccttgccgatagggtaaaaagacacaaacaagttaacagaagaatcgccattacgaatcaacataaatgtatccaggctgatttgattctcaatatatactggagggcgattacttgctatcatatcagacatctttccgggcatccagtaacttattatagggttccattcactaaacttatagctggaaacatcacatattgtacttgccaaatccgtgtacgccgttgtgtctataatacatacacagcgaccgaaacttcctttttcagcttcaaatttccaaccttcttctttgtatatccactcaccaaccataattaatacatgtaactccatacctgcaacataaattcctcaggtcagaccaacattaaatagaaaaaaatcagatctttttgaaggctttcatttatgtcaacaaagacaaaaagaatctctaacaaaataatttatgtacttataaatttaactaaacaaaacatagagctttaatttatatctacaaatacaaataaaatctccaacaaaacaatgtatgaacccagaaatttttaaaaacg

SEQ ID NO: 20520 - DNA, 2269 bp, Arabidopsis thaliana
gtgtgggcgggtaataagcaaccatctagctgagcgggatagtttgcgagtccaacgaatccattggcaggtcgatcgccttagtgggtggcggagtttttggtcggccgaatccattgaatgcaactttcctatccattcacgggcttgccaagggtggccgagttttggccggccaaattttggatcgactgggccggcacgcagtaggttgtccgggtcggcgggcttgctccaggctgccaggtgggccaggtcccgccaaagattggcacaaccagacaggcttcttcaggcggcgctagtcactcagacgagtgtccagggctaggtgtcatcatgactagtgacgggtctaggtgaatgtaacgcccccgagacgcttatgatcggaaaagtcacgggagccccgaaaatgccatattgagaatgatcatcaacatccaaccgaggttcgggaactaatcccaacccgtggccggcgtattgacgaccactctccaaattaaaacatcatttaggcttgccagcccttataatatttaagtgttgtgccgactcggactaagtcattattagtccttactcgtaaatttgtacaagaaacccgatttatttcacaagtataaatattacacaacatgttaccaaacatttataagttttatggccaaggcttagtgccaaaagcatggtacataatagaaacatacttgttttacaaaaggcacaaaactattccgggtttcctattgtccaccacgccctctatttcttactaagggtttcctgcaaaacaagtagaatcatgagtaatctaagattactaagtgagctcgggattccctgcagcaaacattagtttaccccaacccaaatacccaacatgaaacacgcagcatagaatggcaacgaaatgtagcttgccgaagcaactacataaatatgcaatgcattaagactccagttttattaaatcttttaaatagggcccgatatgctgccttcaaatctaataccaaacacacactcccgtgatctcccgcgttacaaccacaaaggtatgcaaccggagcatcactaccaaacgctacaccgtcgtgtagacactcggccagggatagcataagaatctaaagatcacatatgcaatctaatataaccattaacacaattcatataactcatgaaatcaatcaagaatgcatgagaatatgattatgaaacttaaaccattatccagaactcattcacacaattctcggctatgggaccctaacttggatcggacggacggtttaaactcggcagcctctcactcccgctcaatttctcttcacaaatcaaatggggtcgagttgggcttttataggcaagggaatggcgagtcagcctgtccagaaggattagatggtccgtcttcatcctctgcgtttcctggttcgaatcatatcttctatggttcggatggtcgttttagtttgccagtcagtttctggatgaaatgtcgtgctcatgtgaacattagttcctaaaacacgttggatgtcttgccaaaatatggatgagaacttaggatctcgatcggatactatattagcaggtaccccatggagtcttaagatttcatcgatatacttttcatttacaccaaataagccatcttggtcaagcgatccgcgactacccatatagcatcattgctacgtcctggtcttgttggcaatccagtgataaaatccatcgagattcactcccatttccatgcaggaattggtagattatgcaataaacctgctggcacttgatgttccactttaactctttggcatgaatcacattggcttacccattttgccactgatctcttcatcccaggccaatggtaatacttccttatatccttgtacatttttgtacttcccggatgaatgctcaataaagaactatgtaccgtcttcaaaatttcttgtcgtaaacctttacgatcaggcactgtaattctctcattgagtaataaagtgccgtcatcagctagatggtagccactggcatttggttcatctaatgtttttaattcctccacgattttctgcaacttttcatcttgcacttgttcttctcggattcggcgaagtaggtttgcttgagtcacagcttgtaaacccaagggctcaatagattcaccttctagagctaacaaagtcactttctttaattcatcagttaacgactctagatccttttcaacatccacttctactttccg

SEQ ID NO: 20521 - DNA, 1347 bp, Arabidopsis thaliana
tagaggaagaagtcaactacatcaacaacaaccagggtggctacaaaggatacaacaacttcaaaaccaacaattccaacctctcctaccgcagcaccaacattgctaaccctcaggatcaggtgtatcctccacagcaacaacaaggtcagaacaaaccttttgttccctacaaccaaggttttgttcctaagcagcaattccaggggaactaccagcaaccaccaccacctgggtttgcacctccgcaaaaccaaggtcctgctgctcctgacgctgatatgaaacaaatgctacaacagctgcttcacgggcaagcctctggctccatggagatgggcaaagaagatatctgagttacataacaagctggactgtagctacaatgatctcaatgtcaagatgaaaacactgaataccaaagtccgttacttagagggacattttgcatcttcttcagctccaaaacagacaagccaactaccaggcaaagcagtttagaatccaaaagaatatgctcatgctatcaccctgcgtagtggaaaagcacttacaactagggaggaaccaaagacggtcactgaggacagtgaagatcaagatggggaggatttgagtctcgagaaagatcaagatgaccaaccactcgaccagtcactcgagcaaccactcgtccagtcactcgagcaaccactcgatctgccactcgacagcgttactcgaccaaccactcgatctgtcatcccagcagcatcaccaactgctccaaaaccagttgctgtcaaaaacaaagaaaaggtctttgtcccttctccctacaaaacgcagcttccatttcctggccatcacaagaaagcgttggcagacaaatatagagctatgtttgccaagaacattaaggaggttgagttgcggatacctcttgttgacgctctagcgctaatcccagactctcacaagtttctgaaagacttgattgtggagagaattcaagaagtgcaagggatggtggtattgagtcatgaatgcagcgctatcatacagaagaagatcattcctaagaagcttagtgatcctggttcgttcactctaccgtgctctttaggtccattggctttcaatagatgcctatgcgatttaggagcatcagtcagtctcatgccgctttctgtcgccaaaagattggggttcactcaatacaagtcctgcaatatatccctcatcctagttgacagattagtgaggattgctcatggtttgctcgaaaacctctcaatcaggatcggtgctatggagataccacgctgacttcgtagtcctggagatggatgaagagcccaacgcccc

SEQ ID NO: 20522 - DNA, 2329 bp, Arabidopsis thaliana
tataaagcagaaacgtcgcaagctaggtcccgaaaggctaaagctttgcacgatgaggtcgattgattgctcaagatcagatcgataaaagaagtaaaataccctgacaggctcgccaatccggtcgtcgttaaaaagaaaaacgggaagtggagagtatgcatcgactttacggacctaaataaggcatgtcctaaagacagtttcccactcccacatattgaccgactggtcgaagccacctatggatgcgttctccgggtacaaccaaatacttatgcgcccagatgaccaagaaaaaacagcttttattacagaccgaggcacctactgttataaagtaatgccttttggtttaaaaaactttggagctacttaccaaagattggtgaacagaatgttcgctgaccagctaggtaaaacgatggaggtctatatcgacgacatgctggtcaagtcagctcgcgaaaaagaccacgtcccgcaattaagagaatgcttcaaaatcctaaacaaattcgagataaagctaaaccccgagaaatgctctttcggagttccctcaggagaattcctcaggtacctagtaactgaaagaggcatcgaggccaatcctaagtagattacagccttcatcgacatgccatcgccaaaaacggcacgggaggtccaacgactgaccgactgtatcgtcgccctcaacaggttcatatccaggtctactgataaatgcgtccctttctatcagctcctccgaaaggataaaaagttcgattggaatgaggactgcgagcaatccttcaaacaattgaaagcatacctgtccgaaccacccatactcgcaaaacccgaagaaggagaaccattgtacttgtacacggcagtctcccgaaccgcgataagcggcgtcctggtgagagaagatcacgaaggacagaaaccgatctattacgttagtaaaacgttgatagacgctgaaacccgttattcagcaatggaaaaactggcactggccgtagtcatgtcagctcgaaaaattagaccatattttcaatcacatcccattgtagtgattacgtctcaaccaatcagaaccattctgcacaatccaactcactcaggtcgacttgcaaaatgggccatagaactaagtgagtacgatatagaatatcgcaccagaaccagctcgaaagcacaggtcctagccgactttgtaatcgagctcccgttagcggacctggatggaaccaactccaataagaaatggctcctccacgtcgacggctcctccaatcgacaaggatccggagtcggaatacaactcacctcccccactggggaagtcatcgaacaatcgttacaacttggattcaatgcatcaaacaacgagtctgagtacgaagccctcattgctggcattaagctagctcaagaaaaggggatccgcgaaatacacgcctacagcgactcccaactcgtcaccagccagttccatggggaatacgaagctaaagacgagcgcatggaagcgtacctcgaactggtcaaaaccttggcccagcagtttgaatcgttcaaactaactaggatccccagaggagaaaacacctcggcagacaccttggcagctctcgcttctacatcagatcctttcgtcaaaagaattattcccgtcgaaggcatagaacacacgagcatcgacctaacagtcaaacatgctgggatggaacccgaagcaccaccaccgcagctagagctctcgcggcagtgcggaggcaagtgcaacggaagaggagccagagttcaaaacccccgatttttttcctcacagtgttctcacttgcatctatcttttttattgtaagaatattttggaaattataatagatatgctcagaaaaacaagagattaagaatctatgctagaattttttttatttagttctctctcatatgactcaacttaataccgaaaatatcctctgtctcatatccacgggcgttaacaataaaattatcagataagcggtttagaaaactatcgatgatgattgtgagaaatgaggaggcaaaagtgacaccgtcaatgatgatttcatgtcacgtgtggtggactggtggtggtgatgatgataccaacatcgatgatttcaaaagcagtggtggtgttggtaggaaaattacgtcaaatggagacggtgatggaatggtggattggtggtggtgatgatgataccaacatcatgatttcacaagcagtggtggcgttaggtcggaaaattacgtctgattgagatggagatggaaagagttaatgattgaagattag

SEQ ID NO: 20523 - DNA, 1413 bp, Arabidopsis thaliana
tataattataattaggtttcagtaagggttttggggagtttacttcttcgttttctctctttctacttctgcaacaaagagctgatcctgcttatgagagaggggctatcaagtttgtacgggatgtggctgcggctttgggagatgatatgattgtatgtccttgcattgattgtcgtaacatagatcgtcactcaggttgtgtagttgttgatcatcttgtgacaagagaaatggataaggcttataagaggcggtgtgactggtatcatcatggagaattggtgtctggtggtgaaagtgaaagcaaagtcagtcagtggaatgatgaagtagttgagttgtatcaggctgcagagtatttggacgaagagtttgatgctatggttcaattgggcgagattgcagaacgtgacgacaagaaagaagacgagttccttgcaaagcttgcagatgctgagacacctctatatccaagctgtgttaaccatagcaagctgtccgcgattgtgtctctgtttagactgaagaccaaaaatggctggtctgacaagagtttcaacgatcttctagagacattgccggagatgctaccagaggataatgtgctacacacatcactgtatgaggtgaaaaagtttttgaaatcctttgatatgggctatcagaagattcatgcatgtgttaatgactgctgcctattcagaaagaaatacaagaagctccagatttgtcctaaatgcaatgcttcacgatggaagacaaacatgcatactggtgaagtaaagaaaggtgttccacagaaagtgttgcggtactttccaataatcccacgcctcaaaagaatgttcagatctgaggaaatggctagggatttaaggtggcattttcacaacaaaagcacagatggaaagctctgccaccctgttgattcagtaacatgggatcagatgaatgcaaaataccctttatttgcatcaaaggaaaggaacttgaggcttggtctttccacagatgggtttaatccattcaacatgaaaaacacaaggtatagctgttggcctgttttgcttgtaaactacaatctgcctcctgacttatgcatgaagaaggagaacatcatgctgacattgttgattccgggtccacaacagcctggaaatagtattgatgtatacttagaaccacttatagatgatttatgccatctgtgggacaatggggaattgacatatgatgctttcagtaaatcatcatttactctcaaagctatgctgctttggacgattagtgatttttctgcttatgggaatcttgcgggttgtaaagtgaagggaaaaatggcgtgtcctttatgtggtaaacatacagaaagcatgtggtttaaattcagcagaaaacatgtctatatgg

SEQ ID NO: 20524 - DNA, 1268 bp, Arabidopsis thaliana
caagcgtaatgagatgcttcagaaatttatcctcgaagttgaagtcttcgactgttggggtaaagatttcatgggacccttcaaacctttcaacaagaatctctacatcctagtagctgtagattatgtctctaagtgggtagaggctatagctagtccgaagaacgattcagcaattgtcatgaaactcttcaagtctatcatcttccctcgatttggagtgccacgcatagtcattagtgacggaggtaagcatttcattaacaagattcttgcgaaattgcttcttcagtatggagttcagcatccagtggctactccctaccatccacaaacaagcggtcaagttgaagtttccaacagacagatcaaagagattgttgagaaaacagtgggtaaagcgaaaaaggagtggtcttacaagttagatgatgtactgtgggcttataggacaactttcaaaactccgcttgggaccacaccttatcatcttctatatggtaaagcttgtcatcttccagtggaattagagcacaaagcagcttgggcattcaagatgataaatctcgacatcaaatcagctggagaaaggagacttattcagttgaatgagcttgatgaaatacgaatccacgcttatgacaactcgaagctctacaaggaacgaacaaaagcctaccatgacaagaagatccttactcggacctttgagcctaatgaccaggtacttctttatgattctagattgacattatttcctgacaaattgtcttctcgttggacaggtccctacacagtccactcagttaggccatatggaacaatcattctcgaaaacaacaatggcaaaccatttgttgtgaatcgactcagagtcaaacactactgggctgaagctgagattccagtagaaaagcctttggatcttcaggacccacctgttgattaagcaactccaaagtcaagctattgactataaacaagcgcttagtgggaggcaacccactggtaagtatttctccttttatttatttcattcatttgatttctaacttagaatttttgattttataggaatatccagatttaaaaaaaaaaaaaaaaaaaaaaaaaaaaaaaaaaaaaaacgtgttgaccaataacgcgatggtgtcgatcgacaccctcattttccaggtaagtcgttttaacctaaaacttcatcttcttcatttcatatttttctcaaaccgccgaattcactaaaacctccatagatccttcgattc

SEQ ID NO: 20525 - DNA, 569 bp, Arabidopsis thaliana columbia
caccgatgagccaatcggagtttgaagatgacaacggtggagaaaactgacggaagtttacatagggcggagaagatgcgaggaagacacgtggaccgtggtagaaaatcaccacaagtgcacctatcagtgacaatatcgtccccatcaatttggctagactactcctctctttgaaagatactttttccattctttattcacaaaatgaaatttagtgtgttaagtgtttattccaaaagaaggctaagaaataatcaatgatcaaacacaattaatacgcatttatttcattcatgcaaacagccttgtatgatttggaccacaagattgagcaatagtgcgatagtaacttaaatcttcatatcaattgccataaatatagatgccgaaaacctgaattaatgtatgcattgaaagaaagaaagaagaacatattaaacgcatttaccataaatatagattatttacctagttactgataagagtatgagacagttgtgggataggggtaaggcggctagtggtaaagaattggttagcaactatagtgttgaatatagtgaagt

SEQ ID NO: 20526 - DNA, 569 bp, Arabidopsis thaliana columbia
cctacttgccggtaagcctctgttttgattggtagaactgaaagtgaggcgaatcctagcagaggagaagtctcaagcgatgaacacttagcccgtcaatttgagagacaaaacaattctgtgcatgcactaaccactggaatgtttccaactgagacgccaaatttcaccgaaagtgatccttggaggttgggttcattgttccatatgttttcttcttaagtgcattaaagtaacagtgtgttcataacaagatcatcaacttcctgtggtttcctatccctgagctaaaatactatgcattctctaattttgtctaattatacttggttcttttgggtagcaagtaattgttggttttgtgaggaccaagcttgtgcccccattgattttctttttaaagactggctttcttaaacgggattagcagttctcaccgtgttctcatgccatataggaattcagaggtggatccaagctggctgcaaacatggtcagatcagggtgttgatgttgtgggtcctctgcaggctccagatccgttgggctgaggcaggttcaattgatga

SEQ ID NO: 20527 - DNA, 561 bp, Arabidopsis thaliana columbia
  unsure (1)..(561): unsure at all n locations
nnnnnnnnnnnnnnnnnnnnnnnttaaaggaggatggcgagcactgcccggggccaaaatggcaaataaaatagcctaataatccagacgattacccgtaatatgtttaatcagggctatacttagcacacttccactgtgtgtgactgtctggtctgactgagacaagttttcaaggattcgtaacgtgattagcgatatcagaaaagatgctgaagtacgcatggacaaatgcgtagaagcgttcaaaacccaaatcagcaaaatacgcacgggtcgtgcttctcccagcctgctggatggcattgtcgtggaatattacggcacgccgacgccgctgcgtcacgtggcaagcgtaacggtagaagattcccgtacactgaaaatcaacgtgtttgatcgttcaatgtctccggccgttgaaaaagcgattatggcgtccgatcttggcctgaacccgaactctgcgggtagcgacatccgtgttccgctgccgccgctgacggaagaacgtcgtaaagatctgaccaaaatcgttcgtggtgaagcagaacaagcgcg

SEQ ID NO: 20528 - DNA, 524 bp, Arabidopsis thaliana columbia
tgaacaatttaaatgcttgccgtcacaataaccaccgcaaaaacagtaaaataaataatttttcggtaacaaaaaaaaaagacaaagagtatggtgatgtcaccatcatcaatcaaacatgattctaatgatgatgatcattcatcgctggaaccatcatgcggcaaaagtcatcgaagcaaacaaaaccgtcaccgtttccatcaaccgtcgctatcatacgcatacactcttctaacgtgcaccgttcatctccgatcactccaaaaactctgtgtaactcctccgccgatatttttccgttacgatccacgtcaaaaatctcgaacacctctctcagctcctccgtctcaacagagccttcaccggaagtaccagcgacacggctagcaagatcttcaaggctgatacaaccaccgtctccgccgtctacttctcttagcatcaaactcacctcttcttgactcggtggttcatgacttaacctgctaatcaacgccgcgagatctcctctggaaacaaca

SEQ ID NO: 20529 - DNA, 463 bp, Arabidopsis thaliana columbia
  unsure (1)..(463): unsure at all n locations
agttattgatacttacacatatggaaaccaggtggacatacattgggaaaggcacggtgcacttcgtttacagctcggttgcagccactgcaaactggacaaccagctaaccacggagacaaccttgagttcctcgagtcactgcaacagttatgctcgactgttgggcccagtgtaggtatcactcagcttgacttggtgactccatcaacatttgacaaccagtactatgtaaacctcctctcgggtgagggattgcttccatcagaccaggctttagcggttcaagacccagggacaagggcgattgttgagacctacgcaacagatcagtcggttttctttgaggattttaagaacgctatggttaaaatgggagggatacccggtggtagtaatagcgagattaggaagaattgtagaatgattaactanaaataaaagcccgagttattgaatgata

SEQ ID NO: 20530 - DNA, 567 bp, Arabidopsis thaliana columbia
ggtcgtactcagacgaagaagctgacgtcatcatgactcggtcaacaccaagaaactcgttgacgttcgtcaaatgtcggtgatgaccaatggatcgagtctgtcctccgccgccgaaagtagtggagctgagagaggtggccttttggagaagagccgtcgcggaaagagctgccgttggaggcgttgaaagagcggcggtggaaagtgatggttcgatgaaaagaggtgatgacgtgaagagcaaggaggaagatttattgaacataaaatgatggccttggaaattagggttagggtttgtgagattggaggaagaagttgagtggagtcttgcactttcttctgctaatgcatcacaaaacgctctatgcgttatgaaagtgtctttcctgtttataaaatatatatatcacaaacaaacaaaaacaaatattagatagaaacataaacaatatatgtatgtatgatcaataatgatgcaattgtaacattaaaccaaaaataaaatgatgcaattgcaagtagtgaaatagtttggagtggacatacagagataataagaag

SEQ ID NO: 20531 - DNA, 109 bp, Arabidopsis thaliana columbia
tcccttgttcgttgagcgcatccatcaccttgcccgcgacccattgcggcatgtaatggttgatttcgcccgccagttcgatgaagcgggtattcacgccgtattcacg

SEQ ID NO: 20532 - DNA, 341 bp, Arabidopsis thaliana columbia
cagggctcgttgttgaagaaggttctagaatcaatcaaagatctggtgaacgatgcgaatttcgactgctccagcactgggttctcactccaagctatggattcgagtcacgttgctctggtgtctctcttgctaagatccgaaggcttcgaacactacagatgcgacaggaatctctccatggggatgaatctcggcaacatgtcgaagatgctcaaatgcgccggaaatgatgacatcatcaccatcaaggctgatgacggcggcgacaccgttaccttcatgtttgagagcccagtaagtttatttgctaattgactgacttactctaatttctggtt

SEQ ID NO: 20533 - DNA, 600 bp, Arabidopsis thaliana columbia
aataagtctttttttattgacctgggtgatgacatagtgacgatactagcacagagcactaggttagttgattaccgattcacaaagctgatctactcttcttgtcacattttcaagttttgtggtcagttccaaatttctagcctctgccagggacaaagcttttctcaagtcttctgctgcttgttgttcagactggagcgacgctgtaatgaaaaatgttttaaactaacatatccacttcacaaatggtgacatagcgacgatactagcacaaagcactaggttagatgattaccgattcacaaagctgatctactcttcttgtcacattttcaagatttgtggccagctccgaatttcgagcctctgcctctgagaaagcatttctcaagtcttctgctgcttgtcgttcagactgaagcgacgctgaaataaaaatatgatttaaacaaacacatccacttcacaatataagtggcctaatcaacgtatatctactaacttttgatagtgaatatataaaaggatgatctcataagttaaaaacagatacctttagagcttccactctgatgttaatgaattgaatttttcagt

SEQ ID NO: 20534 - DNA, 484 bp, Arabidopsis thaliana columbia
tgtggatcataaggaatatcaaaagggtttttagttggtaataacacagaaggtgcagattcaggcatttgaagaccatcaactatatagttttcttgatccaaaccgaaatagttccgtccaacacagactggaggaacttccatatccattaagctactctcagcggcaagtcggactaatctcctcattcttcttctagtaatcaaatgctctaaccatcttgttacgttccatctcagagtttcctaaatccatcaaattcttttgatcatcctctgtccaagctacaatctttttgtcttcacgtgtagtttcttcttcttcttcgccttctgatgacgatgaacactcgatctcggtgtcgccaccaccactagtcaacctctccgatgggtccacaacgggaacattccaggtggttgaaagagtttcttcatctaagctaggctcaaaggagaaccttcagacacaagaaaaggtc

SEQ ID NO: 20535 - DNA, 502 bp, Arabidopsis thaliana columbia
gagtggagatatatttacaatcatcaccatgcaccatattcatcgtctcaacgtcgaccttttgtttcagttctatcgcagaggagaaagacggtttaaagaggtaaaagacttgataaccatcgcaccactctggaatccaacctatgacttcccacttgttagctctcaagtcgtacccaaaaacatctccgtcgcaagctaccttgttcatttgccacaacaccaaacacttaccgttgtatgccgcaacgttccagcacctcattgtctttttgtgcaacactccgttctggatttccttcactaagacccacttaggatcgataagaatatcctcgagggaataaacgttaatcgattcctccgtcgctgatatcaatgctagttccttctctgtggcctcgaacaagaacttgttcgccaccgcgcttagttctaggggaaacttgattggaatcagccgtgcttgctctgtttctggattaaatgctaaaatgct

SEQ ID NO: 20536 - DNA, 563 bp, Arabidopsis thaliana columbia
aggaagaaatacatacacatcgtggctgcacttaaacaagtactagatcttaagaaaacaagttttgaagatattacgggaagactcaaggtttatgaggaacgcattactgatgaagaagaagttcaagatgaccaaggaaagttgaagtatgcgaactcggattctcatacgagtcatgaacaaggaagtgaatatagaggaagaggacgtggtggacgatcttatggcagaggaagaggtcaaggacgttacaatgaagggagagacacttcccgagtcgtttgttaccggtgtgacaaaaccggtcactacgctttggactgtccggatcatttacttaagctgcaagaaacacaagaagatgaagcaaagagtacagcagaggcagatgagttaatggttcacgaggtcgtatatctaaacgaagagaaagtagtaccaagtaagttcgatgcaagtaatggaggagataatatttggtactcgacaacggagctagcaatcacatgacaggaaatcgaagttattttactagcttagaccaatctattactggaaaa

SEQ ID NO: 20537 - DNA, 965 bp, Arabidopsis thaliana
ccacttctgcatcttctcggacaacgtgattgccacctcggttgttgttaattcaactgtctcgaatgctgatcatccaaagcagcttgttttccacatagtgacgaatcgagtgagctacaaagctatgcaggcctggtttctaagtaatgacttcaagggctcagcaatagagatcaggagcgtagaggagttttcttggttgaatgcttcatattctcctgttgttaagcaactgctggacacagatgcaagagcttactatttcggggaacagacaagtcaagatacgatttccgagccaaaagtgaggaacccaaagtacttgtcattactgaaccatctcagattctacattccggagatctatccacagctagagaagattgttttcctagacgatgatgttgttgttcagaaagatttgactccactcttctccttggatctgcatggaaacgtcaatggagctgtggaaacatgtcttgaagcctttcaccgatattacaagtatctaaatttctcgaacccactcatcagctcaaagttcgacccacaagcatgtggatgggcttttggtatgaacgtttttgatctgatcgcttggaggaatgcaaacgtgactgctcggtaccattactggcaagatcagaacagagaacgaacgctttggaaactcgggacactccctccaggtctactatctttctatggtctcacagagccactggacagaagatggcatgtcttgggtttaggttacgatgtgaacatcgataaccgtctgatcgaaacagcagctgtgattcactataatggtaacatgaagccttggctaaagctggctattggtaggtataacctttctggttaaagtttttgaactcgagccatccttatttacaagattgtgtcacagcttaaagcaaaagacgttgagagttgaggctaatcaatatcagaag

SEQ ID NO: 20538 - DNA, 1242 bp, Arabidopsis thaliana
gttttcaatccatctttcaaggatcacatctaattcgcttcccgtttgcttcatctccttctcatgtccttgcaaatcaaaaaaacttagtgtcggaaaagcatctgacacagtgaatataccgatgaggtgaaagaactttgcgatggcctttttgcattgcattgcctcttcagtatcctccgacgatactgagcctccgcctccaaagtatcgttttcctgccaccattctcacgatcatgttcagagtcatgtcctctaaccagctctttagatcaaccattactggttttgtaccgccattcttgaaccacaaggaatacaaatctttcacacctgcatgtgacaatatggcatcgtatcatataacaatatcgacaattattgttatatacgtttggtacggtagacatggtttttaagaaaagtaattacccattgtgatctcagaaacacggacatgcttgagcatctgaagccgccggttagaaagtagctcgagggttgcgattttacgcatctcacgccagaaagcgctataaggggcaaacccgaaaacagcacaatcgtaacccatgtgctttgcggctgcagtaataggacgtgaagccaaggctttgtcgttcacagtaaaacaatctttagccacctcaaaactgctcacaacaaatgtttcactgctcccaagtcgtagcgacatggctggaccgtactggtcagccatttttcctaaggttcggtaaagaagctgttccttgccactgagaaggtgaagatgaccaatgatgggccacgaccacttggtgcaggagcttttacatgttttggtttctttgatttcttgaaaagagcgataaaaacgaaaacaaggattgaaacaaataaagaaaagagggaagtatccatagtgttttgagagtgcaaaagagatgtgtgttggtgatattttgttttgaatgattgaagagctactacaagaaaactatcccttttatactatgaattaggtcaatagattggtcaaaaattggccatttcttactatgtttgaccaaaagcaagtcgtcaaaagcgcgtgtcgcaaaattggatttggtcgatttttttttaaaattactgacgagtataagtggtcgaacattttgaaaattaaaatggtcgaacttttttgaacatttctgaatgattttcaaccatttatcttaaccaattcttgaccaattatctacttgggttttga

SEQ ID NO: 20539 - DNA, 1065 bp, Arabidopsis thaliana
gagaggttccctaaaaaaacatgtctaccgtaccaaacttatataacaacaattgtcgatattgttaattgtgatacgatgcaatactgtcacatgcaggtgtgaaagatttgtattccttatgggtcaagaaaggtggttcagaaccagtaatggttgatctaaagagctggttagaggacatgattgcgaacatgatcatgagaatggtggccggaaagcgatactttggaggcggcggcgcagaatcctcggaacataccgaagaggcaaggcaatggagaaagggcatcgcgaaattctttcacctcgtcggtatattcaccgtgtctgatgcttttccgaaactagggtggcttgatttgcaaggacatgagaaggagatgaagcagacaagaagagagttagatgtgatccttgaaagatggattgaaaaccatcgacaacaacgcaaagtttcaggaacgaaacacaatgattcagacttcgtcgacgttatgttgtcgcttgcagaacaaggcaaactctcgcatcttcaatacgatgccaatacgtgcatcaaaactacctgcctggtacactttatctacacaaatcttgacgtattttagatggactagatataaatacctaaccaaattgtcttggaatcttacccaaaacttattgtttctaatatagaaagttggttacttggttatatgaacgagatattaactagataggttaggtggaaagacgtaattggaacgtacttaatttttaagagaaatcacttacaacctaaaatgtgacgtggtgaatcgttattagatgataattgtctcttttaatatatgtcataaaatgataataaattgaataatcaggcactaattcttggaggaagtgagacttcaccatcaacccttacatgggccatttctcttcttctaaacaataaggacatgttaaagaaagtacaagatgagatagacatccacgtcggcagagacaggaacgttgaggattcagcataaaaaatctggtatatcttcaagcgattatcaaagaaacattgagatt

SEQ ID NO: 20540 - DNA, 515 bp, Arabidopsis thaliana
atctgctcatagatttttctacatgggtaatcaaatttaggctatttagaatcaactgtatcggaaaaattacatttttgttcatttcttttcatatatagtgtgtgcttaagaaagttcataacgttgtttgatttgcaggcgaataaagtctttatgggctctagagatttcatcagcagtttgcctgatgaggttcttggcaaaaaaatcttatctttacttccgacaaaactcgttgtatccacatctgttctgtccaagaggtggaggaatctgttccattttgtagacagctttgatttggaagactcaacacctatcagaaatgctgatagcttctctgatttcatgaaagatacagtggctctgttaagcaattgtcccatcaagagactcactctcaattcccactatgaaaaatctagtgttaaccgttggattcgcagtgcctcaaacgcggctgcttggaacttaacttgcagcccaatatgatcattatctggatataggga

SEQ ID NO: 20541 - DNA, 990 bp, Arabidopsis thaliana
ctagaggatcccctgaccctgagaaggaaccgcctttagtcactgcaaacacccttctctcgatccttgctgtggattatccaattgagaagctttctgcttacatttctgacgatggtggtgcaattctcacctttgaagctatggctgaagctgttcgttttgctgaggtttcatttccgctttctctccctctgtatcttaactagtctattagatggtggcaaaaatctaaatggttttgaattttgtttgcagtattgggtgccattttgcagaaaacatgatatagagccacggaacccggatagttactttagcattaaaaaggacccaacaaaaaacaagaaaaggcaagatttcgtcaaagatcgtcgttggatcaagcgtgagtatgacgaattcaaggtcaggatcaatggtcttccagaacaaatcaagaaaagagctgaacagttcaacatgagagaagagctcaaggagaagcgaattgcccgagagaaaaatgggggtgtattgccgccagatggggttgaggtggtaaaagcaacgtggatggctgatggtacgcattggccagggacatggtttgaacctaaacctgatcattcaaaaggagatcacgccggaattctacaggtatgaaccatcaacttcattgatttcaagtaaaaccatgaaaacttgtcaaacttgacataatgttttgtagatcatgagcaaagtgcctgatcttgaaccggtgatgggcggaccgaatgaaggcgcgctagatttcacagggattagacactcggtgtactatgtttgcttatgtctcgcgtgagaaacgtccaggttttgaccacaacaagaaagccggcgctatgaatggtatggttagagcttcagccatattatccaatggcgcgtttatctcaatctggactgtgatcactcatctacaactcgaagctacaaagaaggaatgtgttcatgatggaccgagtg

SEQ ID NO: 20542 - DNA, 531 bp, Arabidopsis thaliana
tagttccaagcagccgcgttcgaaagcagtgctaatccaactgtcagcagaagagaatcgatagtggcggccattgagagagagtctcttgatgggacaagtgtttaagcgagcaacagtttgctccaagaaagcagagaagccactagttgatgagtcttccaaatcgaagttgtctacgagaaggatcagattcctccacctcttggacagaacagatgtggaaacaccaagttttgtcggaagtaaagacaggattttgccaagaatctcatctggcagattgctgatgaactctctaggattcatcgaatcgcatgcaaattctggatcacagttttagatatcaagtcctctctaacatatatagccagagttactcataaaccctaattaatctaaactaaataaatcaaaggggaacaaaattaggttggtcaaatatgattcaggacagacacaacacacaaaccttgggagaaatgaagcaggagccaggaggcttggtgtaacaggaagatggaggtggaa

SEQ ID NO: 20543 - DNA, 847 bp, Arabidopsis thaliana
ccaaacttttctagattaaattgtaataagaagaataaacattacaaaagtaggaaatattgtcatacagtggaaaacaatctagataaaatctgaaaaatcactatatgtacgcggtctctgcggcactctggaggaggtacgggaaatcggacgcggtcagtgcaatagttgtagatggtgtatctcttacgaacccatttgagacgcttgtactggttagcgtccaagtcctggaactctttctgatcccaccaacgttttccctgcgtctcgcagaacttagcatttactgaagcttcacatccatcgacgtggaagcctctgtaggacgcgacaaaaggagctttttcccagttggtcttctccaaccctccccttgtggcccagtcgtctgcattccacagactcgaatatatcttcattggttggttgaatggaaacttcaccccaacgtctttgctattcttgaacactcgtatcggcacatcatccacaaagaacctgtatttgtgttacatatacattgatacacttagctgtgaaatgtggagtaaaggataatacttgaggaatgcgaacttacacaatctgatacatgttccagagaactgaataggaatgatagtccttggaaggatcaaaccagaggttgattcgttgctcacggtttccggcgcctcctgtaaacacgttagtctgcaaaatgtaaggctggccagttctgttccctagaaactcaaagtctatctcatcatgttctgagttctgggacgacaactgcacgaaaaagcaagatacaactttcagttagcacttaagaagatgtccgaatgattgagtacga

SEQ ID NO: 20544 - DNA, 541 bp, Arabidopsis thaliana
cagatcttttttccctttacctataccaataacttgtgtaagcatatcaatgcctacagtattctttaaagtgaagacgtaatcctccagtgcaatcttatcttccctaaatgctttagatacctacaaaaacaacacatggaaatctcaagaatctgcattttgattcagaatacaccgcaaccactaactaacgagaagcatattatgtaccttaagcaacgtaatcttgcattcctcggatacatgagacgagatccgagagagcaactcttgttgcctccagcctgataataatttctggccttgaacagaccgtctgcttctggacttgcgtccatctacccatctccggtattcagtagacctgtaaaagctgccgtaatagtaagagagcatatctcccatgtgcttgctcccaacaaatctctgcaccaagacaaggtttttgccaagacagtagaggccaagaagaaacctctcttgctcagcatcttcccaaggttgacccaaagtcccagggaatggatagagggtctta

SEQ ID NO: 20545 - DNA, 512 bp, Arabidopsis thaliana
ggtggatccccaataagtagtaaggaatattgtttcctttgtttctacttagggcgtgttacaaaaccgtatggagatagcggtgaagaggttgtcgagaaactcgggacaaggaatggaagagttcaagaacgaggtcaagctgatatcaaagttgcagcatcgaaatctcgtgaggatcttaggatgttgcgttgaattggaagagaagatgttggtatacgagtatttaccaaacaagagcctagactatttcatattccgtacgttcaacatttttaactcaggttcaaattctccctttcaggaagatcaatgactctgaattttcttgtttctttcttcttatcatcatgctagatgaagagcagagagcagagttggattggccaaaaagaatggagatagtccgagggattgctcgtggaatcttatatcttcatcaagattcaagactgagaatcatccacagagatctcaaggccagcaatatacttcttgacagtgaaatg

SEQ ID NO: 20546 - DNA, 494 bp, Arabidopsis thaliana columbia
ggtctcaaaagagtggacaaaactgagttttagacattgcttatgacgtcgaagatgttttggacacctattttctgaaactagaaaaaagactacacagactaggcttgatgagattgaccaacataataagcgataagaaggatgcgtacaacatacttgatgatatcaaaaccctcaaaagaagaactttggatgttactcgcaaacttgagatgtatgggataggaaactttaatgagcatcgagtagtagcgagtacttcaagggtgagggaagttcggcgtgctcgatctgatgatcaggaagagcgtgtagttggtttgacagatgatgctaaggttcttttgacaaagcttcttgatgatgatggggataacaagatatatatgatctccatattcggcatggaatggcctgggaagacttctcttgcaagaaagctttttaactctagcgatgtgaaggaaagctttgaatatcgagtatggact

SEQ ID NO: 20547 - DNA, 606 bp, Arabidopsis thaliana
ggatgtattttagcgatgagtcatgattatgtattgatgcgtcgtgatagaggttttttgtatatgagtgaattggatattgagttgatagttccggcgtggtttatggctgttattaggggtaagattggttctccggcggccagaagggatgtgatgttgacggcggcgaaagtgacggcggatgtgggtgttaagatggggattgttgattcggcgtatggtagtgcggcggagacggttgaagccgccattaagttaggtgaggagattgttcagagaggtggtgatggacacgtgtatggtaagatgagagagagtcttttaagagaggttcttatccatacgattggtgaatatgagagtggttcaagtgtggtgcgtacactggatctaaactttagaacatgtttgtacttcttgggctacttgtcagttcttttcaagcaattgttctttatacattgatgatgtatcttttcaccaagtgaatttatagtcttttttcatatgcatgacattctatatttcttaagaagaaaatttagtattacataatttgaaagtctctactgttacaaaaggtacatagtagtataaagagag

SEQ ID NO: 20548 - DNA, 413 bp, Arabidopsis thaliana
ccgggtactttcttgacccacatagaacgctatgttccagtatgtgcggaatgccagtggaatccttcctgcattaacaacgaaactatgatctaaaattgcttccattattagtttttgcaagtctttcacaaggaggtgcctgtgggaccaatatctactgaaagtgcagttgctcatatcgacttttaacaaagcgttaagtaatttgacaagttgtaacctccaaaacttagaccactttacaagtaccaatatattagacgaagaaacgacatgactaggtctaatcagagaaaaaaagctttgatgagtagagataaacttgaccatttcaattagttaaattcaaggagtgaagctttaggtaccaatttcaattgcctaatacatactcaggtcaaatttacaga

SEQ ID NO: 20549 - DNA, 427 bp, Arabidopsis thaliana
gaagcttgttcgagtactgtgccaaaatctacgctggtatcagtgaagacaagacagcatactactaaaagtatcctttatgttaagtaattgatcgagccattttaagctaataatcgatcaatgtgaagcttgtgcctatacggtaaatgaagggtcgggtagtagtatggacttttggtctaagagatctatgtttgtttttgtttttccagttctgtatggttatactataagttgcagctctaaagaaaagcttctgtatgttttgttgccttggtctctctttgtaccaacccctttttctgttatttccaattttacactgttagttataatagctagattaataactgacttactctatagtagtgtaacgaaatttatggtcacattaactcaaagttaactccactccatgaacatt

SEQ ID NO: 20550 - DNA, 1991 bp, Arabidopsis thaliana
ccacctgctgtgaattcaactacaatctatctacaaaattctctagccgaaaccgttcaagttttagcatgagacccttagcttcaattgtttttctcttggacactgtctaactttgattcttcttggaattgattaggaaatggctaagaaagttggagaagttatagtaaaatcctgcgtagagaatgggatcacaaaggtggcctttgaccgtgctatttacacttaccatggctttagctgcttcagcaaatagaacacggtctccaattttaagtctttttttgttttgtccttctcagaaatttgcttgtatagaacccatgattgaaatttagattagtcggcttggaacagtgttaacttcttcctttttaatgtgttcatttgttcttactacttatgcatctcaagaatgtttatatcgtctatacgatgataatatatttgaaaatggttgatgtttacaaagcttcagaaggtaagacatcaaatgtgctgcttagttaagagacaggtacaagtgcttgcaaatttaggacagaaggacaaagacagagacgaaaacttcggcgcagtgaaggcagttcatatctgcgaagtatagatgcgatatggttggaagttaagtaactgatagtctataaatagaaaagtgcgaggtatatgcccaccctggagttggtatgtccgcttctatctcatctacctattattagcaaactatagacgttattagttttctgttttttcctattatatactcacttctttaatgtagattctgtttaataaaaacagtaacagacagaataaaatcttgatttcttttttttcctcccattcaggtctcatacttcgtttggcaatgcaatgagggagcagccaaggcagtattgaagggtgaagcagtatctcgtttcttgaccaatcatcaacctgtaagtagatctccactaggatggcaagcaccaacgttacaggcaatgcccgggtccaatgaaggctacctccaatggagccttccaaaacgaaagccctcttgatttcgcgcttcctcttatcatcctacaaatcgtcttggtggttgtgtttacaaggctcttagcttactttcttaagcctctcaaacagccccgagtcattgctgagatcattgtgagtttcctactcaatctctttgtatttttctttttctgttttgatgaaatcacatagcaaaagagactaaaagggatggttctgtagggagggatactgcttggaccttctgcactagggagaagcaaggcctatcttgacaccatcttcccaaagaagagcttgaccgttttagacacactcgccaacattggtcttctgtttttcttgttcctagttgggcttgagcttgactttgcagcaataaaaaaaactggaaagaaatcactattgatagccatagctgggatctcacttccttttatagtgggtgtaggcacatcttttgttctcagtgccaccataagcaaaggagtcgatcagcttccttttattgtcttcatgggtgttgccttatcaatcactgccttccctgtgcttgctcgtatactagctgagctaaagcttctaacaactgacattggacgtatggcaatgtctgcagcgggagtaaacgatgttgcagcttggatactccttgcgcttgctattgctctctcaggagatgggacttctcctcttgtatctgtttgggttcttctctgtggaactggattcgtgatctttgcagttgtggcaatcaaacctctgcttgcttatatggctagacgctgtcctgagggagagcctgtaaaggaactctatgtttgtgtcactctaaccgtggttttagcagcaagctttgtgacagacactattgggataacgcgctgttcggggcgtttgtggtaggtatagtagctcctaaagaaggaccattttgcaggattttgactgagaagatagag

SEQ ID NO: 20551 - DNA, 697 bp, Arabidopsis thaliana columbia
cacttaatattggatctttgctattcaatctttcaatgagcgtaaacatcgccacatgtgactcatcatgaaacacatatctgtcaaaatttaaaaatagaaagactacaaaatttacatgaacaatcttcacaactctccagaatctcaattagagagttttggttattaacctttgtgcccatattgcaacatcacatatataatgtacagcaactcgtcgtcccaatgtttttttgtttgttttctatgtttgacaataaatgagagtcttgagagaaataagaacaaaaaagggtcaagaccgacccaaaccggttctacccggtactgttgctctctgaagtaccctgctcgctctgtcttcgtttctccctcaaactctctccccacatcttagcctctgcaaccgcacgctccctattgatatctcggttcaatatccgagctgtctctctcggtgaatcttctttctctgaaccttctaaatcgaatttacttcccgagccacctccatcgtcgttccttgttattaaccttgcacctctttcatcccggtttcttctactatcatctttacttggatcataagcttggtttgcaagataggagagtgcagtgacaacatctgctatgagaggacgtgtagccgcctgttcttggatgcacattgatgcacagctaaagcttggtagag

SEQ ID NO: 20552 - DNA, 2353 bp, Arabidopsis thaliana
tggaatgatctatttccgtccccacagacggcgccaaatgtgggttctgaaatccacactagagatttgtatttaagattatgagaaaggagtgctagatcttcactgaaaccttgagagttatattgctaagaacgaatggactttaattatgacagagcttttacaatgtgaaatgagatttaaaagggtaaagtgtgtgtgtgccaatgtgaactagattgaatgtgtcttacaagtcgtccttgctcccttatatagatctacgcacgtggtagctccgtccgggatctgcggagatcctcctggatattcggcaggtcagttccgagatatcaggtccgctccgcgaatatctcctcatcaattcctaggtcattattcgcttatctccctgcatcaggtgactgggcttatctggcccaaatacccattcgcgtatgtgggctcgtcagctgcgtaggtcctctacttggtgggcttggtgggcttttgtgggctggcttggtattttcgcaggtggattcctggaggggaatacagctccaacatttgccccccagcccattgagtgagtaggcgaactcgatgagcggacatataggtcaggtaagattgcaaaaatattcttgatgagaagataaatgtgattagatcagtcggttttgaggataaactcaacaatttcgttttaatttcagattcccttaaccgaaagattttgaggagatacgcgagataagtcgctgctgatgtggacggctgagatggagcgtctcttcagcgcaccgcatctgacagtccagatcaggcgcggagaagagatctctgcaatctcgaaaatcgtggtgatgatggcgttaaataacttcccacctctccacttgacgtcacgtcaactcacacaactctcaaggtaacttctctcctcctttattatttaccgtgttttgtactgtagagataagaacatctcgtcttcggacttctggtatctccttcgtttctctggtagtcccctctttctcgatctgccctctttgctgttttctatcatctctctcgtccttctctgtcgaaacccactgatgagcgacttcgaagattccaagcataaatgcaaccacagttacagcgacgatgagagttcgtccgagcactgagtgttcgcgtcgccgccgcgagtgcaaagacgcgtcataattttaggcagaatgggtccaattcgtccgccgtcaaccagagtcgacaagccaaagaagaaaaaggctgccaagcaaggaggaggcacgccgatgacgaacagcgacctggtcaacctccggaggagatgccaggttccggtgggggtaacaatgatactcccaaagccgccgctgcatcctgagaacgtgccgatcaggtggtgctacgcttatgccaatttctttgagaaatgtgccttatttttcccgattctggcgtgtatcctcgagatgctctactatctcggcctcgcctttctccagatgtgcccgaactttgtccttcatgtactggcgttaatcacctgggctcgggaagtaaacagagaattcagctgccacgacctgctttagctctaccaggtgaagaccaatgctaggagcgaccaggggacatactacatcagtgctcgtctcggatctctggtcctaggcagtttgaaggcttgttgagacaccaattgacgatctaagtactttttcttcagagtagatcgtcattcaatcggcagttttgatccctcgaggataacgtggacctggtctaccaacctgggtcagatggagaccttagcctcttaatttttttgttgtttgtgtcgaattcgtgactgcttttgcagaacgttagtactgaaactaatgtttttatttttctttgatggtttgcagcaaggaccatggaagttactctcttagagacagaactcgagctgttaacccttctccgacatggtcagactgactgggcaacttttacgagagatctcatcgtagctgctctttccgtagctccagcagttctcgtagctccatcagttcccgcaatcgtctttacatcagcacagctagatccgatcgaagaggtcccgcgaattgaaccgatctccgaggcttatctgcctataggtacgagttctgttattttatttttaatgtacgagttatcgagacagccgcgcaattcgagctgctagctaacacatgtcgtgctttgtctattcagttcctcctgactccagctccacttcagaactcccctcattagaagaatgaggtgtcaagtcttcgtgttcacgagcaacgccgggactcctgcttgggctagt

SEQ ID NO: 20553 - DNA, 2212 bp, Arabidopsis thaliana
agcgagacggactggggcgactagacacgattctgatcatgacctgagaaagataggggtgagtaaggaattactcggtgagggcagcgttggggtccacttgagatgcgagacacgagggtgcggtcaagccagactcaggaatcacatagaaaatgggttggtcaaattttgcacgctctacgatttacaatctcagtattccgcccgggacttttggctccttgaaatatcaccgtcaactaatatattctcaaaatgactaaatgtacttttggattcaggtgaaatactacgcctccaattgaactagtgattaaaccgggattaaccataaacccgcgttcgttgtaccgcgattgcgattaatccaagtaatcacgcatgagccgattgagaaacgacatcgttttctcattttttcaactcttcgaaacataaggaaaacgacgtcgcttcatccacccatttgaacaagtgcgactcattttccctctaacataacataatttccaatcaacattaactcgtttaatcaacaattttaaccaatcaaaatgcatacttgtaatgcaatagcgcatttgtaaaatctacggtatggattatcctttgtctttgatgtaaatgtgattatctcttccccacaccagcatttcgagggcacaccaatgagacaaagacgacgcccagagctggaagcacttgagtagctcgtggtgctcatttttttagatttggtaactgaagaactctaaacccccaaaattcgattttccccttcctctctcaagaaccctaattttggtctgcaacaatgactttatcgattcgaatcgatttgtttagaaaataagagagaaaacaacgtcgtttctcagtcgagtcatggatgattattcggattactcgcaatcacggtacagtaaaggcggatttatggttaatcccggtttaatcactggttcaattggaggcatagtatttcacatgaatccaaaagtacatgtaggtattttgagaatatattagttgatggtgatatttcaaggagccaaatgttcaggggagaatgttgagattgtaaatagtagagggtggaaaattcggccaacccatagaaaatagacaccacactcatatagtttgcatcactatataaaactataacacacaactcattcttgcttaagcaagatctccacatcatttccaggttcgatcatttacctcacctttgaacctatctagttccactggactcgttagtcttttattgagctacaaagaacccgtcaattcaatgtagaccattttccactgttccacttttcatcatctcaaaagatgttgattccacgttctcatataacacatataattaactgttatcacaagtacaataattcaatcatcctatatttctagaacaatcatcttatcatcaatcctaattaacaattcattattactaagcaaacagatctattcctatgcaatgaatcatgaagcataaacatagaaacttgtaatcgaatctccgcagatcacaccctcaccttagcaactcggaatgggacacaaactgggagaaaaaagttgaagatgcctagacaatatctgaaacttgcagcagaagaaaacagcacaaagacaagttagggtttctgtagttttgacaaaacaactgattctgctcaacaagcaatcaacatggcaggtagggtatacctttcctagtgacgacgaagggttccgtgtcttacctaacacttcctctatcggtatccactgtcgtcttgtccttagctgatcagatatgaccggaatctgttctccaaaatggcaagttgaatctgaaatctgatacttagttatttatgggttcagaaaccgtgacttttgtccaactttaaactcgaattgtggatagagtttacctcgtaacagagatccgtttgttgctgtgtgttcctcactgtgagatctatccaacaacaccaatagcgtgatctggttccttcagatctgacgggaaaccgctcactaataactctacttggactgatatctttcttcctgttctttactaaatattcaaatagattgaatgataaaccataaatcctcaaggaactacacataatatcatgagaagagatcaacatgaggttaggatccttcccaacaagccgtgacaaccggtgatgac

SEQ ID NO: 20554 - DNA, 2560 bp, Arabidopsis thaliana columbia
tagaggatcacacaaagcgatatttaattattggccaaaagactatgtttttaagctacatattttctcgtcaatctgtttaagccggtggtaaatatgggtgttgggttggatgtacctttctatacgcctattccaattcggcaacctttcagatacagggaaagctcgttcggtatggcttatattctgtgaaatgctgcaggtcctgggtgctgccatcaatatatatgccaacaagcacaaagagcgccctgaccgtctcatcgacatgttaacaagcagccatcggtaagatattttactgttataattgttttcatatttttccactatgatccagcccattgaaaatagtatcactcgttgaataatcatatctcatggagtcactctatgtcagagatgtgctcatgtatgtaataaattgaatcgcactgtacaattatgcgggatcattaggctgatacacgtctgattgtaaacgagtgcagaaaggtgctggcttgtgtggtatgtggccgcctgaaaagcgcattccagattgcatctaaaagcggaacgtcggctgatgttcaatatgtagctcatcaagccttacatgccaattcgcacacagtactcgatatgtgcaagcaatggctagctaaatacatgtaaagccctgtaatctacacgataatagaagccaacataaaaactcgaggtatacatcttttatttttggcagattagcgattgttcttgcctcgtatttgttcctggctaaatttttcttgcaaaaaaaaaggaaaaacacactgccttgtgaggtttttgcttgaaactttgggagcagattgtttaaaagaacatggagggaaatggttcagtctctcataggaagatcattaactgatgattcgcacatgtgagattatgggttttgtagctgctggagttcctcttcacactcccactgtcacagcaaactacattgatatggagtacttgaagaggaaatgctacttggatagatctgccccagctgatcaactccatttcaagttcaagcaccccacgctaggtctctctaggttagcacttccttgcaaggagtacatcacagttagaattgggaacaacattgactttgatcctccaccatcaatcttagtcaatgtccttgcgcctttacaagcagagtcgaacatggggagtgagtcacaagaagaaggagcagagttcaaccaagaagaagctgagcaggaagcttatactcggccgagtatggccagaccgaatatgaacaagctgagttcagtcgagctgaacagtttgatgagcaagaagactcgtgtgaagctgcagtggagcagtatttctttgaagattatgatgagtccgatcaagagagagatcccggtcaagtccacaagaagctgggaatgcacaagggcctagggaagtttcagagaaagttgatcagtgggttgaagaagaaggtgagaaagatgaagagggcaatgaacggcatggcggttcagattcaggagctgcaaagaagacagagatcgccaccacctccacccgagttcaggagatgtaactcaacgagtgtggcaccacaaagggacgttcgtttcaccccgccaagagcctcaaattacaagctcgggagaagctccaccttctcagatcgttgtttcaacaggcgcccacccggtccagtgaaccgattggttctgaatgctgacccgagccgagaggagtactactcgggctacatgctcgaccggccaaacgagtacaaccccaacacctccacccatgatcatgagtacacacaagaccgcctggacgagtttgtccagaaccttttcgtctgaacgttgaggtatcactccatttcactgtatatatcattgcatttcttttatttctttctttgtgtggttatttctcttgaattctcctttgaatttttattacacaagggactgtgtaatttaagtttgggggagagttcaggatgtatctaacattgtttcatgttttcttattcaaatttttgcatcatctaaggcatagaaaaccccataaaaatttgaaccatttgcgaaaatgattccaaaaaaaatagagtgtcatgtagtttgcatctgcattatagggctgtttttagaatgtactcatataagttgttgtattttgcacttgcataggggttaatgatgatcatagccttctaaatttgcaatgttcactagatagtttcattgcccttgttgttagctgtctagtgcttaaccgattgaacttgaagtaaaaccgcaccatcttttgaattcatatatttgatcttccttagtcgaaactcgctgtgatttgaagctattccctatcaatttgaaccataatttgacttttaattatcatattatgcattgcttgttaaagtcatgattacccttaaaatatttggatcttcttattcatttcaccactcttgttgatccaaatagctgaccctcacatttagagcagttttcccacaccctaacctaagcttctttcaagc

SEQ ID NO: 20555 - DNA, 1699 bp, Arabidopsis thaliana
ttctccggaagtcacaccgaaagtgcatttggccgggtcaacttcatattctatttgttcaagacgtcgaagcattattgcaagtgagagacgtgttccgcatcacaggttgattacaagcatgttgcccccgaaaggcatcaccttgtaacaaaatgtctctcgatctgtaatgaacaccgtcttttttttatcattcttgtgcataagtatttggttataacccggaaaagcatcgatgaaagacagtaattcgttaccggcggtagcttcaacgaggtggtcaataccaggaggagaaaactatctttcggacatactttgttgagatcagtgaagtcgatgcaaactcgccacttgccattttttttcttcacaacaacatgattgcttagccaatcgggatacttcaacaattgatcctacctcgagtagttccaaaccaagttgcgtcgtttttgtttgatcggtttgaatgtggaatcaacgttaagttcatggcaggtaatatccggtgtgacacccgtcatatcttccattgaccatgcgaaggtcatgacattctagcttagaaactgtacaagatcgtctttcaattgttgtggtagatcagcgcccataccaacacattgaagaaggtcagttgcaacaatgttaacttggattaccgactcagtcctcgggactatgcgttcatctcgtaaaggaccagtttgaccttcgttatgtgtctgacacgaacttccgagatgcgtaccgtgaaaggtaattgttgtgtttcttcaaatactttttctagttccggagcaaagctaatggcacggtgcattttggattacatggctttgatgaccatgttcatgcgctcgatttccaggtcgcgtgtttggtcgacgttatcggaaggtcggttcaacaaactttggctgctcggtaggatgcggttgttcggtaggctctcatgaggttgcccgccaacagattctacgataactgatgtcggtctttgtcgtcggttttgagaacgttccgcacctggagtttggggagatggcaatagttcgtgatcatcgcgaggctgagagtcacgtcttcggtgtcgtaggcgctcgatctgactttgggaagcaatttgcgttgcgacaaggacatcaatttgttttgagaacgttccgcacctggagtttggggagatggcttcgtgatcatcgcgaggctgagagtcacgtcttcggtgtcgtaggcgctcgatctgactttgggaagcaatttgcgttgcaacaaggacatcaatttgtttggtcgttcgtacgtcccgaccatcgagtcaatccaagattgtttgcacgaggtcatccagatggaaacccttgttcgcaggtgcagtgtcgccgccaagcgcggtgtctcccactgctgctgctactgcggcagggcgtggtttggcatgtgcgggattcaagccaggttgagcgagtgttgggttctctggttgcagttgcattgcgtcaggtgctggctgttgttggctggcgtcggacccgtttttacttgatgtgtctatcatgtcctcttctgttttgtggatcgctggggacaattatgttactcgttctcattcggtgaaaagaaaagttttgaacttgccctacgataggcgccaattgtttgtaccgaggttgtaatacgaataagtaag

SEQ ID NO: 20556 - DNA, 589 bp, Arabidopsis thaliana
aaaatttattcacaaaaaaaagacggttttacaataaatgcatcgtttagccaaaaaatttaaaaactgaacaagtacaaactgaatagaagatctaacgacaatgagtgctaaaccaatatcgtagcccgctcttgtagatgggtgaacctgaagtagccaaagtactcaaccgattccgcatattcttatcgatcattttggcaagagaaggagctggaatgggtgactcgccatgccttctcccatttctctctttccaaagactgtgagtagtgagctgaaacacatatcggaaaacaaacatgtgaatttgcgtcaaggccgaacttgtagatagatcaacaagagagtcccaacgagtcgtataacgtgaacccaacatatccctcgtaagagctgaccaagcatgagaggagtaagagcaagagaaaaaaaagatgatcccttgtttctacttccgtttgacagagcacacaacccccctgtaagctgtcgccattccactttaataatctgtgccccgtagctagacggtttcgaatggctaaccaaaacatgaatgagagtttaggaagtggagttttga

SEQ ID NO: 20557 - DNA, 1971 bp, Arabidopsis thaliana
actaaagatcgataggatgccaattccgctgcaaaagtcggctaatcgtcttgattgtcattgatagaaatcaggtctgaatagtcggaagcaaaagcgcaagaagtatcgccaatagagatcatgcattctattgtccatagcaaggaatcaaattctgcatgaagcggtgataagttcgccgagcacttttgaggccaagatgaagaactaagtcttctcgaacaagggccgatccatgtccgcttaacgggtcttctgcatgccaagaggcatcaatttaacattcaggaaacaaggagagcgaaatctgagaaatatatctaggaaaggagttaagcatatgggtacatcttcttttagggttgcttgtttccaaacagctgcctccttgagtgccaaagccaaagtttcaaggggaggttctctaaagttctcaaacacaaaacgatttctacttttttagatataccaaattatccatggaaatactttcaacacctcctttccgattccaaattcatggccacgccagaaaaagaagtcgaaattatagaagagggaatttctagggaaaatattccctgaagaaggaataggcgatgatgcccaaatctgtcgcgaaggtggacaatgaaagagaagatggttaattgtctcttcagcttctccgcaacgggggcatcctttatccgtacccatatggcgatatgtcaatctttggcaagtggctagacagtccgagatacattgctacgcgaaatgcataagcttcagcgtagatttaagcttccatacttgtgcctgaagtgccgaaacacctgctccctgaaaaggggggtcacaagtaggacgagatagatctctcgcggcccaatatcctgacttaacggtatgattaccaaatttagtgtgagaccagctaaagccatcactcaagtaggtacggcttgggcgaatccctaaaatgagtggaatatcaacgagatcaaccaatgcttgaagacggtctaatttccacatctttgtattttggtcgattaaatcattgacatagagtaggggatctcttatgtcaagaatgctttttgtcggccgcgcagggatagtgggaatccatggatctttccatacgcgagtcagcattccagaacctatggtcctccgaagtcccgagacaagaaggggtttggtgccatgatacttctccatccaaaagacggacgatttgatgcgctgatatgtaatggatcactatatcgaaaatatctccccctcaagaccctactcaaaagagagtttgggaatcggataagacgccatagttgttttgccaaaagagctagattaaactcttccagtgatctaaaacctagtccaccttcagagtgtgggttgcaaagcttatcccatgcaatccagtggataccattactattctcattagtttttcaccagaaatttgcaatagcactactcaactttgagcgaatagccttagagagtaaaaaacacgatataacatatgtcggaagggcttgtgctactgactttataagaatctctttgcctcttttggacaagaatttggctgacaaggtattaagtctcatttggagcctatctctcacaaaggagaaaacttgggttttagagccatgaattttctcaggtaaacccaagtaagagcccatgcccccatcatggtggatacccaaggttgattttatggtactccgggtcatattgtccacatcaagaccaaacattacagacgacttagcagcatttaactgttgtcccgatgtctcgccataaatgcggaaaatattgatgatgtcttgaccttgagttggatcagcttgacaaaaaataagctatgatctgcaaacaggagatgcgaggtgaaaggacttgcgcgtgagatttgaagcccttggatcatgctattccattctgcatctttgagat

SEQ ID NO: 20558 - DNA, 2049 bp, Arabidopsis thaliana
gactacatgttgtagtcgctaacaagttaggtgtgtacctacttagcaatgcgaaacacgttttcaactgcttcatgcgactcgtttgcgactcggttgcgacgtagtctcaaatagtcgccaaatagacgactaactaaagtagtcggaaacgtagtcgtcaattaccgactacgtgacgactaatttctcacttcagaaatgtaatcgttaaatagtcgtttaataacgactatcgtccaactaacctagttagtcgtaaatggacgactacttcacgacgaattttcttgttgttgtatcgtagtcgttaaactgtcgccacattgtcgcaaaataaaacgactacacatattgtcgttttacgttgtcgttttttgcctgttttcttggtggattagaggaggatatggaatcggaagaaattagggaaggctgggaatcaggccagaaaaggaaagagtgttgcgcaagggaaggctggtaatgagataggtttgctagagaaaggcaatggtgggccaagagcagtttttaaaagtaaacggactggagggggaaagcccattacatatgtggggtcaaaaacataaaagcttgactagtagtaggcccacgcgtgcacttgtttatggcccagtaagaggtgaagtggaattgtcggcttctgcgaaacgacttcgcgtggagaaacaagttgccgggtgagcaggcggtgcttttgcgaatgaaagggagttaaatttggtgttagggaaccctgagagtggtcgcccaactgagatcggtcacccaactgagaatactagtgaactatcggtttcgatggtaaaatcaaaccgagaaatttctttgtagagggaaccgtcgaagaagtggcggacatgtcggtggcatagcaattttcgccggcgtttctaagcttaatttacatagaatcaatgaattgcatactatggaactgccgggggcgaataaacccaactttcaacgttcaattcgttacattttgaagaaattcaagacaaatatcttggctttgtttgagactcatgcgggtggggatagagcagtccacatttgtcaggggttaggttttgataactcctctcgtgtagactccataggtaagagtgggggcttgtggctcttatggcagacagaagtgggtgtggtgacagtggtggagtcatcagatcagtatattcacgcaacagtgacgaaggatgcggaagtggttcacttaattgttgtttacgcagccccaatagtcagtagaaggagtggactatggagcaggttaaagaacgtggttgaagggatcacatagccactttttataggaggagactttaatacaattgtgagagtgcatgagagaaccggtgggaatgagctttctttggtggatatgggttttaaaggcaacaggttcacttggagacatgctcgagttgagtcaacatacatcgcaaaacggttggacagaatcttgtgatgtggtcatgcgaggttgaagtggcatgaggcagtagtgactcatttaccaatcatggccttggatcacgcgcttctctatttgcagttaaatccagaggtgtgtgggatgttattaaaactcgatctggagaaagcttatgatcggattagatgggatttcttggaagatacgttacgtgcttcacgacttcctgaatcttggatatggtggataatgcaatgcgttacgggtccttctatgtctcttatgtggaatggggaaaagacagagccgtttagaccatcccgaggcctacgccaaggagacccctctcaccatatctctttgttctatgtttggagaggctgtgtcatcaaggtggaagttgcggttgtaggtagagagtagattctcattcacttttctcgtgggggaccaactttatcgcatatgtgtgttgccgatgatcttagtcttttgcgtgaagattcggtggctcaaatacgagtgataagaaaagtcttggaacgattttgtaacacggtgaggcataaggtgaacttggagta

SEQ ID NO: 20559 - DNA, 1871 bp, Arabidopsis thaliana
gaagttttcccttcacacgacctcaggttccgcttatggcgatctcgattgtcgacctaaatcttctggcgagctcatgacttagttcaatcgaattctcgattttattcacgttatcctcgggaaatcattttccgccgcttgcaagaagaatcaaaggtagctctcgctctctcctctgcgaattattttgtactctcgattctttatcgatttttccggcaatgggtaaggttgttcttgtctctccgtcctcttcttcctccgagagcgaagcgtcattagttcgccgaaactctcggttaaccgggaatccaagtgacgaagctcagtctagtcgatctaaccggatcgagatcccgacgttgcttgatgagcccgatcgggaaggttccggtggacatctcgctgctcctgaagatccggcggatttcttggctcagttcgacccgctcatcgacctggaggatgcttataacacgcagccacagtatacagaggccgaagttaatgcgaattacttcatgaggatcatgtcgaatttgacgtcgactcagtggttagctggaacaccgagatcgccgcgaaaaagaccctttcaacaactgagtcagtcgcggaagtatttgccttgtgtggctccggagatcgcccgctcacttacatgattcccggagaaaatgagcgtccgtggaatccccctcgagggtacgtctgcatgtatgaagcctacttcagacaatgtcacctctggtttcccattccgtctctgatcatctcctttctgaatcgtcgtcgtatggcgttctcccagcttactccggcggcgatctgtagttttgttgccgctctgaccttcggtgctgaagaaggttacctggtaaacgtccgttgtttcgaagaaatgacgacgttgaaagctataaggtcgcccggctattggctggtgaacaaccgcccaaagcataactttcttcccggggaggaaaaggatgtggacggagtttcctggtagatttcttttaaatagatagggtaaagatatgtcgatcccaactagattctcatagctttttcttttgttgcagatcgatacaggcctagtccggattttcattgctgatggggacttcattcccaggacgccttctctattctaccttgggccggctgctactgatgctgataccacggagtgtcagaacttcgtcaaccaaggattgctttggtttgtgttttcgatatcgggatgttttttaagtatttcgttgcttggatttctcaggtcggatttctgcatcaggatcaatgccgcgagctgcagtactttcgaaccaagaaacgaagagtggacttttgtctcgaggagctcgaaactctgattgctaagctgaagaagaaaagaagaagggtcgtcactcgtctggatgaggtcgaacaaacgattagggcattggacattcgttcggaggattgggagaaagctggtctgcaactagtgtggcccatgcaagatcgccttcttctggataatcgcagtttctgacagggcgatctaacgttcgaataaacgcccttgtgatagctggcgaccttgtttaactctaatttattctggaataaatgtctttgtaatagctcccgatctcgtttggtcgttgattaatacaatgcgattttattaaattggcttatttcctccgcgaccactgaggtcggcttttgagttcttttcgaacgcaattttttctaattggattagatgttaggtgcgagactgagcccggcttttgagagaatattcagcgtgtgctggacgcgagacgtctctcggcttatgtccacaggcttatgtatgatttaaagaggga

SEQ ID NO: 20560 - DNA, 494 bp, Arabidopsis thaliana columbia
cttaaacagtaaaaatataagcacaatcactcacgcgtagtcaagtatgatcgaacctaaaaaaaagtagttgggaactaaccattacgccatatacgtcagaaatgttgaaaagctcagcatcatttccagagtcaccacaaacaagtgtgttagaaggctgcttggcttcaatatccaacttgtcaagtagatatgtcaaagcaccttgtttgccagctcctcttggtaatacatcaaaagcatatccattactataaaccagcttcacatccacctataatgaattttactgtcatcagcaccataagtaacaatctatgataagactgtagccatcaagctcacataaagagtacacacaaaaatctcaccccacgctcctctaatatccctggaagaaccttcattatttcaacagcgtcttctcttcccacgaaaaaactcactttgtgctcttcttggctcttgtctggctatcatagacgacacac

SEQ ID NO: 20561 - DNA, 495 bp, Arabidopsis thaliana columbia
gcacacagcgagaaactgcaattctaacccacgatttcaaatccttaggttgaagtgatccaaaaaacagagccaaaaacgcaggctttctatgattggagctttgtgtaatggcagattcttggcaataaaatccctcaggcatgcagactctgaaccatcactaaagtagaactcgagtttggacaaccacatccaaagaaactcccattgtttcgacaaacactagttgatactgcttcttttgttggaagaaacgataatatcttcaccagtaattcatcagacaagtcactgattttagccatatcactcgaagactcaagacaaatttggggttttccgaccctggaaaaaaagaatcacatgaaacaaaacctaagactaaatgatttgtctgaatccaactcaacaaattacaaaacaagtgaagataatgaagtaaggaacagaataacaaacctagaaatttcaggtgatgagtttttcgtgtgg

SEQ ID NO: 20562 - DNA, 1517 bp, Arabidopsis thaliana columbia
actgcgtggggtctacgggttgatgagttttgtgatggtggtttgcaggcaattgacaagagcatgatcctaaagaaaatgtgagttctcgtgttttcaaacctcatctcctaataaagatttttgttttccttgaggacaagcgaagatctaagtcggggggagttgatatgttgcgattttggtgtcttaggtcccttagttttgagtcgtttgtcgtgtcatagtccgtcttttgtgtctattcggttgtgtcttgagtcatttgcaggttttaggtgtttaagggggacacagatgctttcgagacttatcgagctcatttggaccagaaacgatagcaggagtcgagaaaccggagtcaggaacattggatcgatcaatcctatcactagaacgatcgatccagtgttcatcatcgaagataaatcatctgcgaggatgggatcgatcgatcccaactctcaaacgttgaagaatctcacccgccagctcgggatcgatcgatcccaggtggggatcggtcgctccacctctggatcagtcgatccaccactggatctgtcgatccagcttcctgacgactggtttcggttttccttaacaagactgattttctattttctgtaattgggtataaaaaccccagaatcctaattttatttctacgttttcttttacgcttcttttttgcaagttttggagagctttcctttgtaagcacatttgggattagagattcattccttcttggcaatttggagaagatttctgaacctttatctcatttattcaatttgaattaagttttctttcatatctctttgtgttgttcatttttctatgagtgagtagtctcttaattttgtgttagggttctaagtaggggattcaatgaattcatggtttgattgttgtttggagttcttgatctttaagttttttgattcacatattgttaatgctagaataggattgatcaccctgttttagattctaggtttttctatgcataaaaagtgttcgatagaatgccagaaccaatgtgaattgagctatgtatttctagccaacgagagttgatgttagaatgcgttgtgaacctaatgaacctaattctaatgcgaatttgactaggaaattacaaatgaaagtttagtagttaagtagtcaaatttagtgattaatgtcttgagagagaattaatctaaacttgttctttatgctgaatttcttgtttattattttcattaatcattgatctctgaaataccctatggcccaatgctttttatcatataagtttaatcgttcatttatttgcattttaatttacaaaatccaaaaacccaaacaaacaacctcttactacaagaaaacatgcgatttgcgagggaaatttgcaatggaaaatatccctcgcaaattgctacagaattgcaagacgtttgcgatgaaagagaacaacctcgctactccggcgcaaaatttgcaacgaacatttctctcgcaaattt

SEQ ID NO: 20563 - DNA, 634 bp, Arabidopsis thaliana columbia
tcaaacccaaaaaagtaaaaggaattcatagagatttttctatagttttatggacatatttattgtttaaggtttatttttattttttggcccaaacccaaaaaggtaaaagaaagaaaccctcgtaggatgtcacgaacccgatctatttaatgatcatctctctaaataacacttggcgtcgttggcgatatcttcggcgacaatctgcagtcaaaacaatcgacggagacggttagttcatcatttatccttggattacttaggaagttttgatcgactttgaaacatagaaattaggaatcgatgttgttgttgacttgtgttgttcatgatctagggatggaggagttcgattatatcagtgaatttccggattgtttgctaactcagatactcttaaaccttccgaccaaagattctgttaagacaagcgtgttatcgaagagatggagaaatctttggttaaacgttcctggacttcgattacgcacctttgacttccagtctcccctatccttatgaagaaggcttcgtaaggtttatggacagatttatggagtttaagtgcaggcacgcctgcaaaagtcatgatacgtattcgacacaatggtatcgagacgataatggagtg

SEQ ID NO: 20564 - DNA, 650 bp, Arabidopsis thaliana columbia
tgtcgagttttattgttagattatgaaggcattgatattctatgtttgttgtttcgtttatgaggtcaagaaattgaaagcagtcaatctttgctcaagttttcttttcgagtttcactgagcttactacatgctaattagtttcttctcgataatcattgttgttcacttgttttgaataatgatgttgaattgaatgacattgcagatgggcgtcttgtaatgagccacacgaccgagatgagcaaatgcatgaggacaatgatatgacaaacgaagagtttgaaacacctacttctagaaaggcaaacaagcgcaaagagaaaaacaatgaaggggcagggaatagtggttctacggaaaacaagagggcaaggtcttgggtttggatcatctaaccaaacatacaaatgatgctgacaaatgtaattgcaattattgttggaaagagctggcgtgtccaaccaagtctggaacctctactctaaagaagcatcttcaaaatacatgcaaggcataccaagtttggaaatgtgctcatgtacagaatagtcaaacctcatgatggtcctggtggttgtatgagtactagtaaagttagtgaatcagtttggagagaagcactaatgagtttgtagttttagatgagt

SEQ ID NO: 20565 - DNA, 583 bp, Arabidopsis thaliana columbia
  unsure (1)..(583): unsure at all n locations
ccaatcacagctgtaataggactatttttagacaaacaattcccaaatgactttaaatgccagtttggtgtatataatgttagaactaagactttatatgaagttttaatggagtatataccaggagtgtcaatcacattgattattgggccatcttctattaaagctctgaacatcttacatctctggtccatatctcttccaaacaaatttacttcgaaatatttttcaccgatgatggtgttcccggtgctgctttttccattttcgctacgacctaggagaagtaagtttgtaacggggcattcctgctcagccataatttgaaaaccaccaagacgttgctaattttctgcacggatccatagtattacaaataaattatacatgaacaaatagatatttaaaatgaagaatgaagagaagaaaaagttaattggtagactacaccaaatgggaactcacgatcttgtaaaaactaatcaacgaagcagttcaagactanatagaagacattttgtattgatttggctttgaaacagctatatccgtatttttatgtgtcatatgaatttggttatga

SEQ ID NO: 20566 - DNA, 358 bp, Arabidopsis thaliana columbia
aaagtaaagtgtgtagtttgattgcaataccgtaagtattattatgggttcaagaagaagaggaaacatggaaatgaaagatccatgatataaagaacccaaaaaccatacaagctaacaccaaattcaccactctctgtggttgccatctgttctccaccaccgttgctcctccgccttctcccgccgctgtttcctcaccgtttctcaactccctctcttccatcgttgacccaaccatttcgttcgcaccgccgacgttccgggctaccgattggcaaatctcgcaggttctgtttcaaaaaaatacgttaattttgtataaagtgaacaaaactctccggtgcataattatgat

SEQ ID NO: 20567 - DNA, 449 bp, Arabidopsis thaliana columbia
ttgttgaacgaagtcggtgtagcgacggcgtagggtaaagtctgaggttgagaagcttcgttggaaagaagggaagaaagttgagagtgcttcaggggacacaaattttcaagcgtgaaagacttatggaagagatttggttgagcaagcaaggaagcttgatcctgtgattggtcgtgatgaggagagtagaagagtcgtgaggattctttcgaggagaacgaagaacaatccggtgcttattggagagccaggagttggtaaaacagctgtggttgaaggtttagcacaaaggattgtgaaaggagatgtgcccaacagtcttactgatgtgagattaattgcgttggacatgggtgcgttagttgctggtgctaaataccgaggagagtttgaagataggttgaaatcggtcttgaaagaagttgaggacgctgaaggcaaagtga

SEQ ID NO: 20568 - DNA, 531 bp, Arabidopsis thaliana columbia
taagctacagttcctctccccagatagtttaggttgaagagatcggggcgtttgtaatagcacatgacaaaaatgccctggtcatcgtccacaatgttattatttagtgttattttttgactttccagaactaatttatagaattctttccatttatgctgtgaaccaacaattgcgcccccaataatatatacatgattgccaatcatgaaatcaaaaacctgttgttgagatgtgacagtaagccctttttttatagtgaaaagatgcatcttactttcatcaaatgggaaatcccaaattttcaatcctcgagttacatttggcttatggcaatagccaaaatctatccacgcaacaagaggcgttttcactaagcccatgttgatagctttatttacaaaataggccttaaggttacataccaaaacatactctggtgaccagtactctgggttttttaattgtcgaggctcaagtctatttgtaacgactcatctttttgaattttttcgatacgacttctgatat

SEQ ID NO: 20569 - DNA, 528 bp, Arabidopsis thaliana columbia
gcaaaacccacaaagcagaaatacataggagcataaatcccatggaaacatctctaatcatcacgaaaaatcccatcttttaatcgaaaaggagtgatttttacgggctcattatatacccacttgatgattcggagttagaaaaaaatctgatcgaacaggcattaacgaccattgattttaacatcaacatcaactagaaaaagatgggtcagacaaaaaagacaaaactttattgacattgtatcgaacctaaaatcaaagacttagattttttacatatatgtatgtgtttgtatataatttatcttggattctgtaccgatcaagaaacagaactgaaactatctcagagatgatggcaataaattaacagaactatataaaaaaaaccaataaaatagcaaatgggtgggccagacaaaacaaattagcatacgataaaagcaccaagttggataaaagaaaagttcatgagttcatacttcatagaacgtggcaataatgattccaaacaattatgagtca

SEQ ID NO: 20570 - DNA, 559 bp, Arabidopsis thaliana columbia
gacaacgtttccaatattcactctcgaaatatacatatccgtgtatccaaacaagtctctaaatggtatcgagagaaacctctctagggctttaacagtttaaggcaaacttctgtcttctgggtttggtttgtttctcaaggaaaaatttcaactttctttcttatttcagtaaacgagagatatgttttcaatctcaatctgattctttctcgcagcggctaattctagtgtcgctaatagggtctctgtttcttcaaatttagttctttaaattcactacgaagatttttgttatggcgagtagaaagctggttcgagatttactgatcacaaagcagcctcttctccagcaattggtgcaccaacgggttcgtttctggtgttgtgtttctattgattgtgattacgagcttaaaaatggggatgattcattttgtgtttgattattagagagtgggcgcaagactaggtcttcttcagggaaatgggtttgcgagtcatcgacggtttagtgttttcagtgagttctcgaagaagattagaggagaagctgata

SEQ ID NO: 20571 - DNA, 535 bp, Arabidopsis thaliana columbia
  unsure (1)..(535): unsure at all n locations
cgtaacttcgggagaagtagaggcgtttgtggcaagcggggcagccgtgcagattatcaagcgtgatgccgagaaaggtggcgtactgcgtctgggtactgaagtcgtcagtgaccagcaaggaaccattgccgcgctcctgggggcatcgcaggggcgatcaaccgccgcgccgattatgttgaatctgctggaaaaagtatttggcgatcgtgtttccagcccgcaatggcaggctacgttgaaagcgatcgttccgtcttatggacgcaagctgaacggtgatgtagcggcaacagaacgcgagttgcagtgcactcagcgaagtgctggggttgaactacgacaagccgcacgagcagatagtacgccgaaaccgcagttgaaaccgcaacccgttcaaaaagaagtggcggatattgcgttgtaatgatacgccacatccggcatggtatgctgatgtgcgtatgctgataagacgcgccagtgcnantcaggcaaccggctcgggcgttagatgttggatgcggcgtac

SEQ ID NO: 20572 - DNA, 362 bp, Arabidopsis thaliana columbia
ttgtccttgaatgatttgttgactgagttcgttaatttgagcatcttgagctgatcgggcttgttgtggttgttgagtgaactatcgcggtgcattacgatgctggtagcactcattgctctgctgtctacggacatcaatctggtcgtactgacccaaagtgataacaggcttttaagatcacttaatcgtcaaggactatcatgtcgatgtactatcttacgtgtgcatcaacatgggtgtgatgtacagaactgagatgtgatcagcacgtctgaagttaagagccggaataatagctttggggtttctacagtgctacgcgaagatgtccaaaattgaaagactacgaaaattactaa

SEQ ID NO: 20573 - DNA, 993 bp, Arabidopsis thaliana
tatggcattataataagggaggggatgactcggcaccagcaattgtgttgaagacaaggcggtccctgagagctgtacactttcatccacatggggttcctcttctcttgactgctgaggtgagctacatattgaggattgagttaatgttctgccactttgtcggcttactctattaactataaatggcaggtgactgacattgattcatcagattccgcaatgacaagatcaacatctccaggttatttgcgatatccgccccctgctattttcttcaccaacacacaaagtggcagtcgtaccagtttggcagccgaactgccacttgtgccattaccgtatttgctcttgccttcatattctgcggatgatccaagaatactatattctagtggtactactggtccaaggaatgcacaaacaaggtttcagagtaatcaaagttctgtagaacatggcagcagaacaatttcgccttctcctcttcccatggctacgtctgctgatctttctggttcctatcatgtcccagacaactctgctagtaatacatttgctacccaagcaggagctagaaattctactactgcagttgatgccatggatgtagatgaagctcaacctgttggaagaaatagagttcccagtcaagtttcaagtcaaccagatttactggagtttggacaacttcagcagttatttcactttagagacagaggttcctgggagctaccttttctacaagggtggttgatggctcaaagccaagctggtgctaattcagtggctcttcctactggtagtagtggtcacgtcaactcaactccttatatgggttcttcttcagcatctcattcatccacagccagtctagaggctggagtagcgtcattagaaattcctggtggtgttaacttatatggggtttctgcaagaggtgactcccgggaccgaattctacagtcccgttcgcaggatctggtttagcag

SEQ ID NO: 20574 - DNA, 516 bp, Arabidopsis thaliana columbia
  unsure (1)..(516): unsure at all n locations
nnnnnnnnnnnnnnnnnnnnnnctaaagaagaaacgatacctccagacttggacagacaatatgcaaactgtgggcaaacctaagatcaccgctgctaagggatccgacttcacaagggtaacattcaaggccgactttcccaggtttggcatggatggcatcgatgacgattttgaggcgcttatcaagcgacgagtctacgacctggctggtaccacgggcgtgacagtcaagctaaatggaacccgtttgcccgtccgaaatttcaaaaagtacatggaaatgtacacgaaagccatccgtcgagagcgcggtgatgacgactccaaaagcgatccaatcatcacttgctctcctcatccttactgggaaataggatttgccgtgtctgatggctctttcaaacaggtctccttcgtcaactctatcgccacaacatccggagcacccacgtaaactacattgcagaccagattgccggtaaactgtctgaaccctcaaaaagaataagaagg

SEQ ID NO: 20575 - DNA, 1148 bp, Arabidopsis thaliana
tttagccaccaattctagcaaaacccagaaaattttcaaatgtccaatactttagcaaattgactacaattttgaatagaagcttaaagagattcacctgattttggagacaaaatagaatacggtgatcatctagaacgaaaggagtgtgggagcaaaggatgtcgatggcggtctcaatgtcaccagattaaacttgaatacacttttgctgacgtggctagggcgactctgaaagcgatttagggttgtgctgccgtgtgtcccaagacgctggttctggcggatccgcgccgttctcccccgtcatgtcaccgtcggtggtggaggaggtcactctgtcaagcccccgagattccccatctgctgctccgaagccatcatactcttcaattgttcaaaacaagccttctctcacgaagcatgatttctctgtcaccatggttgacggagatccgatagttcagattcctgatgaaattttcgaagattcagctccactttgggacgatttgctcataggcagattcccacaaaccgcacctcacgttgccaaagttcatgttatcgtgaacaagatttggccgcttggtgacaaaacagtgaagatcgatgctcatgtggttgatccaaaaacaattaagtttcgtatccgagatagtgctgtcagatctagggttcttcgtcgaggtatgtggaacatagctgatatgccaatgatagtatccaagtggtctccagtgattgaagacactcaaccagaaatcacatcaatgcccatgtggattccatcaaaaatgttccacaaacaatgttcacttggaaggggttaagctttcttgcaagtccaatgggggaaccaaagcgtttgcacccggatacaatgctctgcaacagttttgaagaagcaaaaatatttgtggaggcagatttatcaaaggagctgccaaaacaatttcgatttaagttctactaatggtgttgatgcaatggttgaatacaaattcccttggctcccacccagatgctcatcttgctgcaaatggggacatttgcaagaggtttgattgacatcacgttcgctacgacgacattctaaaccagttgagccggaaacagaggtggtaacagaggttattcccaggctg

SEQ ID NO: 20576 - DNA, 640 bp, Arabidopsis thaliana
tatatttggatcagctacgacgcagacactgtgcttactatacgcgttttcgaagctctcgctgaatttttcaaaccgctccttcacttcctccggcgtcatctccaccgtacgattctcaggtaaagtagcaaccaccggtccccaagctagccgcttatagctgccggcgaattgtctcatcttagcgaaatgtctcgtgatccaatcctcgccgagaaggttcttcaggtttgaggaacgagcacgtgagaccacgtgctggagattgttggtgaggaagagatactgtatagagaagtctttgtagtgaattgatttacgatcgattttacaaaggaggacgaggatgatccaagcgaaacggatcgtcagctccgacgaaggagagtcgtcggattctgagacgttgaagtaagactccggtaacagcgacctgtccggtggtggagatccggcgaggatatcgactagtacgttgctgtagtcagcgaggagagagaggtgatcatgacggagatcgtcagtggatgtactctccgccgggaacaccaccttcgacgagtcctctggatccggattcgaattcacaagtagtgatcgaattgatcgctgagagagattgagatttagacaagag

SEQ ID NO: 20577 - DNA, 570 bp, Arabidopsis thaliana
tccccaggatccctcagcaaacgttttcaatatactcttcaaccttaataagttcatggcatttgaaacacgtgacccatttctcattcgccaggtaagtttggcttaccagtggagtttttatagcactcaagagggaaaaaaataacaaagaatatgacttcttttaactgctaaaggcagtttgtagtagttcggattgaggcaattagaacaagtataattctctttcattgctgtaggaacgggaagatccaaatttgacagagtgggatcgatttgctcagagagagtatgcgagattgtcaatggaggaagatgtagatgaagtctcaaatgggagtgcagatgtctgggatgaaccactcgaacctccattttagtccatagtggtaagttcacactgcttgtgtataggaaatgcaaatgcttataaaattctgtgatttattgagtcgaaagccgatcttgactacagaaaccaaccaaataaggagacttatgatttgaggtttccctggagagagatcatgatcagagattggaggtcctgttggttgtaccagacgc

SEQ ID NO: 20578 - DNA, 599 bp, Arabidopsis thaliana
taaaccatttcagttatacctttctcagtaccgacttcatatctactgtgtatctaggagtatacgtacacaatggttacagccagaagaaaacccttcctcgattgtagagcagaatacaactaggcttgaagcctcaggcggtttgaagaacatcacaaagtgatattcaggttgcccgatggacgaatccaactacaggtcctccttttacatactgcattaaaaccataattcaacaatcacacaaaacatgtcatttatttgagtttgaatccatggacaagtttgttttagtatattgagagacgaagagaggaaccttgccatcgaggataacaagctcgccatctacccatctcggattacgaaatccaggatcagcaagcctaccttgtcctttatatctggcaatctgcattttgtaagaataactctactatgaagcgacacaaacaacaactctaaacgaaaaccgagcttaatgataaacttgaattagtgttgtaaggtaagcacaccactccagattcttcggggatgaagcctttatgtgggactcataacgtctacaatctttgccgaaatgcacctgtcat

SEQ ID NO: 20579 - DNA, 250 bp, Arabidopsis thaliana columbia
tctgtctcggagaatgacattgggatagggtacggtttaatgattccgtagtagcgccacatcttagacatcctgtatcagcattcgtctccgtaaatgctctgcggctaggacataaccttaggtggacattgaacttcccaagcaagtgattttagaccatttatatcagtaccagtgatagatgatttatcctcccagctttctaaccgtggtgtatgataaccagatttaactgtagatgtcccgg

SEQ ID NO: 20580 - DNA, 400 bp, Arabidopsis thaliana
gtagtaatcgtgtaagtaagaaaaaatattttcataatcagaagatattgaaaactaaaagataagttacttaccctggtggtgccccaatgaggcgagagacagagtgttgttccatatattccgacatatcaatccgaactaagaggttttcatcatcaaacagctgctcagcaagagccttggcgagctcagttttgccaacaccagttggtccaaggaataagaatgatccagttggctgttgtggccttccaagtcctgcccttgaccttagaattgcctcagaaactgcatttaccgcttgattctgtcccacaacccgcttatgcaacctatcagcaagaccaatcaacctctccttctcattttggccaagtctcgtcactggaatccctgt

SEQ ID NO: 20581 - DNA, 466 bp, Arabidopsis thaliana
gccagtgtgctttaaagccgtaaacatgtctgtagaagatactcaaccgcttatcacgcatctgattgagctgcgtaacgtctgctgaactgcattatcgcggtgatcgtgatattcctgtgtctggtctatttcgccaatgacatctatcacctggtatccgcgccattgatcaagcagttgccgcaaggttcaacgatgatcgccaccgacgtggcctcgccgttctttacgccgatcaagctgacctttatggtgtcgctgattctgtcagcgccggtgattctctatcaggtgtgggcatttatcgccccagcgctgtataagcatgaacgtcgcctggtggtgccgctgctggtttccagctctctgctgttttatatcggcatggcattcgcctactttgtggtctttccgctggcatttggcttccttgccaataccagcgccggaaggggtgcaggta

SEQ ID NO: 20582 - DNA, 1766 bp, Arabidopsis thaliana
gatataatgatcatctcttgtgtctcctttgttgattaacaaacctgtaaaatctctttggagtcttcatatcccttttgatttaatgaaatgtgtgaagacgaaattacctctgtaatgttttttgaatgaataatgaataaacatttttaagaaaaaacacaaaaactgaaaaagaaaaaaaaagagctcgagctcaagcttcgacttcttcttcgggcttcttcctccggcgagctccggcgagccgcattggttgccgtttttcttctcctgcaagctgcatcaatctactaagtccaggtatgtgcatcgagttggagagagcttcaaaagctttgaattaggattttgaggattttgaggattttgaaattcaatccaattagatttgggttattgtgttttagtacctacattagtagtttaaatatagttttagggtcgatttggcctataattgggtcagaaattgattttgaatgttgattcgtaatgaattgaactcgaaaccaaacgttgttcttgtcgtgaaaataatactggtcgaactagttacagttttaacgaaacaattgatttttatgtagatggtatgttttaatagcaccagtattacttagaacgtagtatttcatatatgtaatagtattactaacacatagtatttcgaaatgagtactagtattacttaaaatgtagtagaatcggtaatactagttatattgactgagtatgtgtattgttttggcaggttacaatgaaagagaacgtgatcatatattttaaattcgaaggttgcatgtataatgtgatgatgaagacattaggagagaagataactctctcattgttagaagataggataatgacgaagcttggattagatgcaaataaggttaaattgcatatgaggtacaatccacggttgttcggagtagaggaagaaatgaacgtttgtgatgatgaggatgtctttgtttatgtaacatccgcaaaaaataatcggaaaagtgttttggttgtggaggagatctctaaaccgcccgagccggagcaattgctcgagcaattgtctagagttggtaaaagttctgttggtaagaactatacggagttgtattcagaggaggatgaaatgagagtggatgatggtgcactcatcgtcttattagaagagggacaaagaactcaacatcaacttgaggcaatagtggaggatcacggaactcaacatcaacttgaggcaatagtggaggatcacgggactcaagaagatgaaacacgctatgatgagtctatggataattctgataggggggaacagtatgttgagtcgccacctgctgtagaaccgggtatgtttaaaaagaatgggaagacggaattgggttgaccttacgtcaagaatttccaaacaaggcggcattgcacgaggtggtggatagagctgcatttgctaacagttttggttatgtgattaagaagtcggataaggagcgctatgtcctaaagtgtgccaaagagagctgttcttggcgtttacgagcgtccaatatcagtaatactgatatattctcgattagaaggtacaataagatgcatagttgcactcggctaagtaaaagtagtagtaggctcaggaaaagaaaaggcaacccacaattagtcgcagctctccttcatgatcattttccgggacagttggaaactccggttccaagaattatcatggagctagttcagacgaaattaggtatgaaagt

SEQ ID NO: 20583 - DNA, 864 bp, Arabidopsis thaliana
gttaatggcctctggatccacacgatacaatattgtttccacctatggagaaagctagtatcaaacgccctatctatctggacatcacacattacgtgatctaaagaagtgtgaaggctttgctacaaccaaggttagctatctaactaactcttgtcacctagaaactaagttcactcactcacgtgataagatgttccttatctaaaactatgacattcctttaagcgaatcagagtagaagaatctgattatctcacctgttgaaaccaagatagacttgaccaaaggtgccactcccaagaaatttcccttttttccacgtggaaaaccccgaaggagaggtctcgtagcctcctccaatcctggaaccatgcacagcagaagggcttgtaggagaagtaggtggtcgaggcaaaggatgacactcagaggaggaccttccatcatcattcctccctgtagaagactctaagctcacaactccagacaaacgctgatgccgtggagacgtgggcctagtagtaatagtagctgcctttggagaaactctctcaggactacgtggtgctgctgctacattgaatttcacatcaccacgacccctgctatatgactattgagttataaccacaaaacccacaatcaaagcagcaaaaagacgtaaactttgattgattaagaggttctggatccatacaagtagatgcacagatactaataaaggggaaaaagcgaacctagaagcaacaagttgactctgatcatcagctgatccagatgacgtaacgctagaaacagatgtagatccagaagtggatccgcttacatgatcttgatgatggatcgaaacaggagagagca

SEQ ID NO: 20584 - DNA, 1195 bp, Arabidopsis thaliana
gaggctttagtaaagccatgatgagggcattggttggtgtaacccttgaaacgctctcatgcttcacaaaagctttcaccagccttctgtaaaaagccagagatctcatttctgagtcttgcagttctggcattggagaagactttgatagaaaagccttcttgcaatcatcccaggtggtgattgaatcatggggcagattcttctcccatatttgtgctttgtcgcccaaggagagtggaaacaaacgaagcttgaatccgtcttcactgacaccattgatctttgttaggttgtagagcctatcgaattcatcaaggtggtcgagtggatcctccattggcagaccatggaatttgttcccctgaatcatcgagatgagaccactcttaatctcgaagttgttgttctggatagcaggaggtgcaattccttttctctaacggtgatcacgtggtgcatctccagaaccaatgttggcagggccattttgttgattctgttcgtcagtcatatcgagtggttgatgaggtacaaggttcactgtgtttctcctttctctgagttcgcgagctatgcggtcaatgttgtcgttgaaaaggaggttctgattgcctgttgattgagttcgcatacagcagaggtgtacatggatcaagaagacaacaagaaaaacacacagttagcaaccagattgaaaattgaaaaagaacttgatctaagcaagtctgaaatctcaaatgtaacaaacaaacacccaattggcaacggcgccaaagtgataacaggttttttagtcaattaatcctaaagcactatcatgtcgttgtagtattttaggttgtcaatccaaatgggtgtgatcctaacaatcaagatgtgatcagaagtcactaagtcaagccaagtaataacaggttttggtgtgttctagcagtcctaagtgaacatgcagaaaacagaaaatcaagcagaaacaataaaacactcgagcaacacagctctttgcggacgattgggtgaggtcgagtgacaagtcgagtagcagacagaaaacaagacacatggatactcgaccgcatagtctgttgccagacaactgggtggtcgagtataagggcgagtaacaaaaaaaagaattgcagaaactaagcagtagatgacaagatgcagtaaccacagtagagtaacaaag

SEQ ID NO: 20585 - DNA, 2215 bp, Arabidopsis thaliana
gtgctcctctcacctttttcttaccgttcgtcaacgcccacttcttgtatccacacaggtggatcaacagaggcattactggtggtgcattgttgagatcgcctctcaagacattctttccctttgtccggcggagaatccctgtaagcgcggaatctatcatctccatgtccgtgttagatacggtgcatgtagactccctggagtagaaaacgttggcaaccgagcgctgaaagtagcggatcacaggactccggatttgattgctcttggaccgcgccgagtttagcggtagattgttcccaatcgtagcccacaaatccttaagctcctccctgtcaaacctgggtttggttccctttccactagggaaaccaaacagttcttccgaattcttgatcaaaagctgataccgctaatcatccactgagaacatcaggaaccctaaccccatggtatccagctcaaagtccgtgagaccctcatacatctctacttgcagtgtggaaagaaactcgattgtctcctccttatacgtaaggttaagacatgaatgtttccagatgacacttctcgaacaaatgttgcacgtcctccagtaacccagctcggctaaagtctcatagcagggatacctcgttctccagaagtcattcatctcaaagaatctgatatactcctccactgtaacctcgtcgggtttgttcagcagcttcgtctccttgcaccatgactttggctcatactcagtttcgatgtcctcatcgatcagctcatatctactcgacatcgctctctttcctctggcgatttcagctcttctctgattacgtcgtgctgcggagcgttcaaattcttctctgaaactctcgtaaacgtgttcttctctctcttgtctagtggaccaagactctgcttcatctacgttataatcaggatccattgaggattctccactgtagttactcatgatgaaacctgaaaacaaatgaaactcaaggataaacattaatacgttagtcccaacaaaccaaaaacacaaaccggtcgagtgatgtgatcgagtaaaccgtcggttttgattttttttctttttttcttttctttcggttgatcaagtgattttgtatggtcgagtgaagctagtttcgtggttagagtgaggcggtggtcgagtggtgagcttgaagaggaggagagcagctgcggtttgaccgtggaaatagaggagcggtcgagtggtgtcgctttggcggtgaatcgagtgaacttggcgaagtcgtgtgatgagtggacttgagagatgagagaacaatggcactttggtcgagtggttatgagctagaagtagtgaaggcggcttggtgatagaggtcgagtgaatgaaatggcgaggtcgagttgtttccttggagagagggagcaagcggtcatgatggagaggcgaagagagttgtggccgagtgaaattgagacgattgagaggtggtggtggcgaagagtggtcgagtggtgaggccatgaagaagatgatgatgaggagtcgagtgaagttgttgaagttggagaatgatgaagtcgagtgatggaaacaaacacttgaagacttgaattgcagtgaacggtgatgagagatgagagagttgcgaaaagtttggtgtgtggagaggagtgttgaggtcgagtatatgaagaggatggtgaagaggagatgccgaggtcgagtaaaggaggtaagggagcgttgattcaagagggatggggtcgagtggttgagataagagagatgagagtttggtttgttggtggtgatgaatgaagagggatggggtcgagtttattgggttatggaggagaaaacgaggtcgagtgaaggagaagaagtcgagtgggtaaggtgaagatggggttgcgtggagatcgagtgaagggatggggtatgaagagattccatgtctcttggtctgctgcatggaggacatgggcgtcagtggtgggtccactgtgtcttcttgtctttcttctatgctctctgttcactgtaaaatccccaggaaatcctgcaatcttctgtaaacttgataaactctttgtaagattctgtagcttctgttggtcgagtaaaatgatgatttaaatttttttttgggttttaaacatactcatactcgccaatgtctcgatcctaggccacagtagagtaaagtttgaattt

SEQ ID NO: 20586 - DNA, 844 bp, Arabidopsis thaliana
ctaaccttcaagtcttgtctcagcttttcttcatctctttcgccatccttgtcgctgctctcaagtattcatttatcgctgctctactcattttcattctcgtcactctcctctagctttgtctactattgtctttataatggtcatttactactaaagaatttggtacaacaacgattcagattctactctgttattgtaatcgatttgaagaattactacagatacatgcatgaatgtacatttgagcttggtatcaagtttggtgtgaattcgaacatggtttaaaacctcttcttgaaacactgaagaagaatgtcttacgaaccagttcaaatctcaaagttaacacctcttatgatccaactcgaagcaatgcattgatatatcacaatcaaaagcaatggcgagaatcgattaaagttatttcattgagactttattaagcttaagttatattaagaagagacactactttttagaggaggatttcttcttggagctaacaacaacaacttgaggtttaggatgtatctctgcttcacttggatctaaccacttaagatgatgacgattaaagcaaggccaattaggtattgtgatcagagtcgtcagaacaacacctccggcgtaaatcaacatcatcatcctaaacgacgccgttgtgtaaccaacaacgaacgacacaacggcggcgatcagaagcaggatctgcattaactgtccgccaatttctgcccttgccaatccatatctgaagaagaaaaaaaaacacaaaattacgatttagatccgatataacaaaatttgaatcgcacagatcgatctctttggagattctata

SEQ ID NO: 20587 - DNA, 2060 bp, Arabidopsis thaliana
tataatggaatcaaaagcaaatcgacgtcgtaatatgtttgcatgctatgagcagttgatattatggataaaaaggaggatcatgaaagaagtctattgaaaagtgtacacaaagtaatgattagccaaaaatggaaaagaagaaatatacatttaattataatctctagtagagatatttggactagtagtctatgcacataatgtgtaaaaccagtggaagataaatgaatctttatgtgaaagaatagtgaaattaatgagattttcacaaagataagaaatatattatgaagagatgcattctcttgtggtggatgcaatacttttaagtatctaaagtctggcaataagagatggaacactggatatgacatttatatgaaattcttgaaagatatagtctctgaaggattaattatatgagaattatgttctctagaactctactcgatcgaataaaaagaaatatgtaacatgacatataatcatataaatgtatatttatgttgagtttgttgttggggtcggatttcacccaagtaaccgagccgaccagaggaaatgcctaaggccaggaccgttggctcgggcatcatttcaaaggaccaccccgagccggactcgaaacacctcgggcatcacttcaaagagccatcccgagctggcattgaaacgcctcggacgtcactacgaagtttacccgagccgacctcaaaacgcctcgggcagacatcattcggctcaggcatacctccaagagacgagccgcccgactgcggctcgaggaccaacctgacccggctcgggagaaacttcgtatccgaggagaaaacttagaaccgatgtaagatcgaaacaccattgccggaaaacccggaaatgacactggaagatctccaaggatattgtcgaatatggaagatcccgcgaaattctccaaggataaagataatctccatcaccgaccctaagataactggaaatcttctgagaatatcccgagaggcgattcaccaaagccctatataaagtgcctcaaaggacaaacaaaaaggagacgcacaaaaacgctctcaacttcaggctatcaaaaaacgctctaactttgaaggcaaaacacttattttctatatttcaaaacacttgtacgatcaaatcaacattatctcaataataaaatcaagaacacccaccgcggtaatcaacaattctgttgttctttgagaatctcacagagatccgttctttgaaggaaccctaaatacaattttgattgtgcgagtttcgactctcacaatttggcgctagaaggaggggaatttgagatttctcttactcttagaacacagaaccaaccaaccaatccacaatggtcaacaatcaaattcccggtaacactgttgacgcagagggaaacccgatccctccaatccagacagacgctcatgaggccactgctcccgcggttctagcagaattaaggagcatgatggctcaactcaagaagaaggtagatgatcaagaacaggagaattggtctttggcgcaatagctcgaagcagctacctcccaagtacagatcaggacgactatccacacgcctggcaacacaacacggcctatccactgaaccgcgcaagaagtgggaggagaccgagcagaaccggcagcttttggaaaccaaaacacgatgaaccgagcagaggaaactgacccgcagctccctcttccccgagcagaagttgccgaggccggtcaggtcggggtctcagacgatgaagactcagaagagaacgtccgatgggctgaggaatatgctagagaacaagaaataaacgctatcaaactttccctaactaaagcggaaaccgagatgaagctcgtgagatcccagatgcataatgcagtctcctcagccccaaacatcgaccgcattctggaggagtccataacactcctttcactcgtaggatctccaacgcggtaatttcagattcaggaaagctaaggatcttccgttccggaagggcacttgaagtctttcacaatctttgtgg

SEQ ID NO: 20588 - DNA, 1841 bp, Arabidopsis thaliana
gatatgttagctgacaaaatgctagaagagctggggaaacagatcatctacagagtgctctaacaaaggatagcaaagaaggagatttacatttggagactttggggtaccagaagctgttagatgaacaaagcagttgagaatccaggagaatatgaagatttgggtgaaagagcaaggggggaatatatactcgaccacatcactcgaccaacagcccattcagtctactcgaccacgtcactcgatcacaactcctcatctgaagccaacttagtatccgatgactggtctgaaatcaaggcacccaaggtagatttgaaaccgctaccaaaagggctaaggtacgtttttcttggactaaactctacttatcctgtcatagtgaatgatgagctaactgctgatcaagtaaacctgctgataactgagctcatgaagtataggaaagctataggatattcgttagatgatattaaggggatttcacccaccttatgcacccatagaatccatcttgaaaatgaatcctactctagcattgaacctcaaaggagattaaaccctaacttgaaagaggttgtcaaaaaggagatacttaaactattagatgctggggttatctaccctatctctgatagcacttgggtatctccagtccactacgttcctaaaaaaggaggtatgacagttgttaaaaattctaaagatgaactgatacccactaggactacaactggacataggatgtgtattgactataggaagttaaatgctgcctctagaaaagaccatttcccattgcccttcattgatcagatgctagaaagattagcaaaccatccttactattgctttttggatggttatagcggattttttcaaatccctattcacccaaatgaccaagaaaaaaccactttcacttgtccttatgggacctttgcttacaagcgtatgcctttcggtctctgtaatgcaccagctacttttcagcggtgtatgacttctattttctcggatttgatagaggagatggtagaggtattcatggatgatttttctgtgtatggctcttccttctcctcgtgtttgttgaacctgtgcagggtacttaaaagatgtgaagagacaaacctggtgctgaactgggagaaatgccatttcatggttagagaaggcatcgttttgggccgcaaaatttctgaggagggaatagaggttgataaggctaagattgacgtgatgatgcagttacagccaccaaaaactgtcaaagacatcaggagttttcttggacatgcaggattttacagaatattcatcaaggatttctccaagttggcaagaccgctcaccagactgctgtgcaaggaaaccgagtttgcatttgatgacgaatgtttgacagcctttaagttaatcaaggaagctttgatcactgcaccaatagtccaagctccaaactgggacttcccattcgagatcatgtgcgatgcttcagtacgcagtaggagcagtcttgggccagcggattgataaaaagctgcatgtgatctactacgcgagcagaacgatggatgatgcacaagtaaggtatgccactacagagaaggaattgctagctgtggtatttgcatttgaaaaatttagaagctacctagtgggttctaaagtgacaatctacactgatcatgctgctctgaggcatatatacgcgaagaaggataccaaacctaggctgttgagatggatcttattgctccaagagtttgatatggagatagttgataagaagggaatcgaaaacggtgtagctgatcatctgtctcggatgagga

SEQ ID NO: 20589 - DNA, 2439 bp, Arabidopsis thaliana
tcgatactaccttctatattttttacacccaccatgtcaacagaagaagcttcttccaggaatcaactcgtcgtcgccaacacgaaaccttccaatccctattcactcagctcatcagacaatctctgagccttgatttcttctgttgtgttaaaggaagacaattactcagaatgggcaatgatatatccctatttttactgtttttaactatgttttaggtataggttttagagtctaattgttatttctagagtcttttctagtctttttcaggtctttacatgtttggatgcatttggagataattaagcattctggagatcaacagacaacctaagctgcagaatcaatccggagacaaaaatgcacgtaggtgtcgaacgacacacccctggtgtcgagcgacccaatacctgacggcaattttgagacgcaacttattaatgttttgaagattttcaaattcggcccagaactttctcctctgtttaatgaaggcccatcccgtgttttagacatataattaggtttttaggatcattgtttagacctaagcttggagaggctattctcctcatcttttttgtactttgggagcaaaaccctgtggagactcctttggagaagatcttttactctttctcttgctattattgatttcttatttagactatgatttgtgtttctttgattatgtctgagtaatccacttgttaggtttagggtttctcattagggattcatatggtttaatagatctccccctgctaggttatctgtagaattcttcatctttaattgttcttaatgctagatctagattgatcacctagaacttgaatccaaacaatagatatgcccgccataggtatctgtagttggatctattatttgatgagcctggtttataggtgtgtaataagaatcggcctatctactaaggtgaacaatcgaactcgttaagaatgcatatttaggttaataatctctcggcttctccggttattcttagctatagatatagggagtttcgcggcacgcccactggttattccataattagagtttgagtttaaaaatggttcgataacaacctagctattattagatctactaaccaatagtttcctgagaacaccctaagcctgacgtttttactttcttgtcttacaacctcacaatctgctattgcttccttttgtttctttttgttttcattactatcttacttagcttaattcaaaatcttggtctattgtgtgatccgagagttttgtggaattcgaccctaaagtactacaatcgatctgttatttgagagagtggtcttaaggcaatttgacctatatcaaatttggcgccgttgccgaagttctctacgattcaccattagattaggattagaattttgtctaagcatttatttttattttttttacttaatctttctcttttttttttttcttgtgtgtttcaggtctttgtctaatcacaaaaccaggaacaagcgagaaacatgaacgagagtaagattgttgggatcatggctaagcttaatgcggtccacaatcaacttgtggaggatgttgattatgttaggagcagaggttttccgaatcagagatttgatcaccaacaaggctacagaggttcctatgggaatggtccaactagctacactcagaattctcagttccagcacccgcttcagaatagcaatagtttcagattcacaaggaactatgatcttgcttcttaccaagccccccgtccacccacacctaaaagcaagatagaatcattgctggaatagattatggaaggtcaacagaggatcttagagagacctatccctaaatggcatgagagcagcctcactacttcttggcattctgcttcaatggaaagtgagtatgagttagtgaagattgaggagagttacgattttgcagttgcagaggcagtgtcgaacgacaccaacccttggtgtcgatcgacaacatcggatatatacgagacatcaggctgtgacgaaacagaatctactaggctcgacattgatctccaaaatcgctcgactcacattcatattgtcgccgcaaattccttgattgtaggctggattctttcgatccaaaaatcagatcgactgtttcgttcatctccaaagcgtcgttactttgggaaagtcttcgtgttcgcttctctgttggaaacggagtgcgaaaacaagttctaaaagatgagattgctttgtgaaaacaagaaggcaaacctgttcttgaatattacggtcgactgtcgaaaatgtgggaagagcttcaaaactacaaatccaaccgtgtgcgtcgctgtgaagctgctcaagataccacaaaagatcgtgaggatgacaattcatcagttcctattcgaacttgatctgcctcgttttgc

SEQ ID NO: 20590 - DNA, 1022 bp, Arabidopsis thaliana
tgctgcaaaggaattaaaatagggaagattctcatccaccgtgatggcgataatggaaaacaggtcttcctattaatattttgctctgtttttaaaagtatcaagtataatctctttttataaacacgaattttgaagtttctcttgtcgtgataatcagcttatttatgagaagcttcctcacgacatatctgaacgccatgtcctgcttctagatcctgtcttagccacaggtactctgtctctctacgctgtatatttcgattttggtcctttttgatggatttttggttctcgaaattcatatctcgtgatattgcttcttcttgaaggtaactcggctaatcaagccattgaactactcatacagaaaggtgttcctgaagctcacattatattcctcaaccttatatcggtgagtgtaaaaagctatatatcgatctttcgctcttttgtgaatgtagaagctaaagatctcattatgtatctgcttctctatctctttgcttctctctttccctcgtcatgaccttgctttctgacaggcgccggaggaatccactgtgtctgcaaacgttttccagcattgaaaattgtgacgtctgaaatagaccaatgtctgaaccaagaattcagagttataccgggcttaggcgagtttggcgatcgttacttcggcaccgacgaggaagaccagtagccaccactcaacactgtgactggtttcaaaggaaaagcctaaatttatgactagagcgacagtagaggcacttgcatgtctttgtagtttgtgctaaagaatctttatcttattgtttatgaagctcctcttgcttacttgaattatttttgaaaaactacgttaattttctcattaaaaaaatgatcgggacaatgctagttttctaaccggtggaaaaagacataaccaatccttttatacatgattttgacaatcgtacgaaaattccagttctctctaattttaatttctttatttacatgttgattaatatatattt

SEQ ID NO: 20591 - DNA, 1511 bp, Arabidopsis thaliana
atcttcagtaggtttgttaaatttgtattgtatactctctgatatttcggcatttttaggtacctttctgacttactcgcagagcgtcactagcttagtccatatttgactgtgctagaggtgagccatactgttataattagagtttctttctttcatcataagattttctaattagagtttctttcgtttcttgcttcagaactaaaatctttattcatttgatatgtattttagtggtgcttctaagttatatgttagcaaaaaacaataatagagtaattgtacaatcacataagtaatatatctttatgtgaattgtttcattgtttagttttcttttcgtatttcagttataaacaagagaatttcttgttttggaaacgtaattcatttgtaacaaactcgtttgattgacaaaaccatatgatctgttgctgaattttggtaactcttgttctcatttctgaagtagccggaattattttttgtttctttcactaactaggctttgttaggttcttagagttgtctttctcctggttcttcagagtgatccttttctaatcagttctattttattttagctgtagtttagtgttacacctaatcttctgctggtttgtgaactttgttttgttcactctctgtttttttgtcagtttcatttgcaacttgattttcttttgtggagatgaaaaatatacttcagattttgacttgtttaaaacaaaataatatctgcatatagttataatttccttttcctatatctattgctgccatatctaagatgagtttatctgtttgtgttacaggatttggaagacagtataacatctaaatcgatagcattggcagacaagtttattctgttacactatggaaggtactcttacactgttaatctaatctaagcaagcaatagacagacgtttgtgaactcgttttcatttggtcatattatctgttaatctaatcttaatcttctgaaacttgtttcttgctaatgacagggtcaacgtctcaggaaccatcttctcagtgtgattcaaatcttcctaatagacttttcgccactgatcaatatccgaggggaaagctaaatatatactcaagaccagatattctatcctttctccggaaggtttttcaggggacaaaggaattggatttcattctgcaatcttgctttggacctctattcatttgccggttagtaagtgtgcgatgtctggtaagcttatgcatgccttgctatgtaggcagctggtaacgaagaaaaagtatgagctgtggacagtatttggtggatacccctgagatttgcattacctgaatttgcttgcgtgactggattgccctgtggggagttttctgaggattatgatccagatgatgatccggtttatgttgttggcatgaagagttactgggacgagttaattggtccagataagactgttaccttaggggatgtttcagcatgctaccaacaaacacaagacatt

SEQ ID NO: 20592 - DNA, 1680 bp, Arabidopsis thaliana
gtctttgctctttgagttttgtttgcttatatagctgaatgctaatatatatatatatatatatataagtaatatcatatatatggggttggagcttggtggtcttttaaaaatggataagtcatgggtatggctgccaaggaatacacttgagccacgagacacgcgcaacaacttttgtttacgcatcatcgagaagtctgggagatcatgctgaaatgttttgtccatgtattgattgccggaatctgtgtcatcaaccaattgagactattttggagcatctagttattaagggaatggaccataaatacaagagaaatagttgttggagtaagcatggggagatacgagctgataagttagaagttgagcctagtagtactactagtgaatgtgaagcttatgagctgattagaacagtttattttgatggagacgtccattctgattctcagaatcagaatgaagatgatagtaaggagccagaaacaaaagaagaagctgattttagggagaagttaaaggaagctgaaactccactatatcatggctgtccgaagtacactaaggtgtctgcaattatggggctttaccgcatcaaagtgaagagtgggatgtcagagaattattttgatcaacttttgagcttagtgcacgacatactaccaggagagaatgtgctgccaacatcaacaaatgagatcactaagatcaaatgagcttagtgatcaaacatcctgaagatgtttggttttgggtatgatatcattcacgcctgtcagaatgattgcatcttatacagaaaggagtatgagctgagggatacttgtccaagatgcaatgcttccagatgggaaagggataaacacacaggtgaagagaagaaggggattccagctaaggtactgaggtattttccaatcaaggatagatttaagagaatgtttagatccaagaaaatggccgaggatctacggtggcatttcagtaatgctagtgatgatggtacaatgcgaaatcctgtagactctttggcttgggctcaagtgaatgataaatggccacaatttgctgctgaagctagaaacctgagattgggactttctactgatgggatgaatccgttctctattcaaaacactaagtatagcacctggccagttttgattgttaactacaacatggctccaacgatgtgtattaaaccaaggttagaaagacttccgctgtgtaataagaaagcaaatatagaatttagcctcgtaaaggcaattctatggttaatcgcaaaaaattaagaggttcggccgggagaaggcgcaaacttgagtacacggtcgccggacgccgagacgtccgggactgggtctcacagcccttggttctagttcttacactcaatcatacccattacatctagctataattgtctcctaaatattaaccaagcttcttcttgcttctcaaacctttgatggtgaagccaaaggctgtatgagtctttggctttgtattttctaacaaggaaacactactttagcatttgggatcatattgcggttcttgttcttatactcaatcatacacatgaaatctagtcatttttgactccaaagcactacccaagcttcttcttgcttcactaagctttgatggtgtaccgaagtcgtatgtgtg

SEQ ID NO: 20593 - DNA, 444 bp, Arabidopsis thaliana columbia
taatatatatgttctttgcaaaaatatgttgcaggagtcctttgagatttattctagctgcagggactggaactttatttctcgtttctttgattgtcttgagaatttatctggtattgaactttcccagctttctctccaaagaggtctcacttgttctgagctccattgatttgttcttgacttttggtatatattataggggtggagctatgttggagatagactactttctgcagttataccttacgaagagagtggatggtatgatggacaaatgtgggtcaaaccacctgaggttagcaacttataacttcttttgtgtagctaatctacaggaagaatatagaaaatcaatcttatcacctaccgagttatcacatgttttcatagttctagtcatttgtggtagcttggaattggaagttctggttttgatagttt

SEQ ID NO: 20594 - DNA, 2079 bp, Arabidopsis thaliana
atccattttcggggctagttgattcggcaggtgagttgtacacactccttagcggtttcgacttccatgaccaccgtcctgctgtcttaatcgaccaacaccctttgtgggttctaggttagcgcgcagttgggcaccgtaacccggcttccggttcatcccgcatcgccagttctgcttaccaaaaatggcccacttggagctctcgattccgtgtgacggctcaacaaagcagccgacacgtcctacctatttaaagtttgagaataggtcgagggcgttgcgcccccaatgcctctaatcattggctttacccgatagaactcgcgtccgagctccagctatcctgagggaaacttcggagggaaccagctactagatggttcgattagtctttcgcccctatacccaagtcagacgaacgatttgcacgtcagtatcgctgcgggcttccaccagagtttcctctggctttactgtaacgcccgcgatcctcaataggatcgttggctaggacttggtccgggagaagaaggtggagtctcggacaagtgagaaagagctggctataagctcggacaaaggggaaatcatgcaggctaagctaggatcgtaaggaaatcacttgggtcagctcgcccaaagctcaagctcagctggaaggagtgacagttactcaggtcgagtgacagtccaactcgggcagctggacgagtgacggacgagctcgaggtagctggacaagtgacggacgagctcgaggtagctggacgagtgacggacgaactgggcggttatgggcgaagagatacaactctttggaaaggtgcaactcttcggaagggcgcaactcttcgaaaaggtgcaactcttcaggaaaggtgcaaggaacggatgtgttgattcgggaagcatccattcgccccctatataaggaagggcgcccaggaccattccactcaccacaacacaccgaaaacacaagaaaactcaccattaaaactctctccctcttgggagaataaatagtcttaggattcggtagccgggctatggccggcaataaagaaggagggtcggatcgacctaacctcgagaaggaaggtaagggatcctagactttgagtctaagggttctaggatgtgagttagtagtcggatccttgaaaggaccgactagagggctgagtagtatccgggtcatgtgcatcctacacaagactcggtccgggtagggatcggctgaggcggggacgcggctcggcggacgaccggcgggtcttaactgacctgccgagaatcggccggactgatgcgcgatcttcccctctctgaattctctccacggatccgagtagtgtatggcatatagagcattgcatggacttgcatatgattaagtaaataagattacttatggctctatgactttcaggaacgaatggtgatcgtgggaaggacttggcttaggcgcgagagactcaaggccgggatgatgggtggtgatagttcggatagtctagggatcgattatatgacttgtaatagcttatatgcaaactcataggttgtatcgaatcctttgcttaattaataaagtatccgattgtttgtttactctattcgtctcatatattgaatctcggaatcatatgaaacggattagactaggaaagaacctcataaacggttagggccgagtcacttagtggcttgggtcgagagaactcgcccggactttaggcagtccggatcggggactttcagaccttcagaggcaggtggtgggagtgagtccagcggtacaaccgaagaagactcagcagcaggtgacacctagcaagggcggcaagcctgcacaggggcagaagaggaagtgggatcatccttccagagctggacagggtggtcgtgcaggatgtttttcttgtgggagccttgaccacaaggtggcggattgcacgcagcgagctgagatgagggagtgctaccactgtagggagaggggacatctccacgtcaaggttgctggagggcagtttctagcggttcttgggagagcgaagggtgtagatattc

SEQ ID NO: 20595 - DNA, 521 bp, Arabidopsis thaliana columbia
gcttgtggattcgatcgttcagaaagctggtatcaagagtaccgatgtgattctcgagatcggtcccggtactggaaacttgaccaagaagcttctagaagctggcaaagaagttatcgccgtcgaacttgactctcgtatggttctcgagcttcagcgccgttttcaaggaactcccttctctaaccgcttgaaggtactctactgctcgattgttattgaattcgagcatctatctattcattgtgatgattcatttatctttgtcttggaatatagattcttgtgtcttggttactggaacatatgctgactgttctactttgtctcttttaaaggtaattcaaggggatgtgctcaagacggagcttcccaggtttgacatatgtgtggcaaacattccgtatcagatatcatctcctctcacattcaaacttctcttccatccaacaagcttcagatgtgctgtcatcatgtaccagagggaattcgccatgagactcgttgcccagcctggtgac

SEQ ID NO: 20596 - DNA, 520 bp, Arabidopsis thaliana columbia
cctttttaatcttattctttgcttttgaatattcagctactcagaaaactgtggacggcccatcaatgaaggactggagaggaggccgaggcgcaagtcaaaacatcattcctagctcaacaggcgctgcaaaggtacccaaatttgtacagttatatataaacatagcatctggaatcatatttaagccatgacttttttacttgtctcaataggctgttggtaaggtccttccggaactcaatggaaaactaacaggaatggccttccgtgtcccaacaccaaatgtctctgttgtggatttaacttgtcgacttgagaaggatgcatcgtatgaagacgtcaaggcagccataaagtattactctcaaaacctgttcaactaatttgcgtaccattctctatacatgaataaaacatggaacttgtaataacatctcatgattttgatttgaaatctctaacaggtttgcatcagaaggaccacttaggggcattcttggatatacagaagaagatg

SEQ ID NO: 20597 - DNA, 599 bp, Arabidopsis thaliana columbia
catgtttgataatgcgattttaattaagaagaaataaacttatagttttcttatgcgtaagattgtacaacaggattagtttactattattgtaattgtaagggcatactttttaaataaaagaataaaaaattgttttaaacatgttttgtcataataaagaaatttaccaatctgctaattatctcaggtgcccatatttttgatgcacatatcagttttcatcactggccttgtgttttcggcatacttttcatggagattaaccgtggtggccatcccaacacttgttcttcttctaatcccagggttgatctatggcaaataccttgttcacttatcaaagaaatcttttaaagaatacaccaaagcaaactccatcgtggaacaggctctaagctccatcaagacaattctttcattcacagccgaaactcaaataatcaagaaatactcggaagtcttggaaagacacaaaaagcttgggttaaagcaaggtcttgccaaaggtttagccgtgggaagctcagggatttcatcaccatttgggctttcttgcttggtacggagcagattggtgatgccaacaagaaccggtg

SEQ ID NO: 20598 - DNA, 422 bp, Arabidopsis thaliana columbia
ctttcctttatcatttgatatcagtgatcttgatttccatcaacctctattcatgttcccaatccatcttctttgtagggatcctacgcaaactggtgctgcgacaggtactatattatctgtaattgaagtatgaaggcttcaactagttcacttagacagtgtgcttttttttgttcttttgctttactttaatcgtatattcattacgttgcttattgagtaaatcactactatggaaatatttatagggacagccaataacggaggactagatttattgatgaatatgtttggcagccttggtgctggcggcctaagtggcacaaaccaacccaatggttagattcactaggggctatactttgatttcttatatatctattgagatggttcactgaaacatgtctatttgattccag

SEQ ID NO: 20599 - DNA, 515 bp, Arabidopsis thaliana columbia
agaggatccccatagagagatcattggtgtaattaagaagaaaggatttgaaaagatcatcgaatcatttcaattatatgaagcttcattatataaaacaagctaaaattaacattgattaataacaaaccaaaacgcaaacaactttttattaaagcttaatgacaataatgaccaaaggaacaatacttcccgccaccgccatgaccaccataaccaccttcatcgtcttcttcataatcatcatcatcatcattgtttctactatgaacccaccacaacagattacttaaagagttcccatcatcaaacccatttaatcctttaatcttctccattgctccatctttgtcgtacatactttccaaagcatacacaaatcctttccacccttctccgacgctgtctctagccaaagcaggcattgtccaattcacgagctgtttcacgaatgtcacgtccgagaacagaacttctgataccggaagtaacggtaataactgtatcccaaggcg

SEQ ID NO: 20600 - DNA, 575 bp, Arabidopsis thaliana columbia
tcagctacaaaacgctgcgtctaggaagattactggtctctctccccttgcccggacccggtttaccaaaccaataaatcaaaatcacggatatgctttttagggtttcgactcgattctgagattttttgcttgcaagattcgttgcttttgtgttctccgtcaccggagttttaccatcgtgaaatggtgcgattgtggtgtgggaagctcagactttggaaaccctatttagcgttagtacacagagtagaaacagctggttctgttcgggtggtggagctccctctcatcatcttcacatcctcaaaaagtatggcagctcagagatcacagagatgatcaatcggtataagcgaaacgtagccggacacacattgacgcagaattcaatggtaggtcagtacaaaacaacagtttctccaagtgttgctcaaaatgttactattgagacatttgattcgttatgtattcaagggaattggagagaagctgtagaggttttagattacttggagaataagggttatgctatggatttgattagacttttagggttagctaaactatgtggt

SEQ ID NO: 20601 - DNA, 611 bp, Arabidopsis thaliana
cacaaacctcttcagctaatctttctcccataacatcaacaccatcaaatgtctgtgtggaatggttgcgtttactgcctgcaaaatgattataaagtatcacaagccattatttaaaaactattataaaaatccagtaaagtgagatcaaaatatctaaagtgtgattctttcttccttccaataatcaatctgtttcacttgagacttccaatcacaaatttactatagaccattaggaggaaactctgttttaattgaaaaaatatagagaaagaagaactcacagtgaacgaggagatcctgaggatacttcttaagcatctgcttagcggcgaatctccaattctgagcactgtacccacacacaaaatttaaaatcagcttaaaatagaacaaaatcaagcacataacataggaaacactaagaacctgccgatgagaccgttgaccatgacgactaggtgagtcggctcagtgcgttcgccagggaaatcaacagtcaaatcgacgtttccactttcgtctgattcagctctgagacaacccatccaatactttttcttcttcttcttcgtctctttatcatcactcttcctgcttctcatctt

SEQ ID NO: 20602 - DNA, 544 bp, Arabidopsis thaliana columbia
cttggttttattttaattagacataattaaaccacatggaaattttaagagaatctaacgtcgttttctattctcctttcatctggtaaagtcatggacaagacttgccctatccgctacattaagcctccaagaaaggaacggaacaccgccgtgagcaccgtcggattcaacgttgtttgctactccactgccgtaatcatccatgaacctgatctcatttgccggataattacacggaaccctctgcgtcgagtggtgatgagcccacggagtaccattattattgttgttattagtggcagcatggtaattattgtagccagagttgtgatgcccgtactggtcggtttgaaccggtgcagctccgacgacggtgtttcctgtagccgcagtagttcttctctcttccttcttgaaacgaatgccgcatgcgttgcatagggactgcaaattccaaaaccatccatatcatcattagccatcaatatatcttatatttaaagttcgttcaatacataaatctctatatagtgatgaaaat

SEQ ID NO: 20603 - DNA, 515 bp, Arabidopsis thaliana
cataccgccctcgactgatcatagatctcaacgaccgtaacctcgtacttgtgagctcgaagattgaaatagtggtaaacaacccaattttcactaaacacctgaaaacaatttgaagcctaagaaagttgcattgaatctgtgacaaaaagaaatgagatgaaattgcatgaggacttaccgcatgaaccggcccttgacagccttgatgtgacaaacggtgcagtatccgtcctgtgatggtgtcaatgaggtatactacgagtgatgactcctctggcgtaactgagccaatctcaccagcaccttttggtgaaacggtggccacaaacagtaagtttcttgatacatatttatacaataggtcttggtctgtgttgactttggcttgtgtatgaacaacctggaaataaaaaatcgtaagccatgattaaaaaatttaaacatttatgtgataaaaaaaacattatcaagacttatacctcattaggttttcgtgttagctgtgaaatgat

SEQ ID NO: 20604 - DNA, 810 bp, Arabidopsis thaliana
tacaacaattttacaacaacaaaatgcagacttgcgaaatctgctggcgtacaaactgtttctcatattggtgatgttattgaatgttaaacgacggctttgagtagagcctcatgtacagcttctttggttggaagggccgggattgcgcctctcactttaacggttaatgccccgcatgcattcgcaaacataagagcctctctcagtcgctcttcgtcctgagtcaaacaactcagttttttcagctatatgcttttgttgtcatgaacatatgataagaacaaagctaagaaactgctatactacgatctgccgagaaagccttataaacctagccctcactaactgctttctcaccaaactcaccatagctataaactgctacatgcctacatcgagtttaaaatgacaaatgaaaggttacctgaagcaaggagagatcattggctagttgcgatagtatccccgcaacaaatgcatcaccagcacctgttgtgtccactacatccaccttcaatccatgcactctcccactaaaatcctgtaaagtggaacaaagtttttaagtattatgacctcacattgcggtaaaaaaaaccgccgttaaaccttgagtaagaagagaaaggatacgtagttctcatcataatccgctttaagttggacaagtgtatcaaaaccaaaaggtagagaggaacttttcacaccttggtgtagtaccgacagccttcaggaccttcagtgacaaggagaagtttcagcttaggatgaaacaacttgcgtacaacattatcatcggggatccta

SEQ ID NO: 20605 - DNA, 526 bp, Arabidopsis thaliana
ccgtttccatactcttccatcagaaagaagaatagcaaatgatcaagcccaaaaggtgacagaattgttgaagatgagtgataaattaggtccaaaggagctgaagagagaagaaagtattctcgttgttaatgttcatcctcgctcatcggaattagctgcctctggttggccaccgtggcttatttctgtagctggtgaagcccttgttggttggacccctggtcgtgaatctcactttgagaagcaagaacaagtctctcgctctttctcttcctttctttattgattctcatatgataaagagacttattctctgtatttgcaacagattgggggaggaacattcagtaaggtgttcaaagctagagatcttcttcgtaacaagaccgtggctttgaagagaatccggttcgatatcaacaactcagaaagcatcaaatgtatagccagagagatcataatcctgcgcaagttggatcacccaatgtcatcaaattagaagggttaatgcttgtagacacga

SEQ ID NO: 20606 - DNA, 594 bp, Arabidopsis thaliana columbia
  unsure (1)..(594): unsure at all n locations
nnnnnnnnnnnnnnnnnnnnnnctaaagccagacggcataggttttgcccgtttcctcacctttacgataggccgggcgcgggtcctgcgcagtacttcgcggataaacagcgttaactgcggataacgcttctccagcgtcaaaagctgcttttcgacctctgcggtaaaactcatcgccatctctgcagctggcgcactttgcgatagctggcactggcatcgggaagcgattcggcaaaggggagatacggtttgatatccactaccggcgtaccatcgaccagatccagactgccgagcttcagaatcacgctgtctttatggcaaacaacctctttcagctctaccagcgacatgccaattgggttagggcggaaagtagagcgtgttgcgaaaacccccattctggcgttaccgccgaggcgcggtggacgcacagtcggacgccagccgccttccatcgtttgatgaaagacgaaaaggatccataaatggctgaacgcttccaggccgcgaacggcgtcggcctgagttgtagggagcaatgagatgcagttcgccgttgcgctttttaccagacctggctggcgc

SEQ ID NO: 20607 - DNA, 544 bp, Arabidopsis thaliana
gagcgtaccataaattgtttactcaaaacttcatttttactagccaaactacaaaacaattctacatagttcatgccatacttgaacccaaaatctaatgttagcaggtcccttgcagcagatgaatcaacctaaattctattctcatatcgtttatcgatttgttaataagagaacttggttggtactgtgttttcttgccacatcataaaatgtaaaagaaagttgagaaactttaccaaaagcattccattcattgctctttcctccagatacctcgatggtttgaaaaagctgccataagtctccgacaatttcttgagcctctcatatatgtactttggtccaacagtgtctgcccagaaaacaattcctcccctgcaacaggtaaaaaaaattgcttaacataagaaatgatcatacaccaaaaatcttagtgactaacaaaagaaaggaaaaagttttgaggatattgtgaacgtttgtaaatgaccagaagaaactcaaagatgtgaaaaaatcatatgcataagatttgagcaga

SEQ ID NO: 20608 - DNA, 524 bp, Arabidopsis thaliana
taatgaggctatcggcttcttcagcgggtagcagaccgctaatcagatcgcactgatagcgaccagcgtttgttgaacctgatgcgcagagagacgatcggtctggcttagtttcaaccagttaatcaactggttagtggtgctaccggcggcggaaaccaccatcatatcgtcaggctgagagtactccgccataatgcccgcgacacgcaaataacacttcacatcagccagactactgccaccaaatttatgcagctgacgacctttcgcccctgcctgcgcaatcacactcatttttaccccttgtttgcagcccggaagccattttccaggtcggcaattaaatcttcgccatcttcaataccggtggagatacgcagcagcgtctcggagatcccggcggcagacgcgcttctggtgccatgctgcatgtgtcatggttgcggcgtgagagattaactttccactcccctaatgattccgcagcgtaacaacgacagccgcccaggaaacgacgcagc

SEQ ID NO: 20609 - DNA, 547 bp, Arabidopsis thaliana columbia
tggacgcaaaggtgactttataaagaagatgtgtgaggagactcgtgctcgtatcaaagtccttgatggtcctgttaatactcccgatcgcatcgttagtatctctatctccttctacgtgatttactgtgttcaaagctaattcgaatttggggatttttaatttctatttctagggtttcttaatcataagtaggaagattcttgagttgtgatcattaaagttgtgaacttttatcccctagttgtgcaatttgattactttatggttccaattatagtttgaagtgttcactaagttaattacttgctcaatgttatgttttaggtgttaatatctggtaaggaagaaccagaggcctacatgtcaccggcaatggacgcagtgttgagggtgtttagacgtgtttcagggttgcctgataatgatgatgatgatgttcaaaacgctggaagtgtcttctcttcagtgcgtttattagttgcttcaacgcaggcgattaatttgattggaaacaaggatctttgattaagtctatagtagaga

SEQ ID NO: 20610 - DNA, 636 bp, Arabidopsis thaliana
ggcatccacaatgttccaaataatacaatatacaaacagattcaatttcccaattctaatccaaagatggtaactttgtaacaaaacaaaaaaatcaagtcactataacttatgtataaaccacaaaaccggaccttgaagctaaaatctgatgatgatcctctaaaatggaaaagataatatctctgctcagttgttatgatcaggtgtaatctcattgtttgtgtcccctgcgttgtttcttgttactctgctgagctgaattcctgcaaaacctgcaccaggaccagcagcaggagcagaaccagaaccagaatcaggaccaggaccagcctgagagcttccttcgtctccattactagctgcagcttttaggtctctcttttgtttcactttctgtgcccaaccaacaagaccaacctgcacattctcctcgaatatagctttcttgaagctacttcccatctgttgtaatataagaaaagggtcaacttttcagaaagaatccaaaaaaccaaaccaaaagattctcaagctttttagtaaaaattagcttgttacctgtgagacgatggcgtaaagaggcagtgtactgtactgcaaacacttgaatgaagacctaaagagaagaagaag

SEQ ID NO: 20611 - DNA, 164 bp, Arabidopsis thaliana
gcgacgatagcttccagctcgctcaacatctcttcatagccaaaatttttggcggtgcgagcaggttctttcgccaccacgggcttcaccggctggcgctttttggccaattttttactcatcatcatctccctgtaaaaacaactagacaggcaaatctatca

SEQ ID NO: 20612 - DNA, 557 bp, Arabidopsis thaliana
tagtaacgtccgacagtgtgctctaaagaacggccgcagtggcgtaaatgtaaaagtcgaagaactcaatggctgtgccaatgagagaggcgacaaggactttattacgcgagttgatcggcgtgtattcttgctcgtggtcgagtgttgtggctgttgcttgcataatcttttcttattttttggctaacgaatagccatattacgcacagcaaaagtgatatttcaatgtgtaacaaatcgcggaaatggtcaaaaatcaggcaaaaaggggataatgtttaggccagtgatttttcttctatgaaatgcttcacataattttataaatagtggataaaactggtttcaggttaaataaaagttaccaactggatttatatgctggggttatgagttggaatgaaattgtttgctcccaaatagatggctgaagaggctctggggacgagtttcaagaggttatgtgcgcattataccggatgcgatgtggcgcatcttatccggcctacggggagccaggccgaataaaatcgtatgccggataaggcctttaa

SEQ ID NO: 20613 - DNA, 338 bp, Arabidopsis thaliana
ctagtagcttccgccagtgtgctctaaagcatcatctccctgtaaaaacaactagacaggcaaatctatcagcaaagcgagcagtgggtaatcggcaaccagcgtactgttagcctcgtcacgaataaacgctccatcaccgcaggtcagcgccgcgttctcttcatgagagcgtccgctatgaaatgtccctgtgaatcgattgcaaatacgcgcgtggcccatgcagctgggaattcgctactttcgcctttatctagcacgatatggctcagccacacttgctggcgtatttgcaggtttactatcggatactctggcgaggcgattaattgctg

SEQ ID NO: 20614 - DNA, 549 bp, Arabidopsis thaliana
ggacttaacccaacaccttaccgatcatcaccagtaacctttgcatgaacacgatccatttttgaaatgatggaagcgacttgagtccctcaatataatatcatgatcaatgattctggacatgtatgtgaatgctgtatggcaatcaccacatacccgtaaattcttagtaatcctgatagcagcaccttgcggagttgttagaataccatatgcaagagctaacttctcactatgctcgaaaagaagatcatctttctcttcatcgtctacatcatgaagagcaaagcctgtttcaggaacataaccaatgtccttgatgcgttgcatgtgatctaagaggacctggtatatttccttagcgtgtggatgagttttatcacccacgaagaacgtagtagttcctttaattccttcaacccaactacaaccaggtcttttcttaactcctttatgtctcatcaatgatctgatcctagtcacatctttccaacgccctgcatttgcatacaaatttgagagtaatgtatatgatcatcatgattagat

SEQ ID NO: 20615 - DNA, 1621 bp, Arabidopsis thaliana
ccagctgaatcacaactaacataagcccaaccactacaagcatcatcaccttgccaagactcagccaacattgaaggatatcccaaacctccagccaccgctaaaagcgtcatcacctgaggactacagctttgtccagctttagtagtacaaaaaacgttgtggtctattgttactttaacctccggtgaaaacaaaggaagaggtccttgaaatttattgttatctagagaaatattcttcaagctagcgagtgtaagaagcgtcggaggtactattccggttaaatcattatcccggagctgtagatcgaagagattctcgctcttggagagatctggaatcggtccaaagaagtgattcttgtgaagccaagcttgtgacaaggacgtcatactcgaaagaacttcgatcgttcctgacattcctaggtcttgattgttgatccaaagattctgaatcgaagattttccaagcgacggtggtaaaacgccggtgatgttgttgtaagataaccggagattttgaagagaagctaaggaatcgaaaatgtcaggcaaaactccggcgatgtttgtgttatcgagataaatcgtagtgagagaagtcgaatcgacgagctccgatgggaaactccaagtagtaatgttgttgttatcgcttaaactcaagatctggagactagtaagtccggcgaaagctccggtttcaactccgacgaaattattctcatccatatagatctcttgaagagacgagagtttagcaaacgaagggattgtaccggagagtttgttacgttgaatagaaacagatttgagctctgaaagagtcgagatctcaggtgcgatgaatccggtgagagatttatcagcgaggctgatggttgtgacacgaccgccggtacatcgtacgccggaccatttgcagaaatcggtggtggaagaccaatctgacggcggaggattgaatgatttagctaaagcgagcattgctgtttggtcatcagcgacggaggtggtgaagaaggttatggttgtgaggaggacgagaaggaggagaggcgtaggagcctccattgattagagaacacgcgcggcgcgtagagaggaggaggatgaagaaggaaggaggaggaggaggaagaaggagattggtagggtttggtaatttttctgttttttgatttttgggaagagagagagagagagagatgatgaatggaagcaagcgaagagtgaggtgtcgttacttagcttattcaacagatcattactattataaatctaaccatattattatttccgtcccgttccgttaaaaacagaaactacgcgtttttgttatgaaaatataaaaggtgtaataatgtatgaataaagggattaggtttgtttgtaataagtagtgttttaaagatatggatgataataatggaaatttgggtttaattgatttgaggttattattgagggaaggtggttgtaataatggagattaaattggaatcataatttgtgtttggtagtatggtcggtaattaagaaagtttttgaagcataatttaaggaggtgataatggagattatttatgtgttacatgatgattgtgaatgaatgt

SEQ ID NO: 20616 - DNA, 475 bp, Arabidopsis thaliana
tattttatttcagcatttggacataatggtctggtgcatcagacatggatttctggatgatgtgaggtctcgatattcgaatttcacatcgtggaatgcactggtaggggaaagaaaatcaaatgcagttaagcgtgcatggcctgatgctgtagaccagtcttcagattgcagtgtacagagtgcttccctctttattgaggatgctttagaaaatcttgagagagagccagaatacagtcaggaaataggtgccgacctagaagttggacgtttacagaaggataagagatcatttcttaggtccaaaatagagggaacttcaggatcttatccatttgagaatcttagaactgctgctgacatgctctttttacatggcggttcagatttggttgttgcgacaagccaattgtatccttttgtcatcgcctagtttcacattacattgcactttacttttaatgaatacttg

SEQ ID NO: 20617 - DNA, 521 bp, Arabidopsis thaliana columbia
agagacatctcactaacaaattcggttattcgttttagacgctcttgtgcaatcatactgcatcaacaagtgaatgaccttcagcatatgttttgcggtctctgtttaatgcaaggaaaaagcactactaagagtaggggcatcttatgtacctgtttaacatctcaaagtgtagttcaaaaaaagggactctggtcaacaagcagtagcatcgaggtgcagaaaccaaaaaacgactgcctcctccagatgaatgcaagggtgacgcagtgcttaatacaccagggggtctctgaacaatctccgagacatgtaagcaaacaccatacaatgtcgcatcatctgctacctgacagataattttgatttgcctcgtgttagattttacatgactagtggatatctgacactaaaaaaaaattaaaggggcataaagaaatggtaagagtaccttgaacgaaaatatgaatgacgaatcatcagtgcctaaatgtcctgcagtaaattcaaaagtatgatat

SEQ ID NO: 20618 - DNA, 2328 bp, Arabidopsis thaliana
tctctatcccgcccacttgtgttctgtgtaatgaccttgatgagtctagggacaccttttctttcggtgtcagtttagctcagagatttggagcttcttcatgagagccttaaacctcaatccgcctcctcagtttatgcactgtctgctttggaccttgactgcttctcgagacaggaacatcacgctcatcaccaagctccttttccacgcttctgtctatttcatttggcgtgagcgcaatcttcgcattcactcaaattctgttagaccagctcatttgatcatcaaggaaattcagcttatcgttagggctaggttggaccctctgtctcggtcttcccgcgtcgtctctcagccaggctcttctcttcttgcctcgtggtttggagtgtttcagcgttcacctgtctctggttaatgtggagtttattttgcaggtcctctgttggctcagcgttgttctccttttgttttgctgagatcttgtcgtccttgggttctctctgggcctcgtcgctgggattcaggttctcggttttttcttgttctgttagttgttgggcctgcgtgccttctctgggcctgcgtgcctgttgtatggccttctaagccttgtaacctttttcgttttattggaaatttatgaaaaaaaaaaaaaaaaaaaaaaaaaaaagaatatgacacataaaagagtttttttttcactattcctaatgatttcagcacctaaccgttaattgcagaggagaaaatgatttcaagataaagagtactaatgaatgaataaccaaccttagtgttgcatcattatgtcaagaataaaagagaaaaaaaaaagcgttacaaacatgccgtttcacaataactgaagttactgaacaatgggatgtttttttagttactacataaataaaccaaacgcacgccaaagatgccaaaacaaaaacggcacgtcgttggctatcacctaagctttgaaatggactcatcacagcatacgcacacgcatacagtctccattatatacgtctgaacaatctgccgttttcatacatcacaaagaagttgaaaaccaatcacagtcgttgggtatatgctctcactcacataccttctcccagtcatccaccacttcttcaccggagccttccaccaggttgtttaccgctagtttttgaactactgctctcttctatctgagcaattggctccaaagtggatgtgctggccttcttgggctctaaaacactccaacggttaaccgaggtaacaattggagagttgctctttgctgatctcagcgcagaggcttgagcatctgtagatgatcctccaatgggggaatcttcagctccccaggagtcatcactctcctgaatcacagctctcctccatggatttcctttgtcaacatcccacgccgagctgccaggtaattttccccatacattattaagtgatggagattgcccgccgctctggacaaccacagctccatgatatactgaaccgtgctcaagcctcctcatggcagtggcagctcgggcatggtcgtggaacaccgctaaagcattcttgtcattcagccaaacaagctcacattcacccccaaatctcagtaccaaggcgctgatattcgcctctctcggaagatccagaaaagaaaccacaagtccaggatccatatccaccagcgaatcatagaacggtgggtgtggccctcctatcgagatagcaccacccctagctccaatgatccttgttggcggtttcgattttgctgttacgtgaaccactgtaaaccgttttggctcccaccctgcgttgctaacaccaagtttccacctctcagctataagtcgaaccgtgtctcgtttatccttctgcatcgggcagaagatatggaccttaagggcacttgtgcttcctcttgctttcccaagtaccaagaacttgcagcgctcttcaacagccagtacccactttggatcacgcctataaaggtctgaaataatctctgtcatagcagaattctcgctgaaatgtaatgcctccagatttgggggagttatatcaaatgcatcttgaagaacccgcttacgctccagcttcgcacactcatcatcacacgaaagctttctctgcccgagggggatacggtttcgctcgattcaacaggctgaagtggagctggaagcttctgtaaaacagaggcttcatcataggccgcacagtaaacattagaaccgttggcacttcttccccagcatcacaagggacggtagcggttatacgaccacatgaacaagtaattgtgacctgaaa

SEQ ID NO: 20619 - DNA, 594 bp, Arabidopsis thaliana
gaatttgattgagaagggtcataggaggattagtccattttttataccttatgctataacaaatatgggttctgctttgttggcgattgatcttggtcttatgggtcctaactattcgatttcaactgcttgtgctacttcgaattactgcttttacgctgctgcgaatcacattcgtcgtggtgaagctgatatgatgattgctggtgggactgaggctgctattattcctattgggttgggaggttttgttgcttgtagggcattgtcccagagaaatgatgaccctcaaactgcttccaggccgtgggataaagcaagagatgggtttgttatgggtgaaggagctggtgttctggtatgtttcacaaattcttaatctctcattgatactatgaatctacatacatttggcttgctctgttttgaattgtatataagagcctgttttggtcttagtttatagaatctgatgaaacttgtgttccctagtctattagctctggaagttccttgcacttgaattgtactcatttcaaagttggtttacccaccatgagattgcgcatacatgtgacattttgttttggagag

SEQ ID NO: 20620 - DNA, 2107 bp, Arabidopsis thaliana
tatcccttttcttgtaagtttccttttgatcatctcgatagtcgtcttctccttgagttctcaccgtgtgtgttaactctcttatagctttgtcctgccatatagacttctccttgagtactaaccaatcatttgattgcaaaatgcgtgactggagctatttggtggaacatgacttctctggacaagttgaaaggttactcgagttgacggtcgagcatagtggtcgagtatgagttgagatttccttgtttgatgccctaacctctgttttcgatccaaagaactctgttcctactactgccttgtgtgagtctaatgatttatcatagctcaaagtctcactagggagatgtctagcttcaccaatcctagtcaaagcagtttcaacctgatctttaaaagcaggctcttctaatagttccttagctagctgacccttttcatcaactaagaaggtatggccgtctattgttgttttcttcatatcatctctgatgtcaaacttcattttaagatcatttcccaaattaagatctatctttccctgcttaacatcgatgactgctccaactgtggccaagaagggtcttcccaagatcagaggatctttaggtttttcatcaatctcgagcacaataaagtctgtaggcacttctactccattaatcttgataggcagatcttcgagcatgccatagggttttcttaaggtcctatcagcaaggatcaaggataggtcgcatggcttatattggacgaatcccagcttccttgcgatggtgagtggcattaagctgactgaggtccctaaatcacatagacaattgttgaaagttaattgtctaatagagcatggtagagataaagatcccggatcttccaacttttcttgaacaatcttcttttggggtgatttcaatacactcttgaattgacgccaccgttccttgaacttctttgatcctctatgtgaccatatccttcacatacttgtgtgagtccggtattagcgcaagacagtctactagaggcattgtgatttcaaggtccttcaattgtttttccaagtgagcttcatacttctttatcagttgctttttgaatctccctggaaatggtagtggaggcttgtagggtggaggaacaaagactttatacttggttttagtagcggcatgctttttaagagaaggaggtactacttgagcttggaatcgatttctgcaatcgagtatgggctcttctattgctatttcagctggaacttcattctgatcgaaaatctcccctttttgaacttcactgtccctagtgatagaggtagaggcatgtcgagttggcagctctcgatcatggcagatagtcatggcgtgaccggtggcatacttcttagggttctgaactgctttccctagaagctggcctaggttgttggtaacagatggtgaagtggggatgccttcaagatatcgtatcctggtgctcaaggattcgtacttgctgttaagttcgatgaagtgtcggtcaactttgttgtgtaattcaccaaacttcttaacgatttccattgctcctatggcttggccttgaattatctgctgcagcatggtcttcatgtctgaatccggagttggtgaaggttgttggttttgctgctgtgtgaacccaggtggtggaagttgctgctggtaggtgccctgatactgctggttaggaacatacccttgaccttggttgtatggaacaaagggcttgggttgattctacagctttgaagggtagacctggtcttgtgggtttgcaacattggtacttctgtaaaacagattgggatgattctgcttgtagttgttgaaacctttgttgtaacctccttggttttgcacataactgacttcttcagactgcagagtctccccatcctgaacttggaatgtctcatcgtcacccacaaaatgaacgtgcttctgttgcacaaggagtaacttgtccagcttgtcattcaaagctttcatatccctgcggtgcttctcatcagaatcagagttggtgaggatgcttctatcgtactcttcatggtagttgccatctgactgtgccaaat

SEQ ID NO: 20621 - DNA, 1575 bp, Arabidopsis thaliana
agttacgatctcatactgtatgccatgtcgccatacgatattttatgacaacaaatcttcgacatgtttccggttacctgttggaaggctttagcctcaatccatttggtagagtagtcggtgaggacaagtacgttttttagtctctttttcccacctgaggattccatgggtcctacgacgtccatggaccatttcatgaatggttaaggagaagagatcgacgacatttccccgggtggttggtgtagggtagatgcgtggtgttggcacttatcacacctgaatgagtgagctatgcaatcagctagcattattggcaaaaagtagccctgtttctttattctgagggcgagggtacgtccactacaatggctaccacattgtccctcgtgcatgctcttcatgaggtcttttgtttgttgccataagtgcacaccatgtaggatctaaaacgctatgtttcatgagcctcccttccatgatgtagtacctcgcactctatgctttgagttttctggcctcccacttctcgggggtgtgatccctcgttcgatgtaatcgatgattgggattctccagtcattgtacgtttcgggttcgtacggggcaagttgttcaggagtttcgtactttggctccttttccgtcgcactttgcctccgcaactgccacaagggctctagctgcggcggtggtgcttcaggttactcgtgtgaagttgccgggggttcagtcccagcgtgtttgactgttaggtcgatgcttgggtattctattcctttgaccggaataattcttttgacaaaatgatctgacgtggaagcgagagcttccaaggcgtctgccgaggtgttttctcctctgggaatcatggttagttcaaacgattcgaactgctaggccaaggttttgactagttcgaggtacgcttccatgcgctcgtctttagcttcgaattccccgtggaactggcgacgggttaggagtcgctataagagtttatttcgcggatcctcattccttgagctagtttaatgctagctatgagggcttcgtactcagattcgttgtttgatgcattgaatccttgtaagaataattgttcaatgacttccccggtgggggaggtgagttgtattccgactccggatccttgtcgatttgaggagccgtcgacgtggaggagccattttttattggtgttggttccatccaggtctgctagcgggggcttgattacaaagttggttacaacctgtgctttcaagttggttctggtgcgagactctatatcgtactcgcttagttctatggcccatttcacgagtcgtccttattgagtcggactatgcaaaatggttccgattggttgggatgtcatcacctctatgggatgtgattggaaatattgtctcagctttcgcgctgacatgactatggctagtgctagtttttccatcgctagataacaggttttagcgtctatcaacgttttacgcacgtaatagatcggtttttgtccttcgtgatcttctcttaccaagacgccgtgtacaggtacaacggttctca

SEQ ID NO: 20622 - DNA, 1553 bp, Arabidopsis thaliana
ccacaaagctttgattcatctcgtacgaacctcggttttgttcccgtgtcactgggagcccaaacatgttttccagcgtcttgattgtcatgacatagtcgcggtcgtcgattgtgaagcttaagtactgtgggttctgaaatccacacaagagattagttacgaagtttatgagaaaggagggctagatcttcagaagaactttgagatttatattgctaagaatgagtggacttttgtattgataatagtagagcttttataatgtagaatgagactacaagtgtccagtaataaaatgtgaatatctagctgaatgaatgtgtcctttccaagtcgtccttgcttccttatatcgacttgcgaacgtgggcagctccatccgagatccgcggggattctcctggatattcggaagattagctccgagatatcagggctgctctgcgaatatctctttgtcagttccaaagctgttatccgcatatctctcttcgtcagatgatcgagctcataaggcccaaatacttaattcgtacataggctctggagttgtgcaggttctctacttgaaggtcttgctgggcttgtgggctagcctagtatttttgcaggtggatccttggagggaaatccagctccaacatttgccccccagcccattgagtgagtaggtgaactcattgagaggagataatgttgataaggtgataaacaccataagattagtcgggtttgaggaaaagctcaataaaacggttaagattcagatttcctaaaccaaaagatatcgagtagatacgcaaggtggatcgctgctgacatggacgatcgagatgacacgtcctttcattgcacctcatctaacggctcagattcggcacgggaaagagatctctacaatttcaaaaatcgtggtgatgatggctctttaaataacttcccacgtctcaacttagtttcacatcaactcacacaactcccaaggtaacttctctcttccccattatttactgcgtttaatttttggttttagagataggaatttttatctttcttccgccatctccttcacgtttctctcctgtttctctcttcgatctgcttttctattccttttttcacctccatcgtttttcttattcgaaatcaagagatgagtgaactcgaagattcccagaacaagagcaaccacagctacggtgataatgaaagctcattagaatcgaagtaggcggcattttcacgactggaactagacgatgttggaaccctaggcggagcgggccaaatccggaggccatcgtctaaggccaatcgacctaagaagaagagcgctcctaagaagaagaagggaagctcaccgatgacgcctaatacccgaatccacctgcggaggagatgccaagtccgacataggtaaatatgatcctcccaaggtcgccgctctcacttgagaatgtctcaaagggatggtgttgcgcctatgccgaacttctgtgataaatataggttattcttgctgattccagcatgtatcctcgagatgttgt

SEQ ID NO: 20623 - DNA, 1262 bp, Arabidopsis thaliana columbia
ctatcacctactcacgggttcatcgtaccttcagatgataatcacgttcccatagcagactttcacggctgtgtcgaccaacaccactgcagaactagaccgctacaataggcgattttaacagaactgatctcttatacaccaaccgatcagcatttaagctacctccatttgaaagagaagactttgctatacaccctgcctattatgatcttgtatctagaggaaagtttagaggatctcctgatgaaacaccattagatcatttggaagtcttcgaagacatagtttcctctatcaaagtagaagctgaagaaagtagatgcattctttgtaccagctgattaccttctttgcaaactcttcccccactccttcgcgagcagaggaacatcatggttgcgtcaactggaaccagcttttaaccaattggactgatacaaagaatgcatccatgaaacacttgtttgcaaatctcttcgttcactcaggctctagccgagtcccttagtgcatcttggctactgatagtatgtttttagtcaattatcctaaaacaccaatcatgtcattgtagtattttaggttgtcaatccaaatgggtgtgatgctaacaatcaagatgcaatcagagttcacagagtcaagccaagcaataacaggttttggtgtgttctagcagtcataagtgaacatgaaggaaacagaaaatcaagcagaaacaataaaacactcgaccaacacagctcgttgcagagcactgaatgtggtcaagtgacaggtcgagtagcaaacaaaaaatgtaacagagatactcgactgcacagtctgttgccaaacaactgggtggtcgaatatctagtccagtaacaagcaagaaatgcaaaaactaggtaacatgtaacaagatgcaataaacaatagcaaagtaaacaaagaaatcaattagataaagaaattcccgaggatggggtaattgagtagtttcgtttcctcagtttacaggtgattgacatgctcaataaattatccctagacaacaagtttgataccaaatctaagtgccaccgcaatagagaccctcaagttaaccagtccagactcaatcaccattgacgagagctaacctaacaggcattacgaatcaacaagttaaagccaaaacgctccctgcaagcaataccttggtatagggccacaaatctctagaattagtggttcagacatttcatcgaacaccttttgggcgcggatatgtttat

SEQ ID NO: 20624 - DNA, 2422 bp, Arabidopsis thaliana
gtgctctatgatcaagcaaggtgggcgcagaaatgtctgggctcaaattccagttgatcagaaagcaataggcattaagaacaactaatccaaaagggatctatcaatcaaactcaaccacctagcatactgagaattctatactactctaacccatcctcagaaacctattcactactcaaacatcattgtagaaaacataaacgtatgataacaacattgtaatagcaagatgataacaggatgaacaacagtaaaccaaatcaagaacaaatactgaatactgattagataaatagaaatccggattacaaaaggtctagaacccagtgtctgcggaataaaacctagataaaaaacttgttctcgaaaatgtaaagtacatgctacttatagcaaaatattctgaaacactaatactcaaaacgacgcagtattgggacagattaagaactgtactcgacctaggtggtcgagtgggaggtcgagtgaatagctggagtcttcttttctttcttatgcttgaatgtctggttgagtgcggaatgaagaagactctgaagcttgccatcgagtatgtagtcgagtggtggtgatggtgatactcgacttcccggtagagaggtgtgatcgcggtggtgatctggtgatggagatgaagacactcgaccttggggtcaagtgaggtgatcgagtggtggtcaggtgatggagatgatgacactcgacctcagggtcgagtgatatgatgaaatcgagaagtcctctactcgaccagggggtcgagtggtctcttgaggtcttgaagcttctactcgacctcggggtcgagtggtttgacatgatcaggtccgcttcttccaattagctcgtcaacagctccaaatcacctcaaatcaacacaaatatgcaacatgcatgcaaacctatcctaaacatgcaaagtgatgacaaatgatgagaaatggtataaaacagtaatgatatggtgctaaaatgatgacaaagggatgctcaaaacatgcaaaatacatacttatcagctatttcaagaaatcagatagtagaggtgaatgctaagctggattcagttcataacttgctcacagggaagaagcatgtctactttgcagctgaggaagagactattgagcctgagcctaagttagaggaaggagtcttctacataaatggtcagggatacaggaagtttgggcaaacacagggcaacttcagtggcaacaggtttacagggaaccagggttcctccaactacactccaaatcctgctttccagaagacctttcctcaaagaagctttcacaggacctatggtaattcagcttaccaagcccccctcccctccaccctcagcagagacaagaatggaatcgatgcttgagcaaattctagagagccaaacaaagcttgttgtggagtttaatggcaagtttgatgctgtctacacagatcttaatgggaagatcgacaatctgagctctcacttgaagaagctagatgtacaggtagctcaaactgcataatctatcaagagacaatagggttttcttcatggtaatcctgatgctaacccaaggaagagctgcaatgccatcttcatcagagaaggagatgatgtttgggaggaattggacactaaagacgagttgaagctcgcagttgcagagatagtgtcgattgacaccctcctgtgtcgatcgacacatacgggactcctttctccagaaacgactcaatatgacggtgtcgatcgatacccctctagtgtcgatcgacactggatccggactgcaccttgtgaggtccaagtacctatgtagcccgagcccgtttacactcctcctgtcccctatccgaggaggcgtcattctaagcaggagattcaggctgctaagtgctcagccataatggagaagatcctccatattcttcctaaagatacttttgagacatcttttgccttactcaacaggtatgtcaagcgagttgttgacaatggaattagctcagataaagctaagctgcttaccagagacattagtgcaatcatgctgcctaaggcaaagaaggagaaggcatagagagtagacatagctgagtacatctgcaccattactcctggtcagaccattgcgaagcttcctgatccaggtagctttgttcttgattgctctatctccacaagcagattcagtcgctctttgtgtgatctgggatcaagcatcaacctcatgcctaagtttgttgctgagagactaggaatgactcactacaggcctactcgcatcacttttctctttgcggatcgttccaagcgaatccctgaaggaatccttgaagatgttcctgttaaggttggtaactctgttatccctgctgattttgtggtcatggactatga

SEQ ID NO: 20625 - DNA, 664 bp, Arabidopsis thaliana
ccctcctcgctggaatcgtaccgggatcctacaacataaacaaatcaaaaaccaaaaccggaatattcaaaagaaacaacagaaaaaccaaccggtttactgatcaatcaatcacctggtagaagaaaagcctactggacaagccaccaacatcaagatcccaagttctcgggtcacccacccaaccatcacccaaccgggtaggatatccatattcaccccaaaccgggtgaggcaaaagctgaagaatctcctgagcttgtgggttactataagcatcacaagtccccaccggaagctcaagatgctcggcgtttcccggcgcacagtaaacgtggtaagcctcgtaagggaagctccggtggtccgtacggtgaactctggtgccgttccgaaacgtgtggtacggtggacagttgtgaagactcttggggttgcaccaaagtggggtttcagggtttatgatcatctccgagtaacgagtaacgtcggtggttacgtcaccgtcgcagggcttgccgttgtttttccagcagcttccgatgtcgagaagatagaattgactcttgtccgcctccttgttttacatttagtgttagtctcactttaaagtttggtgactccggaagctaatacaaaaacacaacacatttcaatatttcat

SEQ ID NO: 20626 - DNA, 1781 bp, Arabidopsis thaliana
aaaagatccagaatcgacatgtagcatctcagtttgaaatctcagtatggaagaaacagagaacattgaggagttcagtgggaaatcagtgccatagcgagtgaagcacacaatctaggaaagaaatacaaagataagaaactggtcaagaaactgttgaggtgtctcccatcaaggtttgaaagtaagagaacggccatgggaacgtcgttggatactgactcattcgattttgaagaagtagtgggaatgctccaagcatatgaattagaaatcacttccggaaagggaggttactccaaaggacttgctttagctgcatcgacaaagaagaatgagatacaagaattgaaggatacaatgagcatgatggcaaaagacttcagaagagcaatgaggagagttgagaagaaaggattcggaagaaatcagggaactgatagatatcgagaccgaaattcaaaaagggatgagattcaatgtcatgaatgtcaaggatacggacatattaaagctgaatgtccctccttaaagagaaaagatctcaagtgctctgagtgtaatggtcttggacacattaagttcgactgtgttggatcaaagtctaagcctgatagatcctgcagttctgaaagtgaaagtgactcaaatgatggagactcggaagattatataaaaggtttcgtgtcttttgtaggaatcattgaagaaaaagatgaaagttcagacagtgaagcagatggtgaggatgaggacaactcagctgatgaggattctgacatcgaaaaggacgttaaaatcaatgaagagttcaggaaactgtatgacagctggttgatgctgagtaaagagaaagttgcttggctggaagagaagctaaaagttcaagaactgacagaaaagctgaaaggagagttaactgctgcaaatcagaagaactctgagctgactcagaaatgcagtgtggctgaagagaaaaacagagaactttctcaagagcttagtgacactcgcaagaagatccacatgctgaacagtggacaaaagatttggatagtatacttgctgctggaagagtgggaaatcaaattttggtttaggatacaatggtgttggatcaggtacaaagacgaattttgtacgaagcgaagctgtgctccaacaaaaagtcaaacaggttttcgaagcaactatgatgctgttccagcaagacgcatgtaccagaatcacgatcactatcattcccggagaactgtgacaggttacgaatgttactactgtggaagacatggtcatttcagagatattgctacaggtatgctgctaggttaaataagctgaagagacaaggaaaactatatccatatcaaggaagaacctccaagatgtatgtcagaagggaggatctctattgtcatgtagcatacacctcgattgaagaaggaataaagaaaccatggtattttgacagtggagcatccagacatatgacaggaagtcaatccaatcttgaaaattacacctctgtcaaggaaagtaaagttacttttggaggtggggataaaagaaaaatcaagggaaaaggtgatttgactaaagcagaaaagcctcagcttacaaatgtgtactttgtcgaagggcttactgcaaatctgattagtgtgagtcagctatgtgatgaagggctgactgtgagtttcaatagtgtaaaatgctgggctacaaacgagaagaaccaaaacactctcactggagttagaactgggaacaattgctacatg

SEQ ID NO: 20627 - DNA, 2087 bp, Arabidopsis thaliana
ttattttgttactcatgcgtttcttgttttcttgttttctgtgtttcaggtgtatgcctaggcaaacaaagagaaaaaaaacagaaggagcttatcaacttgtctgttctggacttgggaaaacttgaacgcactaaccgaaaaactcagaaattagcagtggctgacagagtcatcagagctgatgcataaggagttttgagagatgaggatgggcaaacctacaatgaggctgatcagagattggatgatcaaggactcatcctacctgaggacgtcgatgagaatcaggcgcgcctcaacgcacaaatagctgccagagatgtagcagggctcgctgtcgatcgacacaacagaggtatccatcgacaccctcaggagcagaatgacgatgcaatcggtgtcgaacgacacaacagacgtgtcgatcaacaccaacaccagattcctgcagctattcctccagctgcggaaccacgtcgtactcttggggatttcaacaggcctgacctattatatgctaatcgatcaacgattgtacccccaacattccagaagaactactatgagctgaagcctggctactttgctttagttggccagcatcccttccatggcttatctcatgagctgccaatggaccatatagagcgctttgaggaccttgtacgagcattaagggtaatggagtctcagagcactacctactgtgcaagctcttcccttattcacttgttggggaagcaatttcgtggcttaaacaacttaaagcaggttccctcaagacttggagaagcatcaagatagccttcttgaacaatttctacgatgatgctaagtctgaagagttgagaaacaagttgtctaccttcacacaaggttcagctgaagctttcaaggctgcttgggttcgtttcaaggagtaccaacgagattgtccacatcatggtttcagtgaggcacaacttctaggcaccttcttcagaggagttgattggagatacaagatggccctagacgcaacaagcaatggtaacttcaacacacgttacccagctgatgctacagccctgatagggaaccttgcttgcagcaacagtaccaagaatgctgattttgagaggaagaagattgctggagctatttcaggaaatcagatggcagaggtgaatgctaagctggattcagttcataacttgttcacaggaaagaagcatgtccactttgcagctgaaaaagagactattgagcctgagcctgagtcagaggaaggagttttctacatagatggtcagggatacaagaagtttgggcagccaaatggcaacttcagtggcaacaggtttacagggaaccagggttcctccaactacactctaaagcctgctttccagaagacttttcatcaaagcaactttctgaggacctatggcaattcaacttatcaagccccccctccaccctcatcagagacaagaatggaatcaatgcttgagcagattttgaagagccaaacaaagcttgttgtggagtttaatggcaagtttgatgctgtctacacagatcttaatgggaagatcgacaatctgagctctcacttgaagaagctagatgtacaggtagctcaaactgcacaatctatcaagagacaagagggttttcttcctggtaatcatgatgctaacccaaggaagagctgcaatgccatcttgatcagagaaggagatgttgtgtgggaggaattggacattgaagacgagttggagcttgcagttgcagagatgtgtcgaccgacaccctcctgtgtcgatcgacaccatatgggacgctcttctcagagacgactcaatacgatggtgttaatcgatacccctctggtgttgatcgacactggatccgggactgcaccttgtgaggtgcaagtacctatgcaacctgagccagtctacacccctcctgtcccctatccgaggaggcgtcgttctaagcagaagattcaagctgctaagtgcacaaccataatggagaaaatcctccatactcttcctaaggatgcttcagaaacatcttgatcctctagaatcctc

SEQ ID NO: 20628 - DNA, 473 bp, Arabidopsis thaliana columbia
tgtaccaagaatcattcgtatgtatccgctttataaagaagtgacaagagcctttggtacggtagcagaatcaaagcgggtcggagctgctttaaacttcttcctttacatgctgcacagttatgtaagtctttgctcttgatcccacttcccacccactgttggtgttgttgttgttgcaactgtgcatgatggatggctactatatgtatataggtgtgtggggctttttggtatttgagttcaatagaaaggaaaagcacatgttggcgtgccgcgtgtgctaggacatccgactgcaatctcacggtcacggatctgctttgtaaacgagctggtagtgacaacattcgttttctcaacacctcatgcccattaatcgaccctgcccaaatcacaaactccacagacttcgactttggtatgtatattgatgcgttgaagtcaggggtcctagaggtgaaccaaaggat

SEQ ID NO: 20629 - DNA, 1759 bp, Arabidopsis thaliana
tccacatccgtctggtcattctgctttctctttttgggacgatccatttacttcacctgaaaagttcaatcaaacataaataatgaagaagccagtcattagccatttaaatatcatgaagtagaacaaggtcaattttctctctctacaaaggcaatttattagaggttaggtctcggccgaaagggcctttgcctgggaactcgaagtttgtccgactggtagccagttcccacctttccgtccacactggttctcacacttgttctcatccacatgtggaagtccgatctactattgggaatccctcttcgattgctgtttttgattctcttccggttgagacgctgggaacctcttcccctattcctagaattgttgaatttccctttagtgacgaatctttaaagactcctttacttgccgttatccccttcgacgacaagctctcttcgataaaacattatgtttctggcgaaagctcctccgatttggcaacaatgtctgagaactcctccactatcgtcagagagtctgatttggtccctaattctcgtttggtcgaggcaaagggctattccaccctatcacctaacgtgggggcgtcaatgcctatcgatacctctggcctgagccacgctgtaccttcgtccataccctctgagcctaccacaatatctgagaattcctctgctgcggtggatacaactctcctgaaaaatcctgctaacactggatcaagctttcccactaattttggtgccactgccactcctcttccggttaacaatcctcctcacacttccgctacccttccatgggcgaagaaatttaaggcctcgttgctaaaccttaagcaaatgtccagcccaacctttctcgatgatggtacccctgttgttgttgcgccaccctctgtattactgaagacagcagagatgtggaaaggccatcttatagcccaattttggggcctttgtccaccggattcaaatatcttcaatgatcttaatcttatacgatgaatttatggcgccatcacggttcgtattatctcggaaacagcttctttgatctacatctcgtctttggcaacgcgagaatgggtagtggatgtggggtccttgtacagtgtacccttggtatccagaaggccctctagaactcgaagaattacaaacggctcctacttgtacaattctcaagaacgaccttccgtagttgtgtttacttgatggaataattgttatagcaactggaattggcgagcccctgcatagagagcctttcttcacatttactcgacctcgtggtcgagtacctcagtctaggccactcgatgacaccactcgaccacgaggtcgagtaacaccttgccataccactcgatcatcacacgaactgtcactcgatcataacactcgatcacaacactcgaccccgatcgattagattcctggcccatcccttatcggtttactttgttttgtataaataagtcttcaagaattttgtcccaaaacatttaggttttgcttcacttttgatttctatttacctagtttattctatcattgcgccgtttgctctacacacttgtaattcgagattttccatgttattcggattctacatttgattttgtttagcacctagtttctctactctttatctctttatatatgcagtctacttgtttattggcaattatgtttttgagcatgtaatctgaatagtgacttagaatttttaaggatag

SEQ ID NO: 20630 - DNA, 224 bp, Arabidopsis thaliana columbia
agatggggttggactggggaccggtgctaatgtcggtaattttcttcatcgtgttgagccctggagttttgtttcagctgcccggaaagagcaaagcggttgagttcggtggggtttcagacaagcggcccctccattgtcatccacactctcctcttcttcgccttcatcaccatctccctcatcggccttcacatccacatctacgccgcctaattaaccct

SEQ ID NO: 20631 - DNA, 541 bp, Arabidopsis thaliana columbia
  unsure (1)..(541): unsure at all n locations
nnnnnnnnnnnnnnnnnnnnnnctaaagtaatgctttgaaccaggtgctgcggggcattcacggacctcataatcaacttaattttctgtccagattcaacacgttaacgcaaatcatctgccagaatttaatcttgtgctgcacgagtcagcctatgtttatataaccatcagtccgtgactggtgcgcatcataaagtaagcggatagattgcgcaatttttatacagcactcatgactgattaaagcgaaacagcggtaacaggaaacgttgcgactgttcaacgatggcctccattgtctctggtgttaattgccgccagagcctttgataccagatatcatcaccttcgccacgcaccatcatgttgccttcgtaagcctgaaggaatttcgtacgggctttttgcaacgtggaatcgtcatccagcatggcatcgttttgcgcgtcataacaggtttttagccacgcgccgccactttcaggtacaccagcaatggcgcggacattcttcacgataccctcaatcagttgtgaga

SEQ ID NO: 20632 - DNA, 447 bp, Arabidopsis thaliana columbia
tggttagtgttcttcctgctatttcacggcttgggtctttagagttgggagaatggttgcatttgtatgcagaggatagtggaattaggattgatgatgtgcttggctctgctttgattgatatgtattcgaaatgtgggatcattgagaaagcgattcatgtatttgagaggttacctagagagaacgtgattacttggagtgcgatgattaacgggtttgctatacatggccaggcaggtgatgctattgactgtttttgtaaaatgaggcaggctggagttcgacctagtgatgttgcctacattaatcttttgactgcttgtagccatggcgtggttggtagaagaaggaaggagatatttcagtcagatggtgagtggtggatggtttagagcctaggattgaacacttacgggtgtatggttgatttattgggtcgtccgg

SEQ ID NO: 20633 - DNA, 595 bp, Arabidopsis thaliana columbia
gcatctctgtaataataatgaaatgtgatgaagcagtttggttaaactaggacaatcattcatctccaagaagcactttagggaaagaaagaggattttagactttatacatgcagaaacaataatgttaaagcttacttgtaacgcgtgtatgccaatccgttcatagctgcacgtgcctcagccgcttcaaggaaaacaacctgaaatgcaagtaagaacaggttagagaacacaacaggttagagaagaatcacatattcgttgggaagaataataccaaagccatcgtcttagtcggagggagaacaattttgtctagacttccaaatttccgaaacatttgagccagttccttttcagtggaagcaaagggcaaatgcttgactaagagaatatgtttgcttctgttcttcacgtcacctttccgtgcagcaaattcttccaaagaggtgacacgtactccagctttagcaagggcttctttggtctccataatcactcttgtttccccaaagcaaggcgtactgcaggatcttcgcattcacggtcaagtaactcactctttgttacccatacgacctgactaagtttt

SEQ ID NO: 20634 - DNA, 552 bp, Arabidopsis thaliana columbia
tgcaacatattagagaacaagatcaaatcaagatctagtaaacaagagtttttaaatgatgaaagaacaaatgaaatgctttgttcacatcgatttattgaggtgaaacaatcaaattaactaaattaccaaatccttcaaaagtataattgcctgcatgctgaagctaaagtctctgcaggacaataagggcatttgaatgtgcggaaagcgcagttcttgctgagtctcatcattgactgcttgctaataacatgaccacaaggcaactgcatcggcgggttttcttcgctgctttgatctctactcacgggacaaacaaaagccgagtggaacttatactcattccctaactccagaggaaccggaagctgtttcattgcttgccattcttgtgtcgtcaatgccattagatgaaccagctttaacagtgacggtaagctctcataacccgcggataaagcgactttcaacggggagttaattggctgatcgagaagatggtgatatccatgattagctctttggttacattgcccaacatgatggaga

SEQ ID NO: 20635 - DNA, 551 bp, Arabidopsis thaliana columbia
ttgaataataaacagaggtttcaattattcatttgtatcggagaagtttactgtattaaaggtatcggagctattcgttcctcggaatcatggttcaaactcgttctcaagacgtggatacacgagataaagggaaggaggttgatgtttcagatccgatggaagaaaggatgttgaggttggactcgaggttggaagcacgtagcaggcagacgatgaagaatttggctgatatgatggctgctatgagtcgatccactgctcagacacttccggaggagctttccagtggagatcaaagcttacctcgctcttctacttcgacggaggacagacaaggttatcaggatcatcggagagactatcgtcaggatccaatcaacactcgtcaggatcagatcagctttgataatcagcaatattatggcaatctgacacgtttgggtaagatcgatcttcctcgatttgatggtattggtattaaagaatggttgtcaaagttgaagagttctttggtgttgattttaccctgctgatttgaaagtgaagat

SEQ ID NO: 20636 - DNA, 796 bp, Arabidopsis thaliana columbia
cgggtcgtgatgggtctgttgagttgtttgcagatgttgatgttgatgtcctcgatgaattgcttgaaactctcaaaaagtaagctttttgaagaagaaatttgaaaaattaggtcttttggatcttattgttggcattgtcaatgtagattaggtttttttgacttgtagatgattgtaagataatgcttaggttttgattggtatattatctctattgattttactggaatgagtaaaaagctcagatttttagaaaagaaacgactcacattttcagatattcgacaacattaggtctttttggatcccaattttagcaatgttaatgtagattagggttaatttacttgatgatgattataagataaggcctagaatttgaatttagatgtgtcatctctattgatttgttggagaaggaaccagttttagttctgatttgtgtgatatgaatgttgatagatatcgcttgaggtccaaagtggatattgaaaacgttgcagaggagttttcgtgttggcagcgttacggtaggaatcttactggatcatcatctgttggttggggtggtggtgttgatcgtgctggtgagtctacagctagtggtaataagtatggatggcaatggtataaggatccgaggttggagtgtctcggttacagaagtatctttccgtctgatgcaactcgtgagtttcttaatcgaatataagcttttgagttcttgagcttgtgcaaaagcttagagatttgtttgttttgcagcgcctttagttgaggcagataaagaaac

SEQ ID NO: 20637 - DNA, 484 bp, Arabidopsis thaliana columbia
cgtagtattgttatggctttggcaaaaaaccaagtctctggataccagatctggtttatcccttcaaatgttaacttcatggcaatccctacagccttgatgctcataacctatttgaaattaaaacctttagagaacaaaaaatgggaaaagatatagagctcagcactaaattccgagatgcttactgtgagagcacccatcaatgaaccgattccgatatacacaagaatgttggtttggccgcagagaggttcacagtagagaatcatagcaaggactatcgacattgacatggctacgttaattagtaaagctgtctctcacaaaacagagcagggatatgcgtcattgtctatatccgtagcatagacaccgagagagagagaggtagactacgcacaacctggctgcatagctagtttccagaattcttctacaggattgggagtctgcacctgacgtgcgtgtatgacgatcataa

SEQ ID NO: 20638 - DNA, 568 bp, Arabidopsis thaliana columbia
gataaaagtagagattagagcaaatatcacaaaatgttgttaaagcataatacttggcaagtcaggttttaagtctactgttagctgaactgcaatcatcgaatcattgctgtctttagatccaagtatcgcccgagaatccccaatgttacccatgtatagatttgatccctgaaacaatcaatgtacatcaaaaccgatacttggaacacaatggaaatcccgaggaaaaccgatattgaacccaaaaaaaatgaagtgatcttttgttgtcaagattacctgcttaatgattgtaacagctgtgcagccactgcagaagcattctagattaggatgggatcgcagttccttatccatagcattgaatgatttcaagaaagcttcctcccataagaaattcaatttatcctcctcagtagattcttctttctcagcttctaggctatcggatttgcttgcacgagttcctatgggtccattttgcttcgacttaatggaattcaggagggacagcaactttacaggcaatgaatctctcactttacgagcaacaagatgaccatga

SEQ ID NO: 20639 - DNA, 664 bp, Arabidopsis thaliana columbia
aaaacttgctactaagtactatggactctttgaagtgcttgaacgcattggcaaggcgcttacagacttaagcttcaagaggatccaaaatccatccggtctttcatgtgtccttattgaagttcgtgttgggacaagcagcagaagtgaaccctcttcctgatatttatggtgaaataggagagttcactatggaaccagaggagatcttggatactcgctacaatgaggaggggtacttggaaggtttgattcaatggaaagggttgtcgtcccaggagaatacatgggtcattgtgaaggagttgttggcgcaattcccaacctttgcacttggggacaagctgcatttcgaatgcgtgggtattgataagctgcatagggtgtatttcagaagaaacaagaaggacaatgtgtcacacgtgacgagtttggcggttaaggatgtgacagggatcacacgtacgaagggttaaggttgtgccttgggattgatgaatataaataaagaagagatgctgtggagagtggcatgttgaatcaagtggaggattagtcaacatgagactatcatatggcgagattagatttgaagagatgctgagaatctaatctcatctttcatttgtcttgattcaatctttgtaatatctaacattgagag

SEQ ID NO: 20640 - DNA, 1079 bp, Arabidopsis thaliana
tcaccattgttcacaaatcatgattttcctccattgtctcaaagaagacagctatcaagttctcctcaacaagtcaatcctacatcggttatcagcagctctcaacaacctcaagatgaatcacttgctgatgtaaatgggagttctgagcgtacgacagactctgattctgcttctattggcgacagctctcaattatcttcagcaagtggtgcttcttcggtctctgctcctccagttcaggtaccagacaacaatactcatccaatggttacaagggccaaagcaggaatctccaaacccaattcgagatatgcttttctctcccacaaagtctcttatccagaacctgcaacagtgaaagaagctttaaaatatccaggctggaatggagccatgaaagaagagattggaaattgctcagaaacaaatacttggtctctcattccctacactcctaatatgaatgtgtgagggagcaaatgggtttttaggacaaaattgaatgttgatggtacactaaacaaattgaaagctcacatagtggcaaaaggctttcttcaagaagagggaattgactatcttgaaacctatagtcctgtggtccgcactccaacagtcaggttagttcttcatctcgccactgctttgaattgggaactcaaacagaggacgtcaaaaacgccttcttacatggtgatctaaaggaaactgtgtacatggctcaacctgctggttttgtggatcctcttaaacctgatcatgtttgtctgcttcacaaagctctctatggactgaagcaagctccaagagcatggtttgacaaattcagtaattttcttatggaatttggctttatctgcagcaagtctgatccatctctctttgtctatgctcacaacaacaacctcattctcttgttgctctatgttgatgacatggtgattactggtaacagctctcagaccttaacaagacttctctcaacattgaacaaagaattttgaatgactgatatggggcagcttcattattttctgggtatacaagtccaacaacatcaacacggcttgttcatg

SEQ ID NO: 20641 - DNA, 1509 bp, Arabidopsis thaliana
catctacataaagaagcagtaagatcacatcattgttgcttgagtaaacaaataatgaaggatcaaataagctgcagatgaatccaaactccaagagaaaattgctgaatctatcaaaccaagctctaggagactgcttcagaccatacaaggatttgtggagaagacacacatgatcaggtttacttttatcaacaaaacctgctggttgcctcatgtacacagtttcagtgaggtctccatggagaaaagcattcttaacatccatttgcttaagttcccactttaaaactgtagcaacatggagtataagtcttactgttggtgttcttactactggactataagtctccaagtaatcaattccctcttcttgtttaaatcccttagcaacaagccgagcttttaacttgtccaaggaaccatcagcatgtaatttggttcgaaaaacccacatactaccaagcacattcatgtttggtgaatatgggacaagagtccatgtttcagtctctttgcaatttcccatttcctcttgcatagcattgttccaaccaggatgttttagagcttcagtcactgtcttaggctcaggaattgaaactttatgggtgagcaaaacatatctcttatttggtttagagattccttctttgcctcttgtaaccatagcatgttcatttgtaactggagcttggacttgttgtgcaggagccatttgaatcggtgagccttgaggagaacttgctggggaagacctcgcaggtgaaggatgagaactgtctgcagttggtgaatggtagctgtcgccaatagaagcagaatctaagcctgtcgtacgctcaggactgccactcaccactgagatagtttcattatcttgactagtatcatcggaagcattaggacctgcagtttctgctgcaacacttgctggagctgcactcaagtctgtagtttcaggctgaggaatagaagagacagggtaccttgattgatcaggctgagttggagtcacatgatgaaaacttttaaaccaagcttcaagaagaggagttttgtcttgaggatggagatggctgtaaatggactcaaatgggtgagtattctcatcaaagacaacatgtctgctaatgtaaattcgacccgttggaggatacaagcaacgatagcccttgtacttctcattgtatccaagaaaaacacactttaaagatcttggatcaaacttagtagaggcataatctctgagagttggataacaggcacacccaaagacacgtaaagctgaatattcaggagctttaccatataacttttgatatggagactcattgatgtcaagagatgaagtaggcaagaggtttatcacaaagtttgcagtgcagaaagactctagccaatacgttcagaggcagtttgcttgaaaaatcattgacagacccaattcaacaatggtgtctgtggtttcattcagccataccattttgttgaggagtgtagggacat

SEQ ID NO: 20642 - DNA, 622 bp, Arabidopsis thaliana
cttcgttttgcctattggccaataagcccaacaaattgacgcaatcataatttaaaacattcgttggaaaaaataatttatttatctgtgagatcaataataaaacagagtttgtctttgtcaccaaaaatcgccacaagaacaatgaccatcactgaaatggtgaacctattaacatctctaacaatgataaatcttcttgtagccattgatgcagccttcatgaactcatggcaatccacacaaatcctcagattcttcataatcctcactggagaactctctggtaaacacattaacccaaaaaccaatgccagcttctcactatgctgcatcaaaagctcctctttctttcctatctccacatcgtgcagctcgtgttctacgcttggtttatatccaaactttctgaatttgattactagattgtctagcgtcgaacagatctcacggattctcggatgaccgctctctccaacactgaaagtatggaccttgtctttaatgtcaatccaactttttcctcttactttcttcacgtcgcagtcccttaaaagcttccttgaattggcgatttctcccactgtttgtttgcgcgtatatattggatagtagacgtgat

SEQ ID NO: 20643 - DNA, 636 bp, Arabidopsis thaliana
  unsure (1)..(636): unsure at all n locations
gtaacgtccgccagtgtgctttaaagacaataatctcatcgcccggttgcagacgcggacgcgcatagcattgtgccaccatgttgatggattcagtggtgccgcgcgtccagacgatagttttatcatccggtgcattcagtaattgcgccactttctctcgtgcagcttcataacgcgcggtcaggcgttgggcttcggcaaactggctgcgatggacgtttccggcgctcagactgtaaaactgttgggtggcttcaaccacggcttcaggtttaagcgcggtcgcggcgctgtcgagatagacgcccgcatcctgtagtgcgggaaactgggcgcgaaactgcgcgggattaaaaacgttcatggtactcctcggcttgatgcaccgatcgtgacgcaaaattcactttgatacaaggagagtgctaaccatcagaattatctggatatcctggcgacgcnngtaagtaacatatgctgaatagtgttaggcgttaattttagcctgttaatcaatactattaagatttattaatcgctttaaggagaagatgatgaaaaagactgccgcaattatttctgcctgtatgctgacttttgccctgagcgcctgtatccggtccgactatgtga

SEQ ID NO: 20644 - DNA, 1898 bp, Arabidopsis thaliana
gtgcccatgaatgtacatagaccaccaactgatcttcgcgtttgcttacagtttccccaatcgctgtcactgtaagcctgcaagagagtaggagagtcacgactgtaggagattcccattgtaatggtgcctttaatgtatctgagaatccgcttgagaagatgaaagtctgatatagttggctggtgcatcttttggcacacaaagttgactgcgaactgtatatcaggtcttgtcaatgtgagatactggagctttcctgcaatactcctgaagtaagtcggatcactgaagagttcttcttgatgtggcactctgtcaagttgaacaggaagaggagttggcagaggagtgcagtgttccatagacgctgcaatcaggaggtcctcagcatatttctgctgagacatgaacaagccattttgttgtctttgaacctggattcccaaaaagtagtgaagctggcccatgtcagtcattctgaactctttgttgagtgctgcaagaaggcttgttagggtctgtgagctgttaccagtgatcaccatgtcatcaacatacaggagaagtagaatcaggttgttgttgtgagcgtatatgaacagagatggatcagacttactgcagaaaaagccaaattccagcagaaaggtactaaacttgtcaaaccaagctcgtggggactgcttgagaccatatattgatttgtgaagcaagcagacatgatccggtttgctagggtcaacaaaaccagctggctgagtcatgtaaacagtttccttgagatctccatgcaggaatgcgttcttcacatccatctgcttaatgtcccaatttagagctgttgctaagtgcagaactagcctcacagtaggtgtgcgaactactggactataggtctcgagataatcgattccttcttcttggagaaatccttttgccactattcgagccttgagcttgtttaaggtgccatcggcatggagtttggttcgaaagacccatttgcttccaagaacatgcatatctgacttgtatggaacaagagaccaagtttgtgtttctgaacagtttccaatctcttctgtcatggcaccggtccatcctggatgtttcaaagccgctgttactgttttcggttcaggataagagactttatgggacagaaagacatagcgtggatttggttttgaaatacctactttagctctagtcaccattggatgaacattggttgaagcatgagtttgatgaacattaactgaagcttgttgtatggtctcttcagagtcactgcctgcttgtgaagaatgagagctgtcgccaatagaagcagaatcaaagtctgtcgtacgctcagaatcaaagtctggactttgctgagttgtgatattggatgcatgagagacacttgagataggcactaaagtggggagtaggggtgtctttctctgtggtagaggtggaaagtcagcgctcgtgaagagaggggaccttgaagaaggagatgttgaggttgaaggagcaggagagtcagagctccgcaaccaggctgcaagtagaggagttctaggctgcgggtgaagatgcttgtaagtgtgagagaaggggtatacagattcatcaaagataacatgtctactgatgtagagtcttcctgtaggtggatacaagcatctataacccttgtatttttcattgtagcctagaaagacacacttaagagagcaagggttaaatttgttttcagcataatctcgtagcgttggaaaacaggcactcccaaatgatcttaaagaagtgtagtcaggcttcttgtcatagagttttcataaggtgagatcgattccttaagagcagaggtaggcaatagattgatcaagaagtttgctgtgaaa

SEQ ID NO: 20645 - DNA, 473 bp, Arabidopsis thaliana
cggataggttttggtaaagctgaatctcttctctgccttgttcaacctctgacttcaccaccgtctccggcgatgatggaaggtggtgagatgagtcagaagaagaaagaggaagaagaaggcgagtctcagatgacgcagcagctgctacaaccgcgtattactggaacgccactttacggtttaagcgtttataacgcaacgctggacacgtggcaccgagtcgcgattcctgaacggattcctttgttctgcgaatgcgttgcgattcaggacgcggggaaagtgttgttaatcggcggttgggatccggagacgttgcagcctgtgcgagatgtttttgttctggatttcttcgccggagaaggaagcggaagaaggttcagaagaggcaggccgatgtcggcggcgagatcgtttttcgcctgtgcttctgttggttcgacgaaggtttacgtcgccggagacatgat

SEQ ID NO: 20646 - DNA, 218 bp, Arabidopsis thaliana
cctcacactgtgttgagatggctgagcgagccggtgctgaccatgcacgtgttacttccacggttagatcttctgtggatatccacagccccggtgatctcatgactctaacagccgctgctgcaactggtaaggctttgttgcagcttcacaaggctttttcagtttcgttgatatgcatttgatctgactttgtttaaactgacactaagcttgag

SEQ ID NO: 20647 - DNA, 530 bp, Arabidopsis thaliana
cgccagtgtgctctaaagtcagcgtttcggaagatggcagcgtgttgagtaaagaaggcttccagccaacggaaacccagccgcgcggcttcaatgttgatcacagcggcaagtatctgattgccgccgggaaaaatctcaccacatctcggtatacgaaattgttggcgagcaggggctactgcatgaaaaaggccgctatgcggtcgggcagggaccaatgtgggtggtggttaacgcacactaaccgctgatttacccggcgcagtctctcctgcgccggtgtattaacctatctcctgtaacgcgtgtctctggcgttcgacgatattggtccacaaattgtctttatcgtcagtccataaattaatcagcaaggcaaaaaagcgttctgctgctggagaaagtacggcatctttacggcgaattatcccaatgttcgacgtataacgggttccaccaatgggataccaataatcgaagaatagggcgcatgaggcattgcaggccaggaagcgccgaaatcccag

SEQ ID NO: 20648 - DNA, 581 bp, Arabidopsis thaliana
caaatcgaatactcagccgcaagatcactcatctcctctcctacacaagaaacagttacttgaaaaaacagtagacagccttaatcttctaatacaaacaaaacaaagtgacagtcgagtaatgaaaaattcatatatgtgtcagtatgatatgtgctaaccaaacccccaaaaccaattaaaatcgagtaagcagagacgccattgactatagacattgcgacacataatataagttcagctccacagcgacaaagctcatggcagaaacaactataaaagcttacatgcctagctactatgtatgttgaaatatcaaacgagtaaaaaaggattcaagaatcagaccatccaagaatttcttttggagttcggcaaagagctcaacatcattattcttaacaagcaaatgctgcaccagaatctctctacttgcactacttccactactcccactgctaaacgaagctgaaaaaacaaaagataatcagaaatcaacccaatcagaaactaaataatcaataattcagatatacacagttcacagagcaacggtaatcgcacatgaattttgaagaaaa

SEQ ID NO: 20649 - DNA, 548 bp, Arabidopsis thaliana columbia
  unsure (1)..(548): unsure at all n locations
aacccgtaaacctgtctcggtgcaccgtcattggttaaccggagaagtccacgtaaaattctcctctatttttgtcgtgggcaacaagaaaaggtcggagcaagtggagttcactgtaacggtggtgctggcggtgtttaaccggaggaagaggagacagcagtgatgcagataagagaggtgagcctagtagcagaggacaaggatgggaggaatttaggagggaaggttagtttggaaattttggtggcggccatggggatgaaacgtaggtttagggcgggaggggaagaagaagggaaagagaagtacatagaatatatggagaggaagaccgcgaaggcgangatgaagtggcggcgagggaaagaaacggctatggagacggcggcgtgctggatcgccgtcctcttacttggtttccttttgtgtttttatctgtttatgcataaaaatttagtagctattatgaaaaaactaataaaatagttaaataatatgttttgattcaaaacttcaatggaattgctttattcaaagaggaattg

SEQ ID NO: 20650 - DNA, 418 bp, Arabidopsis thaliana columbia
atctaaatacatattttttatcttttttatatcatatttttaaggcgtggacattcgggtatctgtacccatttagtttttttttttcttttgggtatcggctctattcaggtatgatgttaagaaccattcgggtattctaaaaatttggttcggtttcgattcgagttcggatcggttcggttattttagtataaatgcaaaagtaaccaaaaatactcaaaatattttcgggtttgggtcggttcagattttttactcatatataccaataaccaaaatactaaatttacctaaaaagaaaactataacattggttacttttatctcaaatatatttaaatgtatatgaattactagaaaaatctaatatattgggatttataattattaatatatattactatatatatatata

SEQ ID NO: 20651 - DNA, 543 bp, Arabidopsis thaliana
caactttttttagcaatatctcaaaaatcaacaagtaggataaggaacaccacaagttgctaacgttttcttagcatttgcagaaccaacatattgactatatcttggatctttaatatatgtacaaaaacacggctgttgctccttcagtttcccgcaacactctgtagacggtggtactcctgtgagcattggtgttgcgcatgaactaagctgtactgcatcacacgttacatcagcttctcctccagaaagtttgacctcagttgctctgattgaaactggagaaaccatgacacccaccacgaacacaatgaacacaagcgccgtgaacttcatgtcttcaaactctaggaacttttctcaactttcaatttttttttttctttcttaaaatgtgtatttgagaatgtgatttgattttcaggatggtagaactgctgttatatagatgtagttgtaacggacaagtttttaagtttggttttattaatacacgttcatacatatggcaatcatgcatgaaaacgtggaaaataatga

SEQ ID NO: 20652 - DNA, 525 bp, Arabidopsis thaliana
attacccatctcttaaagttccaatctttataccaaaaacagaagaaaaaatgtgttcttgagatttggggtttttgagttttttgtcttcttctacaagaaatctgatgttatgatctttgattttgttagggtttcagaaagattgtaccagatcgatgggagttcgcgaacgagtttttcaagagaggagagaaacatttactctgcgaaatccaccgccgtaaaacatctcaaatgataccacaacaacactctccgttcatgtcacaccaccacgctccgccgcagattccattctccggcggttctttcttcccattaccaccaccacgtgtcaccactccagaagaagaccattactggtgcgacgactcaccaccgtcaagaccacgagtcataccacaacaaattgacacggcggcgcaagtaacggcattgagtgaagacaacgagagattacgacgaagcaacacagtgttaatgtcggaactagctcacatgaagaaactctacaacgacatt

SEQ ID NO: 20653 - DNA, 370 bp, Arabidopsis thaliana
gttcctaggaaatggtttactacatagtcacgacgatatgggagtaaacaaagttggaaaaaatcaccagctctatcagattccaactctcctgcagacattataactggttcaactcccattgttttgaatataagttcagtctgaaatgttttgccttgtcctttacctccccatatacctaagcagccataaaaaaacacatccatgttcaagagatggttgcaaaatttcaaacactgctactaaacagagaagaagaaggcattcattacctaaaatcaatgggatttttatatttagagaaggagcaaggtagttcttcacaatgtggaccgctgcagaaaacatgcgaaaatcgccatattaa

SEQ ID NO: 20654 - DNA, 525 bp, Arabidopsis thaliana
tagtaacgagtgccatggtaaaccgaaatcttctcgggaggaaaacccggtacgcatacctagccatagctgaaccgtggcctaaagtctcaggattcgctaaagttgatctttctaccggagaagtgaaaaatcacttttacggcggtaaaaaatacggtggtgaaccttttttcttacctagagggttagaatctgacggagaagatgacggttacattatgtcgtttgttcacgacgaggagagttgggaatcggagcttcatattgttaacgccgttacgttggaactagaagcaaccgttaaattgccgtcaagagtaccgtatggtttccacggcactttcgtgaattcggcggatatgttaaaccaggcttaaaccaaaaccggttgcggtttggtttattgtgcagaccgagattttagggttttttagatttgtttatcacgagatatttttgtgaaaacaaatagatttttttttttcgaagcggtgggagccagcttgaagcttgtgtaagtag

SEQ ID NO: 20655 - DNA, 505 bp, Arabidopsis thaliana
cacatctataatccagtagagtttccagttcctcccgcgaccaatccacgtagtctggcggtttgagcgttaaaaagtctctgaagtatcgaactgcctctgcttttatttgctgctgatttgatgcaatatgtccatcatcacacttaatctctctaacattgttacgaacctcccgaatctttgcagcattgtagaaagttttattattttggtctcctatcttcatccaatgcagttttgctttttgcctaaggtagctttcctcaatacccgacagccttaaccacttctcatatgcgtccgcttcagctaccactgcctgtgaagatggccttgtcatagtttctgcttgcttttcacataaagttttataggcttcttttgctttttttgagatatcaccaagtaactgcttccccatctttctgaaatgtggcttcagaccttttaatttttttgataagcggtgcatggctgaggtagaatgaaagagaggctgagt

SEQ ID NO: 20656 - DNA, 1742 bp, Arabidopsis thaliana
catctctcatgcagttcattgctacgtcgagagatgatcgaaaatttggtgtaattaccgattttatggtcattctttttgccatggttcatacttttaggtttcaaattatgtttgtaacctaaactgttttcattttgtgaaatatttacaatttagcggaaaaaaaggaaaaaaaaaattcttttatttttttcaggttacacaataacacgacacgtttaatccatccacacaccataattcaaaaatcttcaaaaccctttttttttgttgggtcacaagcaagattccatatcaaaccagaaaagcaaaaagaacagagcatgaatcttctacccataaatatatacaagccacaccaatccgcgattcaaatgttgtaaaagttcagtggtggccttgtacattattatcttcaagaaaatatggttccaaaaacttggcacatgggttaggatcttgatgcataatccttgcagcttgttcgaactcttccctcaacactctctgatactaaacttgacgaccacccgacccagatcatggctcgtctcaaacggattctctatgcatatcaagtgcctatcgttccccacccatctcattcagtccttctctcgctttttgcaacacacacatattcatgtttcatctctgagattgttgcttcacagatgtttccttcagcttccgcctcctccgccgataagaaggtacaattctggtttatagatgattcaattgtaccttgtagacggttttctagggcttgtttgtgaatttcatgtcggcttagtgaggttttagggtttcgtgtttggattctggctacgtaaatatcgtcttataactgactggcttcacaaaaatttgtagttggatagtttgaaacgaaacaggttaaagaacataacatagaaagtatagaaagtatagcccatgtaataacataggaaaaatagtttttaaacaacttgggctgggctaatctaaaatttgttagaacatagaaagtttagttttaaaaaaatttggattgggctaattttaatttagttttcataatagaatgacatgtacaaatactaaagtttgattggtcaacaaaaatgatctatatttaaacgaaatgttctaatgggttgttgattttgtaaaggtgtcaagctgatgttaactgaaaaaggtgatgtgtcagcacaagagagacttttagtgtttttatgatattgattgattacaagcccaatccacatacatcaaaccggacaaaaccatcaacttaaaattgatccacgatcaccatacctaaataaatcggttaagtaagaaactctaatcttcagtcgaaatacccttttgaagccgtagccctagaaactgtgaacttttttccggaacaggacctccggcgaatcaggatgacacaaaccgagcggagatggtgacctaggaaccgtcgctatccgccaccgtagagccgttttgaggaggaagaagaaaagctgatcttacatttttcgagaagaaaccatgcagtcttgagagacaaaggcagtagggagtaaatatggaatctctcaacgggggcttagcttcatcatgccgtaaatgatctcccccgtcaagcgacaaccctctaaaacatcctgcagctatagtctccatatctaaacaccttcctctttcgtcactcgccgtgaaatctcccttttccactctgcgatgcaacaccaatg

SEQ ID NO: 20657 - DNA, 444 bp, Arabidopsis thaliana
  unsure (1)..(444): unsure at all n locations
nnnnnnnnnnnnnnnnnnnnnnctaaagacgtgcgctactggcgtgaatcgccctggcgaccagctctttaccggtgccggaatcgccgtggatcagtaccgtggcttccgatggcgcgacgagggcgatttcactgagcaggtgttgcatcgccgggcttttaccgaccataccgaactggctggcagtcaccgcaggtgtttcagcatcaatactgtgcgtatcgcgacgctttttccagcgtcgcctgtaggttatcgaaatccagcggcttgatgagataatccagcgccccagttttcagtgcctctaccgccgtctcgacgctggagtacgcagtcataatcagcaccggaattgccgggtttaacgctttgatctctttcagcgtggcgatgccgtccatctccgccattcgcacatcgcaaagcacaagatcaaaa

SEQ ID NO: 20658 - DNA, 694 bp, Arabidopsis thaliana
atacaccgcgatctcaaggctgcaaacatacttttagacaacaattttgagccagttcttggagatttcggtttagctaagcttgtgacacatctctgactcatgtcacaactcaagtccgaggcacaatgggtcacattgcgccagagtatctctgcacaggaaaatcatctgaaaaaaccgatgtttttggttacggtataacgcttcttgagcttgttactggtcagcgcgcaatcgatttttcacgcttggaagaagaggaaaatattctcttgcttgatcatgtaagattgacttcttttacatgctttcttctatctgaaaagacttgaaactaatcttaagttgttggatgtgtatgaaacagataaagaagttgcttagagaacagagacttagagacattgttgatagcaatttgactacatatgactccaaagaagttgaaacaatcgttcaagtggctcttctctgcacacaaggctcaccagaagatagaccagcgatgtctgaagtggtcaaaatgcttcaagggactggtggtttggctgagaaatggactgaatgggaacaacttgaagaagttaggaacaaagaagcattgttgcttccgactttaccggctacttgggctgaagaagaaccaccgttgatccagaatctatccgattatcgacagccagatgtcgaa

SEQ ID NO: 20659 - DNA, 531 bp, Arabidopsis thaliana
caacaaaattaacattaagcaaaccgaatataaatttttagagactgtttagttttattattaaaaaaaaaaagagaaaccaaattttctaaaaatactattacatataaaaaattatttttatgtaataatattaagaacatcaatatttaataaacaattgtatatttatactattcgcaattttttcactttgagttggaaaaaatatatcttagtagaaaattagaaatggactaatcttaaaccatcagataggctttcaaacatattcctatcataagaacacatgatgagtaacaccactatctatgatccatgtattttgtgataacacttgtctagaggacgttagagaacatagtaaccataaagtcgaaggtgagaaagagatatcattgaaagcaaaactttgaagtgaccaaatctgctgagttagctgataagaccttggcaaattcgtaatgtgaaatctagtaccaagtcttccagatctctgcagcatcattgaaacgaagtatactcttatag

SEQ ID NO: 20660 - DNA, 2106 bp, Arabidopsis thaliana
atgagattttgcagaaacacttaccaatttatcttggaattcttgataagactttggcccagagtagtggatgtgtggaccgagaccgttaggtcagagagacgagctttgaaataggtctgactctttttctatgcttcttctgtgtccttgtaagcacacattgttccccacagagtttctccaatccatggaggctgctctcgagttctccttgcggtgctaaccatatccttcaagcgcctcttgacgatctcattgaagtaatattggactgtccttgtgattaatggatcccagtggtgagttttctacaaaaaaggaagaagttagtgaactgaacttgagcagactataaaactctaaaaacaatgactgaacaggagcagatatacaggaagcttaccgcgaactctaaaaacagtctctctcttttagccaaaggcacacatgaccaattatagtagagagcattgaacttttgattaaaaatccttgtgatctttctaaccagtttagatcctctgtcgcgagtaaacctccaagcacatgcaacaatgaaagaagtaaacatgttaaaaaatcaaaacacaataaaagttatgagaacagactatagaactgaggcagattcacaagtctactatgttacacactacacaggtataactgaggcagattcacaacagaacacacactatagaactgaacaagagcacacaacagtataaaactaaggcagataataaatgtctaatcctaaaacatgcgaagttcaaaagtcaactatgttcaacaatagagcatgagtagcaacaaaacacaattaagaagagaacatactatagaacataacaagagcatgagtagcaacagaacacaattaaaagacatcaaagtcaacttcatcaatagagcatcaagagaacacgattaacaagagactcgattaacaagagaacacgattcacaagtatagaactgaacaaggacacacgagtattcacaagagcacacaagagtattcacaaatctactatgttacgcaaacaaaacaaacatccaacaaaacccatcattcacaactatgtttcaggattcacaagtctactggttacacactacaaatgcagataacacgaaaacaaattagaggaagagaacttaccactcggtttttggcctgggaatcggagacaatacacaagtccactgctccatgtttggcactgagagaatatcttgcagagccaccgccgagtcttcttgtagctcaggcaacgtcccaggagcttcctcttggaagttgttcccttgagacaaagggtggctgtgagctagattgtcagtatccggcgactgaggatcttgctgagcaggctcttccggcgatggattgaagtggacctcttcagatcgaggcggacaccaccacgctgaggttgagtggtggagttctggaagagttgtagcggtagtggatagtcgggtacgtggggggggggggggggctgacgtcaaacgaacatcagcttgagccggctgcgtcgctggaacttgaaccgccggcgccagagtgaagttgtattgatgagggagatcccaaggtcttggggtcgttgaaccgccgtctctctgagtaacattaggcgtcgtcttccgcttttgggagccacctcgaccagcgttattagatcgacggagagatctgcttgaaagaagagagatccctagagatcgattaagtgaagatgaagaagtggcagatcaaagagatgaagaagaggaagaagatcaaagaagaagaatagagattgaagaagaagaagatcgagagatcgaacaagaagaagaagatcgagagatcgagagatcaagagattgagagaggaagaagatagaagaagattgaagaagaatgaagaagaagaagaacagatcgaagaagattagggtttcagaggaagaagaagaagaagagagatcgatttgattcgatattttggctaagtgttaggaatgagaaatgattcgatttagggtttttaacactgtagtagtcgcattgtagtcgtattattgtcactaaatgatttgggtttgggc

SEQ ID NO: 20661 - DNA, 1821 bp, Arabidopsis thaliana
cttgagtatgtgaatccgacatccacattggggcaccgtctgtgagaacggagaattcttgactcgtcagattgtgtctatacacgacatttccgaagtgcgccctactgtctggagaagctgctaccaacgcttcactagccgaaattctcgagcccatgcagcaaactatggcggaactggctgcataagtttttgaatgtagcaaataccgtcgttacactgcaaacaaccgaggtatcactcagtcgaaatgcgagtactggtccatctcacattcgatcatggaatgccggttaattcctctggagttcgatgaactatcttcggttccccaaattcccttccgcgaaatgcagcaagtgatcaaacgaccctggatggtacaaacgcggacatccatccgaaagatggagaaacacatcccgaagacgacaaccagttcgttcatcaacacgagcaagaaaacttcaaccagttcgaaaccatgagagaagtaagccgggaactgaaagaaatgaggtcaaaattccaccaagctacaagctcggaaccggatatcaaccgggtcattgaagaagctaggcgaacacctttcaccccgcaaattgctagcttgagaatcagagattctcgaaaacttaacttagaaccgtacaacggtttggaagatccgaaaggctatctcgcagctttcctaattgctgctgggcgagttgatctgaacgaagccgatgaagatgcaggatactgcaagcttttctctgagaatctgtgtggacaagccctgatgtggttcactcagttggaaccagggtcgatcagcaatttcaacgagctttcaacagtatttttgaaacaatactcaattcttatggataaaagcatttcggataccgacctttggaatttatctcaagggccgaacgaaacacttcagactttcatcactaaattcaagaacgtactctcgaagctcccaaggatctcacaacagtcggctttatcagctttgcgaaaaggattatggcatgattcgagattcaaagaagatttgatactacacaaacctgatactattcaagatgcggtattccgagcgcacaattggatggaagtcgaagatgaaaaagaaagttttgcgaagagaaataagcaagcaaaaccagcagtcacttttccacccaagaagttcgaacctcgggagaaccgaggaccaaggaagtttggttcacaaccattcaacaataacgttcggaaggagtttcagggaaaaggaaggtcaaatacttgggttcgagatgaaagcttgtattgtgatatacatagagtcaccggacatctgaccaaagattgcagtgttcttaaaaggcatcttgcagaactatgggcaagtggagatctttcgaaattcaacatggaggatttcgttaaacaataccatgagtcaagtgaccaagaccggctagcgaagaagaaccaagaagttcaaaaggtaaaatcaacgtaattcttggaggttccaaactttgccgtgattccatcagcgcaataaaaaaacatagacagaatgttccccttaagtcaagtttaagtgaagaggtagattttcaaggcgcttcaatatcattcgaagaaaaggaaacacagcacctcgaaagacctcacgatgatgctccagtaattacgctggatgtagctaatttcgaggtttcaagaatcctcatcgatactggcagtttggtagatataatcttcctaagcactttggaaaagatggggataagcagggcagatgtagtaggccgccatccctttagt

SEQ ID NO: 20662 - DNA, 1122 bp, Arabidopsis thaliana
aaggacataaatacaatttacgcacccatgatatggaatgattgccactgggttggtctttcaatcaatcttggcatatggagcgttgaaattcttgacctaaatacagacctctacgacgacgctaaggtaaaaagatgcattgagccagtagtcaatcttttgccccacctcatccaaaggtactgtacgccagagttttctcagaatcacggtcttcaaccgtttggctggagtcgaattgatggtatctacaagaatttgcggagtggtgactgtggcccggttgccatgaagttcctcgagatccaggcaagtgataaactcccagataaaatggctgaaattactgacaaacacgtcgacgcgtttaggcgtcaatatgccatggacatatataaacaatgtgtctgcccactctattcatctaatgtttctgactagttatcgaatgccaccctacaaatctgttgtaatataaacgttgattccgccttctttgaatgcttataactctggatgatataaatatgttttttgtttttcttaaccatatcgataatcttatctctatattgctgttgaatgttttagtggtttgtatcatattatttgtttgttccatccataaccccatttattttcaagttcatctaacatttatatcagttaacaatgcgaagagaaataaataattttgagtattttgaactattgttgatttgtaaatcattctagctaattatgtttacaaatacgttaaaaccagtcatagtgaattattcaatcagacaaacgaattaatacagttatgttgtggatgaattcatatggatatattaacaattatctttctctttcaccatgaaagacaaatctaaaattccttctacgggaaatattgagatactgttgtatagcgggaatattcccacaatcaggtttaaaactatattgtttacaatctgctcaaacaaaataaacatatgcacacttagagacaaagagaagctcgtcagctctcccgtctcaaccagctcgtcagctcacccgtctgaagcatctcgtcagccggtccgtctcaagtagctcatcagatcgcccgtctcaagcagctcgtca

SEQ ID NO: 20663 - DNA, 2418 bp, Arabidopsis thaliana
cagatctacaatgaaaatcaaacgaaaacaagaaaccctaattagatctacaatgaaaatcaactgaaaacaagaaaccctaattagatctacaaatataaactcgaataagacagattaaaaccgattcaactctagggtttgaaagatcaacacaaaaaacaaaacgaaaaccctaactatagaatgaagaacaactctagggtttgaaacattacctttgggttccagacggcggcgaagaagaggtagacacggcggagaggatgaacaggcgtcgctgaagaagctccagatacacggcgacgaagaacaggcgtggatgagaagctccagacggcggcgaagaagatgaagacacgacggcaaggaaatgctgaagaagttcgagccggcggcgaccagcttcggtagtcgtcggatcgagagagaataggcgaagaagaaagaaattagggtttggatgagagacggttgggtttgagcattcgctcaaactcgttcgcgttgtatatataaacttaaatcgcctcgtaaatccctcgcaactttgctagggctttgcgaggaaccgactaaacaaccaatgaaatcgcttcaattttgcgaggaacttgcgagtctttgtagtaaatccctcgcaaagttgtaggataacacagagattcgattagggttttcagacaaagttgcgaggaggttgcgaggtccccagtaaatccctagaaaatttgcgagggacttgcgtggatccgtagtaaatccctcgcaaagctgtaggttacaagtttgcgaggaagttgcgagtcgtcgttggaaatccttcgcaaattgctaggggtttgcgagggacagggtaaaaaataaaacaaaaattataaaattataataaactttaaaattataagaacaacacaatgcaaaattataataataaactttaaaattatataattataactttcaatattattaaaaaaaaattctgaatttatttattatacttggtaaaaataatgaaagtagacaatataaaatacaacatttaattctgattcattttctgaatcattgtaatcattttctgactcaacgttttcatcagattcgtcgaattcgtctgcttgttcttcttcttcggaaccgtccgtgatgatgtcttctaactctctgttttgtaggtcaatgtggataacatcttctgttgttatgtctggaatggaaagttctctaatgctttcttgttgcatcacaacatcatcaactaaaccgactatacggcccctgggattcactttaataacggataaccacacttcacgccgtgaccttacacgcgggtaagatagaaagcttacctgccctgcttgtgatgctaggataaatggttcgaacttggcataagtcttgtttgcattgacatcgaccacgcctaagttatttttccgtaccccacgaccgatcaccggatcaaaccaatcacacttgaaaaggacgcatttcaaattcaaaagtcctggatattcgacttctagaatttgctgtagaatcccataaaactcagtttcaccttcgatatgtattccataatttgcagttgcccttcgacttccatatggatacgtatggaaagtatagccgcgagtgaagtacatcagagctgttgtgatcttagatcttggttcttgtacgagctcatgcaaccaaagtggtaatggttcgtttccacatccgtttgtaacctacacatagaaaatattaagtttatcatttttaaaaagtaaataagtaatcgaattttcaaaatattattatacttacatagtattttaaccatccagcaaaatcacgatctttgtaagtttcatactctttttcttctaatccagcaaaatcaaaatcataagcttcacgaatttgtgaatcaaataacctacaaattacaacgtagctgcttaattagcttccttaattaatttcacactaattattaaatataaaaattatgaataaaactagtttactttatacctttcaaatttttgaatgtaatcaatatttcggagtatgtaattgtgagctgctcgagaaagcgcatggtcgtcccaccaaacttctttcaacttccctgcgagtctacctatttgggcaaaggtatctggcacattaagaacgttataagtaagtgcaacacctccatcgtcatagcgtcgaggatgagtctttttggttctaacgcttggactaaagtaatacgatgtgaagtgagacgtttcctcggttaaacttcctgcgactatcgacccctcaactctagcaagattttttgcctttcttttaagagatttcatgaatcgctcaaaaggatacatccatctgaattgtattggcccaccaagagcagcttcaggtggaagg

SEQ ID NO: 20664 - DNA, 789 bp, Arabidopsis thaliana
taggactgatgaatgaacttgggtttaagcaggattcagtaaatattcactgtgactctaagagtgcgattgctttggcaaggaacacagtgttccatgaaaggactaaacacatagataccaagtatcatttcataagagatttggtaagtgatggggttataaatctggttaagattgcaacagagtgtaatcctgcagatatctttactaagacagtaccagtgggtaagcttcaagaagcgttagagcgactcaggattacagaagcataatggagccataaggctcctcaacaagctgagtgggtttactcacgtgatctgaagcttagtgggtttaatcaaaaaggcttagaaggctgagtgagtttagtcaggtatacggagttggagtccaagttcggctgctaggtcgctgcattggggtcaaggtggagaactgagagttgtgacccaaatgcctttattctctaagtatcagagagtctctcaaagaaactgaaggttcaagtcttggggttaattatcacacgtgtggttaacaggtgagaagtcaacgaaggagtattagcgttatatctttagctcattctgtttcatcgttcattgagttgttgtaacaagataagagagagagagagatcctttgtagagagagaacgttatcagcgatctagtggattccggagaatctccggcgagacgtaaactaaccacatcagttagttgaactagttaaagcttggtgtcgtttcttcattcttaaacaaacacacgagagtctaga

SEQ ID NO: 20665 - DNA, 1975 bp, Arabidopsis thaliana
acaagattatccgtgcaaaaggtgcatttctttaggctggcatagagtttttcctttctaaggacattcaaaacagaatctaaatactctatatactctcttaagcttttgctgtaaactaagatgtcatcaaagtatactacaacaaatattcaatgaatactcttagaacatgattcattaacctcatgaatatactaagtgcattagttaatctaaatggcatgactaaccactcatataacccatgttaagatcaaataatcctaaagcactatcatgtcgttgtagtactgaaggttgtcaatccaaatgggtgtgatgctaacaatcaagatgcaatcagaattcacagagtcaagccaagcaataacatgttttggtgtgttctagcattcctaagtgaacatgtagaaaatagaaaatcaggcagaaacaataaaacactcgaccaacacagctcgttgcagagcactgtgtgtggtcgagtgactcgtcaagtaacaggcagtaaatgaaacaaagatactcgactgcacagtctgttgccagacaactgggtggtcgagtatcacgtcgagaaaaaggaaagaattgcaaaaagtaagcaacatgtgacaagatgcagtaaacaacaacagagtaaacaaagaaatcaattagataaagaaaatcccgaggatggggtaatttaatagttttgtttctcagtttacatgtgatcgacatgctcaataaattatccctagacaacaagttcattaaccaaatctaagtgccaccgcaacagagacccttaagttaaactagtctcagactcaatcaccattgacgagagctaacctaacaggcattacgaatcaacaagttaaagccaaaacgctccctacaacaaataccttagtacaggtgcacgaatctctggaattagtggttcggacatttcatcgaacaccttttgggcgcgaaaatgtatgggctcaaattccagttgatcagaaagcaataggcattaagaacaactaatccagaagggatctatcaatcaatactcaatcacctagcatactgagaattctacactactctaacccatactcagaaacctattcactactcaaacatcataaaagaaagcataaacgttgaacaagttgaaaacatgataacaacagtgtaacagcaggatgataatagaatgaacaacagtaaacaaaatcaagaacaaaagctgaatacttaattgataaagagaaatccggattacaaaaggtctagaacacaaggtctgcgaaataaaactagttaaaaactttgctgcgaaaatgtgaagtacatgctacttatagccaaatattccgaaaccctaatacttaaaacgacgaagtattaggacggattaagaactgtactcgacccatgtggtcgagtgggaggtcgagtgaatagctggagtcttcttttcttccttgtgctcgagtgtctggttgagtgcggaatgaagaaggctttgaagcttgtcatcgagtatgcagtcgagtggtggtgatggtgatactcgacttccaggtagagtgatgaggtcgagtagtggtctggcaataaaggtgaagacactcggcctcggggtcgagtgatgtgatcgagtgatggtcaggtgatgggatgaagacactcgacctcggggtcgactgatgtggtgaagtagtgatgtcctctactcgaccagggggtcgagttatctgttaagatcttgaagctcctactcgacctcgtggtcgagtggtttgacatgatcaggcccgcatcttccagatagctcgtcaacagctccaaatcacctgaaatcaacgcaaatatgcaacatgcatacaaatctatcctaaacatgtaaagtgataacaaatgatgagattgtataaaacagtgatgatatgatgttaaagtgatgacaaacggatgctcaaaacatgca

SEQ ID NO: 20666 - DNA, 2161 bp, Arabidopsis thaliana
gaacctttggaccgagtttgcatgcacaaagattagtaccaataccacaaaaacaagcagacgaaatgatgagtttgtaacttgataaatgtaaaagaacataatcttaactttttctgatatcttgaatgtaacaatgtaacaatgaattggcaactgcgccaaattgataagcaggttttttaggcctacttatttgctgaagggtgtgaggttcagttcaattcccctacaaacactaacatgtcgatgcagctatagtgggtgtcaatccagtccactgttattgctagcaatcaagatgtgtacataagcaactaagtcaagccagattataatgatggtgggtttctagtaacaatcctaggtcaagattcaaacacgaaaatgagaactttaagagccctactcgatcattgggtcgtgtagaccaacaggcaacaaaattaagtaactaaaatgcaatcaacaaaggatacaaataacacgtaaataaaagagcaatcaacaaggggtacaaataaatctagtagaagttctaaggatggattcattgataagggcaactctagggttcatcagatggctaataggtgaaaggtggatacccttgacgatagattcaaaaaccgtgtcaatcgactgtcgtgacagagacccccataactctaccactttctaatctcaactatcgttgatgaagcatagcagagcagggtttaagaaacaatctaccaaagccaataagcagacaagccaatgtcttggtcgagtctacaaatctctggaattcgtagatcaaacatccatttgaacgtcttttggacgctggacgtctatgatcgaatctctacattagccagcgaaaaccgcataggggccaagcgaatccagaagggatctaacctaatcttaaccacctaactaacctagagattaccctaatctaatccatcctcaagaaacctaatcactactcaagcaacataactaagaacacaaacccataaattactgaaatcatatcaaaatgtagatctaaacaagctaaacagctttactgaaagaattaagtgcaaaaacgaaatagattaagagtaattaagttttgaagattcaagaacacaaagtaaaactaaaggataaaagctagatccttcggacaaatcccaaagtgatctatttatactaaaatgttgaaaaccctagattcactagaagacaagagacttgaggcggtttgggcgagtgctcgatcttggggatcgagtaaagagggtgctgcaaaatccgcgcctttgtgtctatgctccgagtgatcaattggtcgagtagatgcatcttcctctcctatctgtatgctcagatgtctggttgagtggggaatgaggaggatccgaagacgctttaatagatcaacaagtcttgtagagtaggtcgccctagttcgagtaagtgggtcgagtagaggatcgagtaggaggggcgagtagatcgatctgctgcttcttgtgaggctgccttgatcgagtaagtgggtcgagtgaattgctgcctcctctgtggctgcctggattgagttaactggtcgagtagaatcctctgctgcttccctactggttggatagagtagagggccgagtagaatccttgtaagctccttctgcacctgaaaacaccccaaaacatacaatatgtatgcaagatgatcctaaatgcctaagtgtgcaaaataagctaaatgtgatgcaaaatgatatgaaacaatgagtgatcactaagcgaaatgatgataaatacatgcctaaaatgagtaaaatacagtgttatcacaccactcttttagctcctcaataaggggttggaggaagacatcaagactagctcgaggatgatttggcccataatttagaattgtaagaaataagtactttgtattcatgcacataccagggggtaaattatatagagtcaggatcacatgccacaacgaatgattacgagacatgccaaatggattgaacccatcagtacacaaccctagataaatgttacggggttcttgagcaaaccggggatttaaactcttggaaatatctccactttgccgcatataaaggatgattcatttctccctccttttattggtgctcagcatgcc

SEQ ID NO: 20667 - DNA, 426 bp, Arabidopsis thaliana columbia
ttcttgttgtgattatatgaatgatgaagacaaagaagaaagaatcgagaggagaaattgggaagaacatgtcgttgatatataagaagaaactaacggtgttggtcgttgacgatgatccatcttgtcgtacactccacatgggaatcattcaaatggctggaggattcccttacatggtgaaaaacggcgagaaataagaagctacgtgacatgaatgtgacgtcaatgatcgtggggatgacttcacatgaggacgagactagggcattcatggaagctggagttgaccactgcttgtcaaagcccttaacctttggaaagatcgcatccatcattgaccatctcaaaaccgcataatctaccgattaacaaaatattacttggtttagttcggttatgtgactactgatataaatcttgttc

SEQ ID NO: 20668 - DNA, 2687 bp, Arabidopsis thaliana
gctacagagtattacagggagtttatcaagtttacagtggattgccggatttcctcaggttttcctagtgaagacagagcaatgattaagaacaaagagacaaccgtgagacccaccactgcaccctatgtcttccacgctcctaaccaacagacaagagatctccctcatctcttctcaaccaaccataccttacccttacccttatcatcactcgacctccatctcttcaaatcgcccttaccttcactcttcactcgacctcaacaagcatttctacctcagtttttccgcaacctagactcgaccgcacctctctcatctctcatcgtcactcactctcaagttcaccaagttcttcactcgaccacgaccagcttcaccgaccccattcattcgacagccacaaaacaacaccatcactaccaccactcgaccgcaccaatccactcgaccaagctggtgccatctctcatcgaaaaaaacaccgtcttctcttttgctctgaattcatcactctccaacttcaacaacttcactcgatctctgatcaccatcttcctcaccgacccttgaccaaaccacgccatctctccatcgccttatcactcgacatactcaacggagaaacgagaacgaagctgctctcaatccactcgatcgcgaagtacaccactcgatccaaccctcttactttgtcgctcaacaacaacctcctcatcactcgacctcactctcatcgcttcatcatcttcaatcgttttgtttcaatcactcgaccggttccccaaattcaaccacggagaagaagaggagtatatactcgatcgcttcacaagagaaaaggagaaagaagctactcggcctccttaccaggcgaagtcttcttctcaccaatcctggagttcactcgaccacagtgaggttctcttcgccatcatcggttttcaagctcactcgatcgctgaccaagtcttctttaaatcaacgacgccggttattactcaaccatacactcgatcggttacaaataagcaagacgaattcgatttccaaaaccaacaaaatctctcgaccggttattactcgacttactcactcgactgtgtgctttagtgtttttggtttcgttggagctaacgtattaacgtttctctttgagttccatctgtttacaggaaatcaacatgcgtaactacagtagtgagtcttctatggatcaagagtatattgtggatgaagctgaatcttggtccactagaccagagagagaagaacatgcttacaagagcttccgtgaagaaatagaacgctcagcagctcgacgtagtcagagaagagctgaaatcgctagaggaaagagagcgaagtcgagtaggtatgagttgattgatgaggacatcaagactgagtatgagccagagtcatagcgcaaggagacaaagctgttgaacaaacccgatgaggttccattcgaagagaatatacgactctttgagctgaacgatttatggggaacgaggtatccttgctacgagactttagccccgctggctactggaggacgtgcagcatctgtttgagaagtgtcatctggagacactcatgtcttacccatacgctgcctacaaggaggaaacgatcgagtttctctccacaatgcaagtggagatgtatcagggtctcacagaatttgagctggataccaatggatgagcatcgctatcagttgttgatcaagaagttggaagaactgtttggcttccctagtggaaagggaaccaagcctaagtttgacagggaagagcttaaggatttgtgggctactattggcaacaatgtaccgctaaactctgtgcggtccaagaccaaccaaatctgaattcctgtgattcgctactttcagcgctcgtttgccaatgttctttactccagggagtctacaggcactgtgtctaacatagacatggagatgatagattccgcacttacaagcattctccgccgtacaaagggaaagaaggtcctgagaggcgatctcaatgacgcgtcactagtaatgcttatgttgatccacttgtgtggatacaggatgtggacgttgacaaacggcaagaagaaggtgagaggagcactatgcgtaggtggcgttgtgacgccgaattctggtagcttgtggagtaccgctgaaggaaccaaggttagaaccgagaatgatggatttggatcatttgcgtcaatgtgagttcttggagcatgacatggttggcgacttcgctctacattgacgctactaggattctcgagggaaggaacattgacttcaagcctgcgcttgaagatctttatttcgagggcagtttgccaactaaggagatcactcacacggaaggagctacaacagaagaggttgataagacggatgaaacagatgaagtagagtttgacacgagaatgtatcatttcagtgagcatgtacctccagcgagggagagcaagagttttagtgaagctcacaagaacaacagcaagttatagaagtggtgcaagaaacaggataagtaactcgccaagttcttcaaggctatcaagtttcttaaggacaagctaagctgctcctctgccactacagctattccgcagggccagctccctcaggacatgccctcgaggagatatgacgagcc

SEQ ID NO: 20669 - DNA, 475 bp, Arabidopsis thaliana columbia
tcatcctttgccatatcaaggaaggcctggagctccaaagcctttcggtaatacatcatgcctcgcactggttgattaaaatcagaaaaatcctacagctaaaacgtgaagcagagtgtgtctgtgagaaaggaaatgaaaagccacataccagttttggtcagtgtttggcctctgtaagatgcccacagacgaagttcctcttccaactcttctcttgctctgagttcttcttcgctgccacatttcacgcgttccaaaaagtctgtccacacatctgaggtaaaccactgagtcagtttatggaatagaaattcagaggacaatagtagtggcacaagaccatttggagacagcagaaaaagtgatacttggaaagatctgctgcaagtaaacgagtatagagactccatcgtcattgtgcttctccataccgaacatggagagtagatcatcctcatgcatagtatggtgt

SEQ ID NO: 20670 - DNA, 600 bp, Arabidopsis thaliana columbia
atgagttttgaaaacatagataagatgatggacggtgaagatgatctgtacacagtttccatcatcttttgggttttcagaagacacggttaccacatatcttacggtaaaggagtctctctacctaagcttttgttcatcattgacgttggaacaagtgttttttttttaatctcttattgttatgtataaatgacttttatttatattttggtcaataggtgtattccaaagattcaaaggtagcaatggaaacttcaaagaatctcttactcgagatgccaagggtatgttgagcttgtatgaagctgcgaatttggggacaacgaaagactttatactggaggaagcgttgagcttcacatcgagccacttggagtcactagctgcaagtggtacatgcccgcctcatctctcagtgcgtatacgaaatgctcttggtctatctcagcattggaacatggagatgttagtccagtggaattcatccgttctatgaacaagaaatagagcatgacgagatgctactcaagtttgccaagctcagcttcaagttaggacaactacaataccttcaagaactcataacccttacaaagt

SEQ ID NO: 20671 - DNA, 554 bp, Arabidopsis thaliana columbia
atacgtatatctgaacagaactttatcaatgacatgataaatccgaaaattgagatgcatacatatatcagtttatgagttcaactgattaacaaggtacaaaaattataaatttccacacaattattctacctaatatatttacgtcaaacttacgatgtaaaccaaacttggattcgaagctagagtaggtttagttatttatttctaatcaatccacaaaattattaaaatcaagctaagaaaatagtatttcacagtgcacgaaaaatcgagctacaaaaatgataatcaatccacaaaatactaaaattaagaagaagaaaaaagaagaagagaagttacaagataggggtactagtagtaacggcgtaagatttgctacgaggatacaaaagatcagagactttcttagtcttcttcaccttcggattcacagatccttcctctgtttcttcctcttcctctatcctcgccatcccagcactcgagctcttaggcaaccctccttgcttctgttgcttctgctgttgcagcttctcttgtatcaacat

SEQ ID NO: 20672 - DNA, 529 bp, Arabidopsis thaliana columbia
  unsure (1)..(529): unsure at all n locations
nnnnnnnnnnnnnnnnnnnnnnctaaagttgaagattttaaagttgaaggcgacaccaagcctgaactggaacttactctgaagtatttccagggcaaagctgttgtagaaagcattcagcgtgtcagccgcccaggtctgcgcatctataaacgtaaagatgagctgccgaaagttatggcgggtctgggtatcgcagttgtttctacctctaaaggtgttatgactgatcgtgcagcgcgccaggctggtcttggtggcgaaattatctgctacgtagcctaatcggaggaaaaaatgtctcgtgttgctaaagcaccggtcgttgttcctgccggcgttgacgtaaaaatcaacggtcaggttattacgatcaaaggtaaaaacggcgagctgactcgtactctcaacgatgctgttgaagttaaacatgcagataataccctgaccttcggtccgcgtgatggttcgcagacggttgggcacaggctggtccgcgcgtgcctgctgaactcaatggttatcggtg

SEQ ID NO: 20673 - DNA, 559 bp, Arabidopsis thaliana columbia
tataaataagcacgcaaacttaaaaactacaacttgataggaaatagtatccggaattgcctgaaaacaacttattgagaaactaacaaaagagataatccagcgtaggtccacctcctggtctaaccgccaaagacgtgacatggttaaggcggaaagcaggaggtttcaaggtcagcgataaaaccacattctagtagtatttcttcttcaatcactgttgttgagcttgcctaccacttccataacctccaccataaccagcttgcccgttgttcccttggtgattcccatagcctccagagccatctaaagcatccgcatagccaccgccaccatggttgttaggcatattcccagatcgcccccctactgcaccataggcagatggagtcccgtaagaggaatcatttccaccatagccataaccttgactgccataacctgcagatgcaccagcttgacccattactgctgaaccaggaccaccagaaccaccccacggagctgcatttccatatccacattcccatacccgatggtgcttgagcgcccatga

SEQ ID NO: 20674 - DNA, 512 bp, Arabidopsis thaliana columbia
  unsure (1)..(512): unsure at all n locations
nnnnnnnnnnnnnnnnnnnnnnctaaagcatcgcagttacggtttgaagtccaatggcgcgtttttgaacacttcatatactgcctggcttggtggtttcgggatcttcgcaagtttagctgctgccaacgcagcctgacaaagtgcgggatcgcaccttcaggtttgatatccagtaacataccatcgggtgccagttttatgcgcacgtacaggttttgcctgcataggacgatgcgtcatagaacttactttcgatagcagatttaatctgcccggcatagttattgatatcggcccctgatgcgccattgtttttagtattaccactcccggcaggcgaacgattgttccctttcgcccctcccccctgttttcggtgcattcttaccagagcttagctcaccgaaaatatcatctgcctctgcggccgcttttgctgcagcctttagagnnnnnnnnnnnnnnnnnnnnnnnnnnnnnnnnnnnnnnnnnnnnnnnnnnnnnnnnnn

SEQ ID NO: 20675 - DNA, 443 bp, Arabidopsis thaliana columbia
ctttgtgcttattcctagaaactcttgtcgcggtgatgtaaggaaactgtaaataacgaaacagacagagtttgatgacagaagtttggagtttcacaatacggatatgagtttgaacttgaagattaaagtgttatgatttttacacacctccttgttgttagagctataagagtttatttccagcagtgtaggatttgtgatcagattataagtagtggcatcgagatttctcacatcaccgccaaacatgagaggggactttgcgatggaccacaatgtcatctgagtaagcaatataaaaagcataagaaatttgaacttgtggttgagaaggttattaataaactaggatccttagatgaggtccaaagcttgtggtatacctgtgacttctgttcttcaagatttagatttcacgctcgatgaggtccgacatttga

SEQ ID NO: 20676 - DNA, 529 bp, Arabidopsis thaliana columbia
atgttagaggagctctagctgttaacacctttgccttttctttctccagcatagcttccctatctaagcacttctgcttaaattccttcaattcctcctctagttcttgaattcgagcctcaccagtctgttcttcctccttctttttcttcacttcctctagctttttctccaaccaatccactttaaaccccgaaactttcacgtatgtcagtgcattgtctgcttccacaagatcttcatttgatagcttctgaggtggttggcacaatgtctccattaagctgagcaagaaattcatgcatgctttcctcagatgtgggttctttggacggaaatcttttgcaatgtctggatgtttttcaaaaatacgcttcacaaaatccacctgcaagtgaattaaaaaaaaaagcaagatttttgataactcttgtgaggttgaaatttctacaaaactcttaaaagttttcttacctgggaaggaagaacttgaaaaccattgacgtccatgagttcactaaccggtgga

SEQ ID NO: 20677 - DNA, 536 bp, Arabidopsis thaliana columbia
tcattgagaagagaagacttagatacaccctaatgaccaaattaaaccacaagattttcattagagaatatcaaaacattagtatatacaagaagtgagttgttgttatatttatgttaccccaagaagatcagagcctttgatttcgttaaagtgtttgtagagatgttggagatgaagtttgcttcttgtggtcaaaatcctaacaacctcatccttctccacggcttcttcgcctgaagaagccactgcttcggctagaatcttagcatcggatttggcagaatcatccttcaccttatttccttcgtatctataagcactcacgagccccacaagcaactgcacaaaaaacagagacaatgagtgagataaaagaagtttgaaagagaccaacacactagagtatataagaatattgaccttgcgctgaggactgtggacgtgagaggcaatgtcttcttccattgattggtcgaagagagagtggtaagctttacgtgctacgaggagatctcagcagacgtgtgcatgag

SEQ ID NO: 20678 - DNA, 516 bp, Arabidopsis thaliana columbia
ctctttggtgctgatttcgatttgcggccagataaacggatctgacccggaatcaaacccggatctggtccaatccgacgagtagatcccagatctgacatttccacaaccagatctgaagtctccttggggatttcttcgccgcgcttaaggattctcacctggctaacggcaacggtattgctaagactcttcttaagggttccctttggaacgaaagcagagacagccgcacgaggaggaggaagcggcggcgctacaggaggagaagaagatctggaggattgactacgaggaggactccggcgtgtacggttgttggagaccgtcttcttctgcctgttgggacatgcgctaggattacgatgttgtttcatgtgagagaatggatctttcaagcaatcctggggatttagaacagcgacgcccatagctaattgagaaaggcagatttggtggttcagaaacagaagaagaagaagaaatttgttaaattatctctcagaaaaaattctc

SEQ ID NO: 20679 - DNA, 657 bp, Arabidopsis thaliana
catgacacattttatcgacagtacaataaatctatgtccaatgatcaggacagtaacgtataacagcgatacaagattattagaaggtaaagagaacttcatttcctaaaactaaactatgactactttgcacaatatactgctgcaaaatttggtacttctatcgaaccaaaggccattaagactttctagaagtaataaagcctcacctcgaagaacacagccataccaaatcgacgagccttttccgatctgaacatcaccaataacagaagcactcggagccacaaacacatctttatccaccaatggtgatttatcaaacacattcatcaacgtccgatgcctcgacactgaaaacaaacacaaatttctcgaatcaaattttttcaatctaagccacaaatttctccaatcaaaggtgaagacacaaattagagataacgaattggatctagggtttcaatagagagtattaagtggaaggatctggaagcttacgatgttcctcgatacggtgacttccttgaagaagagaaccaacgcgatcaagagcttgaccagttccacgaatccagtgtcccacagtgtaaattgctcgtcctagggtcccatttttttgtgatctccgattagcaaagtgtgaaaatgagaagg

SEQ ID NO: 20680 - DNA, 466 bp, Arabidopsis thaliana columbia
  unsure (1)..(466): unsure at all n locations
atgtgtctgagtaagaagatactggcattggcacatgataaactcgcggatgaggctgagagatcanggaacgaagacgacgatttgtggatatctgacgatagcgacattgaatgggacgtttcgctgctgaccacagctgagaggcccttgatcgcgtttgctaaacgagttgcgtccttgcgagtagaagatgagacgaaccccatccttcaaattaccggaatatcatttttancaactaccatggcccaaggtttgttagacgagagacatgcgtcttcggngaatgcggtgacgtctcccgaccttgggacatgtgatctagacccggtggttcgagttcggcctcaatcggttctcgattcccgcgacagtagcctaaactcgggacaaagatgtcaaattcatattggtggatgtctccgacgaagagatcgacctccccgaaacatcatttggggac

SEQ ID NO: 20681 - DNA, 1230 bp, Arabidopsis thaliana
ccaagtatttgctaaaaaccttttatacttcttacggtacgctaaccttaatattcactctccttcgtaatattcgcacattcctatgaatggaacgttctcctcaagactgtcgtgcaagtgaaacattcaaaaggcagttttttgtgatcctaagcaaattgttgaaaacatccttaacagttacacatattccaactcacacaggcatgaaaagcgggtaatgcatatatatgggtaaattatgcacattttctttatatataaatattaacaaacacacaaaacacacacatgtacaagtacaaacacgagcctgatcatgtcaaagcacgcgatcactcacacggtcaggcgaacttcctgcggattagaaccaaaaacaaaacacctacaaaccattgaggagtcttgtagaaactcgtgtcattgaatattaaaggtgctatgaaattacagagaccagccaaaacaagagcgaagaaaatctctgtttcaatgggcaattccttctctttagtgggaacgtatggtagctgtctcttaacgtcccgaacaatcgcatccacaagatagctatctattctgccaaatcgataagaacagtattgatatagtatcaacctaaaaatttctaactaaaaaccataagttaaattttaatatgtactctcaactgatattacattataaaacaaaaaccttaacttgagacagaacacaaaatacctgtggacttctgaggtgaagccggtcttggacgaaatagatttcacagagttcacccaacgttcggccataggttcctccttaggagactgtctctgcaccgtttctataaaacaacttccaaatttacctttgaaatttttcacgtcgtctgtattgaccctgtagaagacagggatcactgttagtttcccttccttcacgcaatcatcaatcttcacgagctcgtttaagcaccagtctgactccgagaaccggtcagagaagatcacgagtgccatctttgagttttcgattctcttgaagaggttttgaaggtctctccctttcatctcgttgctatcaatgaaaacgttgacccctgcaattctcaaggctttcactacatgactcacgaagccgtggcgcacgtcctttcctcggaaactaacaaacacctggggtcgtggcaggggtggaagactttgaggtggctgaagaaggcgagcataaggaagagga

SEQ ID NO: 20682 - DNA, 1503 bp, Arabidopsis thaliana
aatcaaatttgtttcatatatcactcaaagcttgatgagaagaaacacagatcaagaaagcccaattatgtcttattactcctctttcttcttccttttcctcttctcctttctcacgagtttcagagtttctgctcaagatcccacttacgtataccacacctgtcaaaatacggcaaattacacaagtaacagcacttacaacaacaatctcaagacccttttggcttctctttcttcccgcaacgcttcctactccaccggattccaaaacgccaccgtcggccaagctccagacagagtcaccggacttttcaactgccgtggagatgtctcaacggaagtttgccgtagatgcgtctcctttgccgtcaacgacaccttaactcggtgtcctaaccagaaagaagccacactttattacgatgagtgtgtacttagatactctaaccagaatattctctcgacactaataaccaccggtggagttatcttggttaacacccggaatgtgacatctaaccaactagacctgttaagtgatttggttttgcctactctgaaccaagccgccaccgtagccttgaacagttccaaaaaattcggtacgagaaaaaacaattttactgcgttgcagagtttctatggactggttcagtgcacacctgatctcacgagacaagactgttcgcgttgtctccaactggtcatcaatcaaatacctactgacagaattggtgcaagaattattaatccgagctgtacttcaagatacgagatctacgcgttttacaccgaatccgccgttccaccaccaccaccaccaccgtcaatttctactcctccagtttcagctcctccgcgatctggtcagagctctgtttttttcctctgttttttttttttgccctgatttcttgaaattggcaaaaccaatatagagagttttcttctatctgatttttaagcaaataatctttgaaatgcaggaaaagatgggaattcaaaggtgttagtgatagccattgttgtgcctattatagtggctgttctgctttttatagctggttattgtttccttacaagaagggcaaggaagagttattacacaccatctgcatttgctggtaaagatttcaagtgataaacgatctttaatgtcaatgctcagcttgtttttcctgcttcaaagactttcattgtgtaacaggagatgatatcacaacagcagactcactacagcttgattatagaacaattcaaactgcaacagatgattttgtagagagtaataagattggtcaaggtggatttggtgaggtttacaaggtaaattatagttcccttgagctgtgttttttttttcttgaaattttaagccaacacttttggataatgggatgatgctgatgaaacaacagggtactttatcggatgggactgaagttgcggtgaacgactatcaaagcatcaggcaaggtgaatagagtcaagacgaggttg

SEQ ID NO: 20683 - DNA, 777 bp, Arabidopsis thaliana
cgtgcgtcgaagctttggtcagaaatctgtaaccagaaatcatgaagttcatctttcgttatcttctccagtttctgtcttcttctcctagccaacgcgtcgaatacactcaccgcaaagtccttcgaatccaccatccctttaaatttacaaaacagtggattggtccatgatcattttcgtatgtatatatagatatttattgacttaccaacgcactcgccaaaatcgtctcgggcgagtaatccatttttagaaagcgattcgaatcgcttttcaacttttttccacatctgatcgcaatcgcaatcccaatcgcagacgcagctatttcctctcgtggttttatttataaactgtaatccttttaacgctctttgcgcactcgacgttgatcgctgtagtttcgcgtcttctttccgtttatccctcgccgtcagaatccccaaagtcaccgccgtctgacgttcaagatctctatctctctcgccggcggtagaagacgtcgtcgttttccacgattccgacctcagtaacttccctagtttctggcggattctcgtagacgcattcgataaattcctcgataacctcgcggttaccaaatccaccgatctcgcccgagaatcaacagacgccgcctcagacattccgcagacgagtatggagtcatcgccgacgtcgagctctaacgtaacctccacgagctctctttcccagctactaccgcttccggattctccactgttacgactcaaatcgttgagaaaaaccggc

SEQ ID NO: 20684 - DNA, 543 bp, Arabidopsis thaliana
  unsure (1)..(543): unsure at all n locations
nnnnnnnnnnnnnnnnnnnnctaaagtatctgtcaaaccacaatatctccccgcgctttatgacggaatgggatatttttgctaatcaaacctcaatgattacagcaggttataaccgttactatggcgggaatattcttgatatgggattacgtgatatccgcaatagctggacggaatcggtatcaggtaataaaactctgacgcgttatcaggatttgaaaacgccttataacgatgaactggcaatgggattgcagcagaaaatcggtaagaacgttattgcgcgtgcaaactatgtttaccgtgaagcgcatgatcaaatcagcaaaagcagtcgtaccgacagcgcgactaaaaccaccattactgaatataacaacgatggcaaaaccaaaacgcattcgttcagcctcagttttgaactggccgaacccctgcacgttcgccaggtagatattacccacaaattgtcttagctatatcaagagcaagggcaacttgtcgttaaacaatggttatgaggagagcaataccggtgat

SEQ ID NO: 20685 - DNA, 455 bp, Arabidopsis thaliana
atttgcgcgtttgtgttttcttcatgaccaaacattgttggaatccgtacacgtacgacagatcctgaccgttggatcaacttaccttgggaaaaaagtttcacatttccgcgttttttttacagtacgaaagcggatctcggaaacgtcgccaccgcgtagatcaaagcgttgacggcggacgtaaaggagcttgactcaagcaattcagacgcaattgaacgaatcaagaccggttttactcaattcaaaaccgagaaatatttgtaagtatttaaattactaaactttttaacgttatttaaggaaaagaatataattagattcgtatttgttctgtaaagaagaattttcatgacaggtggagtggtccattaatgatagacctacctgtattttttcttattcacttagcattactgtttttattcatgtgagagtgctaaaaaaaggtg

SEQ ID NO: 20686 - DNA, 378 bp, Arabidopsis thaliana
tgaacagatgtgctaaatcttaaccagaattcaatattctcttccagcaccgcatcaatatctccacgcactttttcttccacagttggaattttctttcttaggctgtcactaatgcctgcaaatttcaccttaaacccgtcttccttttcttgttcagatgctctcttcaagtctcctctttgaggaagtggtggcatggagaatgaagagttagagctatgagagatgctcacactttcagcccggtttctttctactggatgaggaaaaccctggccgggcaattctggtttctggtgtaagaaatgaaaatccacgtcttcgcaaggaacagcattcttgagctctcgcaactgcaatgccagctcaaagaag

SEQ ID NO: 20687 - DNA, 422 bp, Arabidopsis thaliana columbia
ccagtatagtagtagtactgaaaagtatctatgcccacattcccacgtaaacttaacaactaacgctagttcaaagagaattttaatcaagctaaaccaaagtattttgtcggctgtgattgagaaaatggagtaaacgagataacacagatgtagttctctaactcttttattcatttttttcgtctgaatgattcatgatattaacaacaacttgttcacaattacaaagaggaaacgaaagcaatcaaactacagaaaatcattacaacaatgtaatggatttatcaatttcaagcaccttctgtagccaaaaggagtagcgtactgctacaaaagactgcgatcggtccgccattgtgacacctttagctaagaggaaaactccttggattgcacaacgatcttcaaacaaggtggaa

SEQ ID NO: 20688 - DNA, 477 bp, Arabidopsis thaliana
tcatctcagtaaaacgtcctctatcagatccaaaagccatagactgatcctgaagatcacactctcctccttggtcacaaatagtgacaatccaaagggtgattcatcaacaaaaactccatcactccctccctcgccttcttagctatcggtgtatcagtcttaatcttcatccctgttacaaaaactcttagcaatagcaccaaatccaaatatattccaccaatcaacgatcaaaatcaatccatcagcatagaaattttcctggaatcgaactaaccaggacgcgcaggcatggcacatgaagctacaggcttaggagatttctcaacctcaacaagacacatcctgcaatttccagcaatagataaacgagaatgataacaaaacctcgggatatcaactccagcgacctcacaagcctgaagaacagtgaatcctttagggactttgaccgcgttaacatcgacaaagacc

SEQ ID NO: 20689 - DNA, 568 bp, Arabidopsis thaliana
agatatataaaatactgaattgagagtacaataattaaaaaaataagtaaacaaacaactcttactataaaatttctttgttattttcttgccctttaatttataacatctctcttcatgtaattaacaagcaaatccagcttccaccagcttgtttagtttcttgtttctcaatctctcttcataaacttcacttccttgcatttctttctcatgcctaaatcatatattataactataaaataataaattatatagtagtaatgataataacaataatagtaataataaaccccttggtggcataggtattaaaggagatagagtttgtacaagcttgagagcttcttcttccgtgttcacaatttggttgaagcaaaagtatctaccacaagccgaagtatcctcgaatgctcgaatgtgaacatccgctacaaattcaacatctacgtacgctaacacaccgttctcatacatttgtgcagctcctacaatcacatacatagccagaacaattacattattagttcatgaatgtagtatatatatgtacctgattggcaaaaaa

SEQ ID NO: 20690 - DNA, 575 bp, Arabidopsis thaliana
  unsure (1)..(575): unsure at all n locations
ccccttgacttttattctaacttgaccacattttcactactttttttgtgcttgcaatttctccagattgtcaaaaacatggataattatccaatcttgttggctttgatgcgtcttgctagaagcctccttcataaccctcatgtacatattgagccatatgtaagttttgtgcgcacactttttttttgtntttttttgtttctcttctcccttctcctccttctgttgacttttaacttgttgtattctgttcagctgcatcagttgatgtccgtctattatcacttgccttattgccaagcgcttaggaagaaggtcatctgataatcactgggacttgagaaacttcactgccagcacagttgcttcaacgtgcaaaaggttaatgttacattcttgctttgtgatttcatgcatcttatacaaccatataacttgcaatcacattagtgaactttttacaggtttggacacgtttatcacaatttgttgccacgtgtcacaagatcactgcttcatacctttttggacccaaccaaggactccacaacactatggggcaatcaagggat

SEQ ID NO: 20691 - DNA, 542 bp, Arabidopsis thaliana
tttttttttttttttatcttgttgcttatttgtttctcaaccttacacatgaattgtatataaataagtaaacattttatttgtatttacggtgttgtccaaacttttctttgaaactgaaaattacaaaataagtaatcatatgaatcaacgaaaaaaaaaaagaaatagaaagttttgagagcgtttgactatgatgactttgtggcgtcacaaactagagctcctagtcaacgaccgatggctagttttcgtctgcgccatgtgggtccaatccgtcgccggcgttggctatctattcggcggctctatgtctccggcaatcaagacttcccttggctacaatcagaaacagatcgctcttctcggcgtagtaaaaacctcggtgacgccatcggattcgtctccggtgctttatctgaagtctcaccttcctgggtggttctactcgtcggtgcaactcagaaccttttcggctacggtgttgtttggctcgtcgtcactggccaattgcctaatttgcctctctggatggtgagatg

SEQ ID NO: 20692 - DNA, 510 bp, Arabidopsis thaliana columbia
taatcacatctaaccatagagacgtatgttcgtacagtttcagtatttcaactctatcaacaaaagtaacagaaccgcacggttgtataaagtactgtatcatttaaaagttgcccatctcaccctctttggctaactgtcatgtcccaacatttattaaggaactctgatatttctacttctgcgtatatatatagacttgtccttcactgtgtactattcattcacaaacatattcctctatcaaaaaaagttcaaaacattctatccatctatctaccttatattagatattaatcttctcctcctactaaaatgaagagcaagttcattaagtcctgtgaaaagaaactgaaaaagatgacgagcaaagtcataataccttgtgcgtcttgcgagtcatgctacgagagaatttgctgggcattcaagaaggaagatgaggtgatccaagagatgtcctaagggaatttggttgctatgtgggtgagagtcaagaggttgtgaaaa

SEQ ID NO: 20693 - DNA, 516 bp, Arabidopsis thaliana
atttttcgaatggttattttgggttcagattgtggcagtgaagcaattagatagaaatggattgcaagggaacaaagagttcatagtagaggtcttgatgttaagtcttttgcatcacaagcatctcgtgaatctcattgggtattgtgctgatggagatcagagacttctcgtctatgagtacatgtcacgcggttcactcgaagatcatctcctcggtaaattacaaaactaaggatccgtattgactaactttgaatcagtcctaatgtttaactgttttttgaaatgctaacagatctaacaccggaccaaataccgttggattgggacacaaggattagaatcgctctaggagccgcgatgggtcttgaatagttgcatgacgaggcaaatcctccagtgatctacagagatctcaaggcagctaatatccttctagacggtgcattcaatgccaagttacgcgatttcggtctggcaaagctaggccctgtcgaggacaaacaacatgtg

SEQ ID NO: 20694 - DNA, 490 bp, Arabidopsis thaliana
aaatatgttcatggtttctcaggttcaggagctctatgataaagacttcaagagtagcacattatatgacgttggtgagatagagaagtaaatagaaggtatggtcagtgagaatttacttggaaagatggctggtaatctgcgggactccacccttttcacctccaaactcaccaccagctcgaggacctgcacggtacccatcacggtcaccaaacctgggacggtctcctccttcatggcgaggtcctctgaaatacaaagaaacccaaaccatgtcaaacaaattaaaaaaaaaaaaagtttttgccagacatgaaatgggttaagcaaagagttaatcaccttgagcgatcaccaggtgggccaccaaatggacgaccaccaggcttagctgacttcttcaaagtagcaggaacaacatcagatggaagattaagataagttctcaagaactcgatcccttcattggtcaaaaaccaatagtaat

SEQ ID NO: 20695 - DNA, 448 bp, Arabidopsis thaliana
tcttcatactctttcaacacacttcccaatccgtaaatcccactagattcatcatccgctacaacagcggaagatgacgaagcagaggagatccaacggctgagcaatgctccggttctcgcgatccgatccgttccatgagtaatcccaccggagaagagaagtgtcgtcgtcgccttcctgattctcaacgccattagctgcttctgtatgattgatttgattgttccgttatcttcggcttcgtcttcgtctggggattataaaaggagaagaagcgtgtgcggagaatctttaacgcataaagagagatgtgttgttacggttataccctttcatattattatccgtctacagtttttctaccctatccgctaatcagaagaactgatgatgtggcatttttaaaaacttgttattacactcttaatctttaatcatgagtttt

SEQ ID NO: 20696 - DNA, 658 bp, Arabidopsis thaliana
gatcaggctataatagttaaaaaattgttactaccaaacaacgaaagaacacaatgaagtattatgtattattgtcaaacaaaatgatctcacacattcaagtgcgcttttaattagtagaaattgttaaaggctaagaaaatcaaaactagttgtgtagaatagaaaaattaaataagttttttttgttctttaaagagagataatgtaatagtaatggttcacgacttcacatgatggagcaagacggttgttcctcttcgtaatgtgatctgccaccatattgcgatggtggtggttgccaacctccgtagctattgtaaatgggtctttcatcatacccattgggtcgggaccatccgtagttaggcccatcagaccaaggcaccggatggcccatcatcggcggtggattatacccatgtgtcacccgttgagaacttggatcgccttgagctggagctgctgctggtttgggcttctctggttctttaggtttttcagcttctttgggcttctcaggttctttgggcttttgagccacatgtttggccggatcgatggtttcgatgagcttaatagctccacgtcctttggaacagagtttgtccacactttctcaggactgcagcaaaccactttgattgtgaccgtgttg

SEQ ID NO: 20697 - DNA, 616 bp, Arabidopsis thaliana columbia
  unsure (1)..(616): unsure at all n locations
cgtttcttctccaaatgtaattcccgaagctgactccatctctggtccgcctgatatcatcaatacgaaccgtgaccagcgcaaagtggttcgtatcgcttgggagaagttggttcgatggtctcgttctttgcgcgctaaagctaaaaccgatgttcttgagcgtactcgcaaggttttattatcttcactttcttgcttaatttcgtttgcgttttggagaatttgaaagaatctgggggtttttaggttgttgttcttggtggaggttcgtttggtactgcaatggctgctcatgtagctagaaggaaagagggattagaggttaatatgcttgttcgtgactcttttgtttgtcaatctatcaacgagaaccaccataattggtactttatagcgtttgatttttatccaaacacaattcataattcttgaagacttcgcagtgataaggttgattctgttgccagtaagtatttcctgagcacaagttacctgagaatgtgattgctacaactgatgcgaaacgtgcattgcttgatgctgattactgcattcatgccgtgcatgtgcaggtttaacacattgagtatgtgtntttagttttgttgatttg

SEQ ID NO: 20698 - DNA, 512 bp, Arabidopsis thaliana columbia
gaatgtattgaagtcaatgcgcctatatacctgacaatccattctatctgtaattccgccatgtccgggaatactatcaccaaagtcctgcaaggttggagaacatttaacagtgaatcaatgttgcatagatattgtggttttatactgaatatcatctgaaacccaccttgattttgaatgctcttttgaaaccactggcaaagaagccaccaaaaggagctattatagaggcgaacaatccaagacatagagcatgccactggactggtagaatcgaaatttccttccaagggagctgtaaagtaaacgcctcacgttaagaagcaataaagttgctcgagtaattgtttagtattgtacaattcaattctagactttacccaatcagaaatccatcctggtaaagcatgtgtctcttgcttgaacagtggaccagggtcacagaggagccagcctgtcgatagatcctgtattcataacccaataacataatggttagtaataattgt

SEQ ID NO: 20699 - DNA, 525 bp, Arabidopsis thaliana columbia
gtaacgtccgccagtcagcctctatacccaacaacaaaaacgcgcgtgtatcacaccttcaatacactagtaagagtcacacagtgatcgtcaccggtaaattagttggcaaactccgcctgctcttcgataattccgaggagcttcttcactcttcttatatctcatttctctctatctctctctctctctcgcattgcgattaacgaaattcgaaaaatgtctcgtcttctccaaacacccttcttaccttcagtttccctccccacaaaaacacgatcttccgttacgggtttccgggtaaagcccagaatcatcccaattcaagcaaagatccgagaaatcttcatgcctgcactaagttccacgatgaccgaagcaaaatcgtctcttgggttaaatcagaaggcgataaactcaacaaaggagagagtgttgttgttgttgaatctgataaagctgatatggatgttgagactttctatgatggttatctagctgcaatcatggttgaagaaggtggtg

SEQ ID NO: 20700 - DNA, 581 bp, Arabidopsis thaliana
ccaaagggtgtgcatgaataaccgttaaaccagttggaatctgttgagctgagtagtgtgtagacttacacgacgaacaagatcgagacagagatggcgttggatgtctctacggagatctgcgggtaatgaatgaagaatggtttcctcgtcaacaccgcgagtcgccagccatttatactgcacgaaacgcctcactcgttctctaagattctgcggcagtaaccgatgtcccatccattcttctgtgtctcttctcttcagtctccattcctcaagcctcaccgtgatcgattgcaaatacgtctatatacaatacatcaaccaaaaacaaaatcaacaaaataattctatcttgttacctataacaagaacggagatgattcacgtttttatacctgcatgtttccgatcaaaagagcaaacaaaaccagaccaaagatagcgacaaggatagcaaacattgtctcaagaacagaggtacttgtgctcaggttctgtccataagaactttgacaagaaagttgtgttaggaaaaactggtaaagcgataaagaacagtgattactgaatgtgtatat

SEQ ID NO: 20701 - DNA, 824 bp, Arabidopsis thaliana
ctaaaggatttgcttttccaacgattgggccgtttacatcgccatcatcgcaaatatcgtcccgctggttttgagattcctgttgccaccattttgctgcctgatggcgagggttacggacgacatgagcatatttatagcaacgttagagtcatgtggcggacgcagcaacatattgaggagcttaatggagcatccttatttttccctgatgcttaccggcaatggctggatagcatttacgatgatgcggaaatggatgagccagaatgggtcggcaatggcatggataaatttgaaagcgccgagtgtgaaaaaaggttcaaggctcgcaaggtcctgcagtgggctgaagaatatagcttgcaggataacgatgaaaccattcttgcggtaacgagggatggggaaatgagcctgccattattgccttatgtacaaacgtcttcaggtaaacaactgctcgatggccaggtctacgaggacctaagtcatgaacagcagtatgaggcgcttgcacttaatcgcgtcaatgtacccttcacctggaaacgtagtttttctgaagtagtagatgaagatgggttactttggctggaagggaaacagaatctggatggatgggtctggcagggtaacagtattgttattacctatacaggggatgaagggatgaccagagtcatccctgcaaatcccaaataacttcgggaatgattgttatcaatgacgataataagaccaataacggtttatccctacttaagtagggaaggtgcacaatgtacatcttcttttaatttcccggtatgagattttcttta

SEQ ID NO: 20702 - DNA, 604 bp, Arabidopsis thaliana columbia
atatgctttgtttataactttatataaaaaaccttcgtagtgtttttagtttttaccatttgaatgatatgctttccttttgagttgttcattaaagagtgttttgctcagtcacttttggtctcatggactaagatacatctaacatccttatttgtagagtatagttttacattctatgcaaagggcttaaatcatgctactatccttgtgagccagtgaatcttctttcggagcttgttgatcatcttggttgatttagggcgtgatagatggaagccgatggagtcaaggtaccagccactcctaccgttcataccaacaatgcgtcccccattgactgagaaagtgaagggtgttcctgttcaactccataaggtccatacacttgtttattgctcttgaaggtcattgatctgattacaggagtgccactgttaaccattggacagtagtagccactcacgccagtcagatactcctctgggtattgcagctttatctgcagaaattcggttcatgtaaaagaaaccaaaatctgagggaggaagttaaagagagacataatccagagtgatagaggacatacctctgatgttttgtt

SEQ ID NO: 20703 - DNA, 1124 bp, Arabidopsis thaliana
aacctcgaaacgatagcgtatgacgaagaaaaaatgtcaaaagaaaatacaccgccaaaaataccttccacgacgatggagtatgaacgacgacttgaagcagcggcggaaataatactcgagaaggaggcgaaaataagcaacacacctccggattgtagtgaatttggggtcacggcgactctagagcctcaccgagtcgaaggtgtctcttggcttatacagaaatatctactcggcgtcaatgtcgttctcggttggtcttcgaatccatttcagttccttatttgtgctcaagtttaggatagttcgattaaattaatgcaaaaatcaaagtaaccgaacttcgattaatccatgtatggttttgtttctatttgcaggagacgaggtacttccatgattccatcgttttgaaatgttatccttgattgtgtttgtgtattagtctaattgaagaattggaccagatgggattgggaaagactctccaagcaatctctttcctgagttatttgaagtttcgtcaaggcttgcctgggccatttcgtgagtcaatgagatctgcttgttacattttctgattcagtaggaaatttctgatgtcatatgggtgttaataaaggttctaattaatatgtgacagtggtgctatgtcccttaagtgtaacggatggttgggtatcagagataaataggtcactccaaatcttgaagttcttagatatgttggcgataagtattgccgtctggatatgcgtaagtcaatgtatgatcatgtcaagaagagttctaaggtgagttttgaacttagtctttcatatagtaaagtgagagtcaataagaaatagtctttgggtaacttcttatgaacttggggtttgaaagttttgtgttttatttatagccttcttctattttgttgtcagggacatttcttaccatttgatgtattgctgacaacatatgacatagcattggtggatcaagactttctttctcaaattccttggcaatatgctataattgatgaagctcaaagactcaagaatcctaacagtgtatggttcacttatgtctaactttacaatccattgacttgtgcactgaatgatagatcttta

SEQ ID NO: 20704 - DNA, 596 bp, Arabidopsis thaliana columbia
  unsure (1)..(596): unsure at all n locations
gtagtgttggagccaatgtgaagggatttttcgcatggtcgttgctagacaatttcgaatgggcaatgggatacacggtccggtttggactggtttatgtggatttcaaagacggatgtaagagatatcccaagaaatcagctgaatggttcagaaagttattgaatgaaaagaaaaacgattgatgatgatgagatatgtatatttcattatattagtttctctgttactcttgagagatttatatattttttcccccctttggaaataatgagaaatggttttagctattttcacaacgaaacccgattgatgtatagctgatggaaatcatctttcgatgtaattacgtacgttttataaggaaacttaatattaaacttgttgaaaaagttaaaaaaaaaatagaatgtgaaaacgatataggcaaagagtatgtaacatctacaactttcagcatatatcaatttgaaaaaaaatgttcaatctttaaatttttgaagaatctcatggttttcaaagatcatcatttatggtattatgagttggattattgatatntttttaaagattgtgatggtcccattattgattag

SEQ ID NO: 20705 - DNA, 583 bp, Arabidopsis thaliana
taatcgtcttaaccaatatcaataccagaagaagatacacaaaaatcaaagcagagcgatataacagtgaatggaaccctagcaatggtaaagttctcacatttaagtaacttactgaatgatttttggacaatttagccaaaagcaacgaatctaagcagtgacaaaaattcatctactaacctgatgccaagtccttgggcgcaagtttcttcataagcagcgaccatttcttctggagacttaggagtttcctctttggagaaatccatagtgataagccagtgattataatcacatccttcgaacaacacagtgtcttccgtgatctcatcaccttctttgtaaagcttgtactgcctcgttgaaaacagtctcgccggtgctcgagtagctacttccgtcgaacgccctataacggatctctttaacaccgccgccgacacagaagggaaatcagacgctggtgtgatcgaagagctaattgatcggtaacataggaagtcgcagtgagtaaagctcgtcggagacgatgagatatcatagccatcgttgccagagacattatgaaggagtggagagt

SEQ ID NO: 20706 - DNA, 571 bp, Arabidopsis thaliana
tgccatataattcgccaaagttggtgctcgatgcacgtgcataaaatgcatacgagcttcataaattgactttccggttaaaatatagggattttgcatatcataaaaagctgttgagtccgtgcgtataaagtagcatttcactttctttgtagaaagatctttcttcttttcctcttttcctccatctttgaaaactgttcaatagaatgtcacaaagagctacaatatcaggttctaaatctaaagcagaagtatgatatgtgtatagcttagcaacattacaataaatagttttgtatgtgtaacgacataaatggtagttaatcaagagaaaaagggaaaacaatgcccaccaaaaaattgataacgacgtaaaccaatcatgataccgttcttggcaatccctttgtatgtaaagtaatggtcaatgctatatgttgatgaacttttctggacatccgcgaatttgacggttaaaacattatcatcacccaagaccttgtgcaagtgtgttccagtgtgttcaagaagagggccctgtgaacacagtgtgtcgataagtatattg

SEQ ID NO: 20707 - DNA, 502 bp, Arabidopsis thaliana
attgtcatcccttcaagatatggttttcactgaagcaacagctatgagggatgccgaagctattcagttgcttctagatggctgtcgaagatgctattggatgatttctgagaaggattctgagaccacttttcctcttgatgggaatacgcgtcaaatgggggaactcaatgctctgattgatgaacttctggtgattattgaacttctaatgggagcagcatctccttctttagctgctgatgacctccgtcgattacttggtttcataattgacagcccacagccaaatcaggtaagaactgtttttcccttcaattaaacaactaaaatggagaagtaaaattcttttttactttggattaataacctagtggccaaccgttagtttctttttccaatttttgtatactccctattccagtattgtttgtcttgagtgacatattcttgttgattattaagtgtgttgcacttctaatatcttaggttcattgcaaat

SEQ ID NO: 20708 - DNA, 411 bp, Arabidopsis thaliana
gagatcaaatacagaagcatttgggtagccttaaagataaatcgaagggagcgtataatacaactcatgagaagattttggaaatgaagaataagttacaccatggtacagaagagaaagtgaaaaaatcagagtagattttacttgtcttttactgtaaaatatatgtgttacaagttacatatatgtaaattgtaaccaaatttggtcgactttacctgtgtcttttacagtttccaaacaaacaagaaaccaaaaaaaaacatgtaaaaaaaaaaaaacctttgagtaaacaacctaacccaaaatatgtgtgtaagggaaaattggaaaaaggcccatatggttaaccgcgaaaggggattacataccccctcccaaaaaaagttttataggggattccaagagaga

SEQ ID NO: 20709 - DNA, 105 bp, Arabidopsis thaliana
gagagaaagaagcggagatcgagaaagccacacgtcgtcatgtcgaactagaagcacgtgcgactcagatcgagacagaggcacgcgcttagcaaatgagagcag

SEQ ID NO: 20710 - DNA, 572 bp, Arabidopsis thaliana
tgttctttgatattattaacttctttgattgatgttttatcagttttgtgtgattgattagaggttaaataaccttttaggatatgcttgggaattggaaaatcagagctaatgaacctggagatgatttatctgtctccattgcatctcaacatcctcatttcggtaactatttctctgcgacattaaaggcgaaaaggatacccctatcgcgggtgtctgatcccgctgttttcttctggttgatgcctcataaggttgcgatatggatctattggcatgtaagtgacttatatttactcaaaaatcgttttaagtacaaatactcaaaacgttgatcaacttaacgtcatttcgttgtttaggcacttcaactctggtggaagagtgtacctttcattcaacacccgagatactcgaacccatcatacagggaggaagcagcgaaacgcgatcaagaacttcgttgccccgggttagatgggtctgattctgataaaaccacaaatttgatgggttaaaggagatggttgtagtagtagttttggaggatgtcgctttcgtggcgagat

SEQ ID NO: 20711 - DNA, 603 bp, Arabidopsis thaliana columbia
atcctttagacctacgaaatttgtacgtatctgaaccacatatgcatcaaaggtgaagggatagtcaaggggagttcgtacgaaggatcagtcaaaagtgtcatcgatcatatgtcaacctatcttgactatggttttgtcaacggcgccggtagtgatggccccactaatatctatgccaaactccagtgccgggcggatgcctctgaatccaaatgccgctcttgcctcgccaccgccttctcagaggtaaggacatttcaacattatcgtttagatgtcatatatacttacatatataaatgcatgtaaatatgtcagttcttattgtggctaaatatatgtatttatgacagattcgtaagaaatgtccgaactacaaagggagaataatatggtacgacaactgtcttctggacatttcatcgatctatacccttgctgaaatcgattagcgacacattttcaatatgtacaacgcgaaggatgtgagcagcgatacaatggcgttcaacaagaacacgagggctcttctctatgcgctgaaggagaaagcaattagtaaaaaagaactaccttataggagagactacttgtattcag

SEQ ID NO: 20712 - DNA, 346 bp, Arabidopsis thaliana
aaagagtaggtcaaagatctcaggatctaccagactattaatctccccttcgttccagattgaccatacctataaaacagaggagctcttagggcttgagaaaaattcaagagagttaagaaacttagtagagttaaggtagactcacctaagcttaaaagagtcggaattgtgaagttccttcttccactggataatctctaaagagtatcacccctaagctgaaaacgtcagatttctctgaaaacagtcctcccattgcatattcaggtgccatatagccactgcacgatacattttctctgttttaggactacttaaatgggaaaaaagatgtaacatatgg

SEQ ID NO: 20713 - DNA, 903 bp, Arabidopsis thaliana
gtttatgagctgatctaacagagattatagacagcacatttgtctctttggttaattatgcaaaatcttacgtccacattcgtctctccttccatgatcccgatcacttctccgcggctgcgactgccaccaccacgatcagtagttcccatgactaccgtttgcatggaacaatcatacaagcaaaaagtggttgtgatcatgggagccaccggatcaggcaagtcatgcctctcaatcgatctagcaactcgtttctctggcgagatcgtcaattccgacaagattcaattctacgatggattgaaggtcactacgaatcaaatgagcatccttgagagatgtggagtccctcaccatctccttggtgagctccctccggatgatagcgaactaactacctccgaattccgctctttggcgtcgcggtccatctccgagattactgctcgtggaaactcccgattatagctggtggatcaactccttcattcatgctctccttgtcgaccgttttgaccccaaaacctatccattctcttctgagacatccatctcttccggcttgaggtatgatatatattgtatatagattgtttgtttgtgttgacgtttatatacgttcccaaaatgaattcaaagtttaaaaacattttaaaggcatcttagtgtacactttcacattctaaacgtcaaaaatatttaaaaccaaacacaaaactgttttatacttttatgtctaaaatattatgcgttttctaaaatgtctatagcttattcattttgtgtaaaatccttttgaaatttatgtattatgaaaggtacgagtgttgcttcctttgggtggatgtctcagtgtcggtcctgttcgagtacctctcgaaacgtgtcgaccagatgatg

SEQ ID NO: 20714 - DNA, 564 bp, Arabidopsis thaliana
tgaggaaataggagaaacatccactgaaggtgataaaaggagggagagactgagaagactgagaagattaattaattacagtctgagcacaactatgaattccagcttgagcaaacgactgaagattgatgagtgcaagaatcaagacccggaacaaaaccctaatcgtgttgcttcttctccaagttcgtgccatctagagtccaagaggcctcaaaaagtggtttcaaacaaaccggtaagaaacagaaagccggttatagtgacagatgaagataggacaccgacggaatggctgattgacgtgatgagagaagtgaacggtatggatgcaaagctgatatttgtgaaggttcttcccaatagtgatgtcgacgaacttcagacacgtcttatgatgccctggaagcagatactagatatggacttcttaaacgaggaagagttagaaaaaatagatagacatcacaaaaagattagtgccagtgacaaaggagcggatgtgatcgtggtgaattctaagggtctacagaggaagcttaagctcaagagatgggatatgac

SEQ ID NO: 20715 - DNA, 442 bp, Arabidopsis thaliana
tgtgattcgcataccgtcatagcgattaccggagaaccggaacctgaggtgagtccagtttctgagatgtttcattatgattcattactatcaacctgtgtctttacttgttgttgtctctttttacagcttcaggttgagcagccaggtaaagaaaatctcttgggtatgtctgtagatgatttgatagaaccaatgaaccaacaagaggagccacaaggtcctcacttagctccgaatgatgatgagtttatacgtggattgaggcatgttgatcgagggacggttgaatatttgtttgccaatgaagaaaacatggatggtttgtctatgaatgacttgagaatcccaatgatcgtccaacaagaggatctctctgagtgggagggatttacgcagacacctttttcagcgacaacaacaataactataaccttaacgt

SEQ ID NO: 20716 - DNA, 531 bp, Arabidopsis thaliana
cggttccggtttagcagaccagaaataaggacccgtaatcgatgtcgacctccgaaacgccggttcgcattcaatcaagttggcaacacggccaaccgacccaatacgggcgaacgaaacgtcaccttctccacgggaagacacggaggcgcgtggagtacacgaacagggaagatcgtgagcacaatcgggacagagagaggagaggcgttcgtggaggcaataaggacaaacaccggcaacgcagacaaaacgaccttcgtgtcttgagcatttctgccaaacgctgcctcctccttcgtccaaacgcaaattcgtttgagttttctcgcgttgcattttcttgtctctgaatctcagttgcttgttgtgaaggagagagagatggagagataaaggttttaatattggagtaatcaaataaagattaatccactaataagccccactctgcttaagtcttaaccataaccgtagttagtcaaactaactaaagcttaactcatcagctccgaattatatgccttgatt

SEQ ID NO: 20717 - DNA, 542 bp, Arabidopsis thaliana
caaatctaggatggcaatgatggagaagaggtcaacaaggaagccgatgagcgtgatgagagacgtttaactgaattgggtagacgaactgtggagatatttattctttcccatatcttcaggtaacaatgtgtaatatgtttctatacggtatgccattgtgttcttccttgatgtgcttacatatattacttccatatctctgagaactgcagcactaaaatcgaagttgcacatcaagaagctatcgcgctaaaaaggcaggaagaacttattcgtgaggaagaggaagcgtggttggcagaaaccgaacagagggccaaaagaggagcagccgagcgagagaagaaatctaagaagaaacaggtgtgagactttcttctccttctgcttgtcctgtacaacttgttggatgctgatcggagtttctttggttcttgaatatttataggcgaaacagaaacggaactaaaataaagggaaggacaaaaggaaggaagaaaaggtgagttttcaacacatgcaaaggatctcgaggaaaa

SEQ ID NO: 20718 - DNA, 630 bp, Arabidopsis thaliana columbia
agtaccgattgaaggtgttttgccttttgaggctaagttgtttgatactccggggctgttgaatccgcatcagatcactacgaggcttacgagagaggagcagagacttgttcatattagcaaggagcttaaaccaaggacttataggatcaaggtttggttcaatataatagaatgtgttggctttttggatacaattgtgggattgttaattggaatgtgttggttgttgcaggaaggttatacggttcacattggtgggctaatgagacttgacattgatgaagcatctgttgattctctatatgtgacagtttgggcgtctccttatgttccacttcacatggggaagaaggagaatgcttacaaaacactcgaggaccatttcggttgtcgattgcaggtaaagctctggccttatcagttgtgtaagacagaatatgatcaatttatgtattgaacattatttagattacaaagttttgatgtaaaaagagcatattacttgaggaccatttcgattgtagataaatatcatattggtacgaacttgaagtatttaggatcaaagcttgatttgacactgcccttgatactagtcctaccgtttgtacattatggttttgatga

SEQ ID NO: 20719 - DNA, 396 bp, Arabidopsis thaliana columbia
aggtgattattgtgttctcagactttgattttgctttttttttgtttttttttcagattcctcgttaggtggtgcaatgaagattcttatcaagacagagaagggaaagaccataaacctagagcttgaggatagctccgagacaatcgacatcaagatccatgcagagccgacccgtcaactggttttgggtctgggtcagggacctcagggtgaaatgatgagtatttttgtatcaacgcttaaggggaaaacattcaacctagaggtgaagggatctgagatcattcaacaagtcaagaacatgatccatgaccaggtcccaccagtgaagaagcaagaggcaaattgatcagctcggtgactcgctttaaacaagatcctatctttgtttgg

SEQ ID NO: 20720 - DNA, 789 bp, Arabidopsis thaliana columbia
ccgcctctcagtttcaacaggatcctacaaatattaagtaaccaaagatcagacaccaatgctcttctattttcacagagttttctctagtcgacatggtacctcaatagcgcaagaaaggaaaatggagccaacaacattggatgatgtgggatctaacaagttaaatgacttacaagtcgactcaggttcctgtatcacgccaaagaaagcaaataagcagagagacaataatcttacaatgaaacaagaatttctataaacatatacaaagataagattagaactgctgacctgcactacaaaatcgaatatatcaagctcacaataaccgatgattttgttcctcgctaccctattggtctgcaaaaatacaaggatgattcttttagctgactattaatcaaaaaacagtatcatgattgatgactaaactcaaaaatcaggatgaaacctcaaatactgagaccctagcaagacttggtccatttttctccacaaaagcttgctctcctatatacagagaaacacaactgtaattaccaattagcagaagtgttgaaacagaacctaagtattcaaaagacatggttttgatcaacttactgagttccaaattggcttctgtgtactgcgagattcatcagaaacacaactctgttactatcaatgatccttggactctttacgagtagagaattacggaatgaatatctggcagacttacgtatctgagatttcagttctcgaaagtctgatcactgagagacacacaagcgagccacttgt

SEQ ID NO: 20721 - DNA, 251 bp, Arabidopsis thaliana columbia
gagaattcatcaaaaccacatatcatctaacaaaacacagaatagtaaaaggttagggttagggttagaatgtaatacagttacaagccagcctttgtctaaagcttccttcctattagcagtagcaacccaagtccactttcctccattagcacactctggatcttcacagtttggctcaacaccagctttgaacaagtgaatcatctggattcgcggtcaatttgctagtctgaaatatagtctcgtgc

SEQ ID NO: 20722 - DNA, 484 bp, Arabidopsis thaliana columbia
tgtaggagggtgaaccaaatttgatctgatgcatgatttgtgaattttgagctgagcaagattttgtgttggctgattcgcctttccctctccaattctataagttaaagataatcgtgacttcgtgattttttctgaagaacaatagataatagatgcacgttgaatacaaaaaaagttgtttggatttggatttacccttaaggttttaagatagtaaatgactctgaacgagtcggcgtagaaggatagtggcaggttttcatctgtctgttatggtacatgaatatgtgtaggctcaggtaggaatgttttgtgggcaagagattggaaatatatcaagctttgcatcttccggagctccttcagacaatagtagctctctttgtgttaagggtgtggctcgaaatggttctccccatggcgagaagatgataaggatggacattacatatttgaactgggagatgcttaactcacgctg

SEQ ID NO: 20723 - DNA, 535 bp, Arabidopsis thaliana columbia
gtaacggccgctacctgtttgcttaccctgtttcggcggtcagatacagagcggtgactagcgcctactacagaggtgcgttaggtgcgatggtggtttacgacattaccaaacgcctctcattcgaccacgttgcacgttgggtcgaggaattacgtgctcacgccgatgattccgccgtgatcatgctcgtcggaaacaaagccgatctctccgttggtaaacgtgccgttcctacggaggatgcagtcgaattcgccgagactcaacggctttttttctcggaagtctcggctctaagcggcggaaacgtcgacgaagcttttttccgtttactcgaggagattttcagccgcgttgttgtttcgagaaaagctatggaatccgacggtggagccaccgtgaaacttgacggttcgagaattgatgtcatctctggttcggatcttgagactagtaatatcaaggaacaagcttcgtgctcgtgttgaaattttgagtgataggcataaaatcaaaagccaattattgggcc

SEQ ID NO: 20724 - DNA, 1085 bp, Arabidopsis thaliana
cattatagggataagaaacgtccagagcctgcatctttctcatgattctgttcatgtaagtattcccattttctttctttctttcgtattagaaaccttggacattcattcttgaactgtgtttgtatgtttcaggtgatttattcatactgtagacatgggctcccggtgtataagaatcttgttaatctatcttttgggagtaagaataagcgaagttggagattactggcaaatctgcttaagcagtctacgaagcttgaaactctaattgtcaaggtatcttcaatacgcaaaactgatgaacagttatgtaacacggacttggtggttgatcatttgcacatatctttttgaatgatgcttgttcaggatctaaatggttacactggcgatgtctccatgcctctgaacaaagtgacgtcgctgcatattcttggttatcgaggaactgcggatgaggttaaacaattgaagagctttataggggaattcgaatgtcttgaactggttcaagtggatgttgcagaagctgcagaggataatggcaaaatattgcaaagcaaaagggatctaatgatgctgcttggagtttcacttccatccaagtgccagttcaaagtcacataagttatctacttcattcataatactatgtaacattaaaactcatataaatctggatttaatacaaagtcagttctagatgaattgaatgttcgagtctcagggattttagtgataggggttcttgatggtatcttaaggaacttgaattacgataataagacaagatgtgcgaagctagcttatagactctttgtgtggtctggagaacaagagtgtttcaggcacacagttacttcttatcattttgctgcacattttggggaaagggaataaaccgctcgctgctcttactacgttgaaccatatgaaggaagtaggaatcgacccgagtgtcctccactacactactttgatagacggtctgagccgtgcagggaatctggaggcttctagatgaaatggtgaaagctgggtccagaccggatgttgtgtgttacaccgtgataacagggtat

SEQ ID NO: 20725 - DNA, 574 bp, Arabidopsis thaliana columbia
aaactttgcaataatggagatgataggcgagggaaattgctttagatattcggatgcatgtactacactgctattaatccgatgcttgaataaatggtcaacctgttgtagaaacaagaagtttagaaaaggcatcacatttattttgaatggagagagtcggaaaatttcaaaggtttactaagaaattaggatttaaactccgttcacacgacttttgtgggcatggacgccagatgaaggcaactacctcattgaattccctgaagagccactttgacaaattggaccatcttcgagaagatgcagtacttggatgattgtagaactgttcagcatgccttaggaataaatacaccaacataaagatgacaagaaacggtgacagcagaagcatagcaagcccaaccacaaatagtcgtttcttcagtgttgtaggatttgaaacaaagtcccttctaacacgaaaattgctgcagaatgaaaacgcctgaattagacaaaacggacaattcttagcatgtgcaaggaatttttcattctatggccttactcttcaccgtagtactagtag

SEQ ID NO: 20726 - DNA, 582 bp, Arabidopsis thaliana columbia
gtgtttaataaaaaccaatcaaaaatcgacaagtgagctactctagtactctctttaattagtctttattggggttcatatgtctattttctgttttcaaacttatatataagaaaatatttcgtacataaaacatattaaaaccaatcaaaaatcgacaagtgaagtactcttttattatagaccactgaaatggtatatagaaactttagcatgcacgagaattctcatcttcgttatcttttccgtctaaaaacttaaccatgcaatactctagtctcttcacaacttcctccggcagggacatttgaactctgatggcatcattatcgctcgccacgggtaaaaataaacagtagatatcactcgtcaaaggacccatatacattggctttcctcctcccaagtccaactcctctaatcccaatttcgcccattgtgaaatgaccaaactgcacgagacgtccgttttcaccgttttatcctccagtaaatctatcgttgatcttacatattcgtcggtaattcttgattttgcctcttgtatcgattttacagcgtggtaaatattaccattgacta

SEQ ID NO: 20727 - DNA, 487 bp, Arabidopsis thaliana columbia
cacctttgtagtaggcttatgtaatagctctgtgtctactcacagcaaaagaacaagaatgtcactaatcaaaccaaccacattgctatgtacaatggagaaaacatgccatgcacaatgattagccacttggatgtgaatgtgatcatcactacataatttgattcttcaggagaatgctataacaacacattacaatgttgccgaagaacaaaatcgaacaattccaacactaatggtccaacttctaaaagagtcgattactctctagtcaaaatgaggtcactctcaggtacacacgaagatcaaaatcgaaattgaacagcaacactgtaacatcatcgagttcgaagcaatattttatccattgttaaatcagagaagatagaactaagatcggagaaggatatagtaccgtttctggcctgcgatgtcccagatctgagctttgatgttcttatcgtcaataacgagcgttcgagtattg

SEQ ID NO: 20728 - DNA, 506 bp, Arabidopsis thaliana columbia
gtcaatgtcatcaacaatgcaaactacaacattactctccattggtaactactctcttgtgtttgtgtcacactttgatttcgtgttgactaatgtttatatgatgtagagaaacatgtttatcgttttaggcacggagcaagacaaatcaggaatccatggtcggacggacccgaatatgtgactcaatgtccgatccgaccaggagagagctatgtgtatagaatcgatcttaaggtcgaagagggaacgatttggtggcatgctcatagccaatgggcacgtgccaccgtccatggagctttcattgtctaccccaaacgtggctcatcttatccttttcctaagcctcatcgtgaaatcccgctcattctaggtacactagctagtatgtggatgagattagtacatgattgcgttacatgttgtgatatatagtctaacgttacgttgacaattgataggcgaatggtggaagaaggaaaacataatgcatataccaggaa

SEQ ID NO: 20729 - DNA, 653 bp, Arabidopsis thaliana
gactcatccccgagatagtacttgtaaaacagttttactatcaataagaataagtgtttaagcaactctctgtgttgtgttggtctctataccctcttatgttgttctaatctaatctacttatatcagtgccatgatctgactgacgaagggcttgcgtgctgggctgaaccaagtttagttcccgaatgtctattatcgagtcttaaaaatctcgattgggaacaatatgatggtacggaagttgaggaagaagtagcagcatcttatatattaaagcagatgtcgaaaggcctcacgttcgctctcagaaaatgaactgacggatttgtccctccccccaccaaaggattttaaggacaaattagtcgtcttactaattaatcaaataacttattaatgtctttccatgttttaatgtgtagaaaataaaaaaaagctttaattccttattaaccctaaatttcctattgtatggcgcccctaatcaatcctaaatattaaccctaatcaaacctactcaatcctaagttgcccacaaccctaacaggcttatattatgctcgtataatttacgccgtcgtatgtaaaaccctaaaaccttatgctcaaaattcctataaatataggatccctactctcaaacacaaaca

SEQ ID NO: 20730 - DNA, 345 bp, Arabidopsis thaliana columbia
  unsure (1)..(345): unsure at all n locations
gagctcagtatccatacttcgattggcatgcctaatgatattatggtctcacatgcgatgatgagattgcaaagttgtgatgcgtgtgtacatatatccgtgtctgttctgctgctgttaagcgttgttcgtgtatcacacatcgtctttatccgatttctgcattcacaagacatacgtgtacgtacgggatgctatgagcacagaccgcagcctacttggtaagcagtatatagaggatactgcaccccnatcccctgtagtgatgtgcagatggcgaccancttcgggggggatttatgcacttgcccgtgctgatgctatgaatgcacttcctcgttgatg

SEQ ID NO: 20731 - DNA, 287 bp, Arabidopsis thaliana columbia
tatggtttttgaaagtccccggatgatttcagtcaaagcaatttggtccatctcttcactttctttattaataagtaatcacaaacatggtacactgatttatttgaattcattcagagtagatatgcagttcaaagaagttttgaactttttatacgaaagcattaagaagaagagcgaacactacacacaacaaaagaagactttcaagcatgttcaccggattgcgggggaaggctgctcggcttcgctcgcccgtagttccgcatcccacaaaccacatacaa

SEQ ID NO: 20732 - DNA, 478 bp, Arabidopsis thaliana columbia
gtatgaatcaagaacatatgaaaggacttactgttgctcctgcagatttaataacttccttcatctgttcattgaactgaccaggagctgtatatgcacagagattacgcaagatcctcgctgcattcaaccgaatcaacgggttgtccaacgcttcaacgagtcccttaagaacatttgctctcaatatcttttggcaattgcttttacttccttgagctagcatagcaacagattcaccagcagagactctcacaccacttttgtcctttggaatctcattgttcaagaatatgcagagaagccctttcaaaaccccgcccgtgcctccgattttctcggttgcaccttcttcaaacgcaaggaaagtcaaaatctctgcaccaagcttctgcaaatgaggctgactctttccatgatgtaatgttccctaatgttgctcactgtgaagacaatcccagagatagtcatcctcaag

SEQ ID NO: 20733 - DNA, 464 bp, Arabidopsis thaliana columbia
ccaaatcatatgccaatggtaaccaatgaatctctttgcatttcccgatcgccacatacaaaaatcttaatcaccaccacttgcttattttaaccaactctctacctcttttctattttctctccttcttcttcttcactttggcttacttcaaaaagttaactacccaaaaaaggagaaacataagaaaggtcacacaactttcacattgtgtagaacatagaaacgttagaaaacctaattaagaacaatcatcactacttttgcaaatgttatcctcaatctcttcttcttctcctccattctcttctgcgtaaagactgtcgaaagctctattctcttgctcttccaagctcacattttgaaccctcgatttcccattcttctcatttctcgccactctacttctcaaatcaaccaaaagctccctcacagctctctctttatccctccgattcttaatc

SEQ ID NO: 20734 - DNA, 876 bp, Arabidopsis thaliana columbia
tgattcccataaaccgagattagatgggagaaagttctgcctacaattgctttcacttcaactttttcgactggcgactccaatacttgcccaaagattttaaccagctccggaacatgagagaagatctgattttgcatccaagcaaaacaattttatcaaattaaccttagtaatgtttagccaaaggtgaaaatattgccttgagaaaactacctgtggattggatgacgaaacaagggaatatatacaggtgtaaacagccatggactcctcttgatcttcctttagaggtagacctcttaagaacactggaagtacctggattatataacttagggatgagtaccgtgtttcataaggtttcaggaagtaagcaaaaatacatgaaaatggcctagctcctagatcatacttgatttagcgggactagttgaggatgaacaacaatcatccttgcggtacacctgctgcattatccctaacagcaaggtctggttctgaatccccgaaaagtggggaaattccgcgtacacatcaccaaaatatctggtattgagtcaaagggagacaagtatcgcatggactgacaattctcatattcttccaaaacagaaggacgatgaatgagcatagaaatcaatggataaaagtctttacgactagagtagagttgaagcatgtaacacgaaaaggatacttaagagcagtttccccccgtttttgcatagctctcaacacagaaagctgcattccttctattggttgcttctggtgccccaactctttgagcccaaaggcattaactctgcaagagaattacgccaatagttggtttaataggctcaacaccaatcatagagacatcagatgagg

SEQ ID NO: 20735 - DNA, 617 bp, Arabidopsis thaliana columbia
gattcgtttcctgcttggattctctggcttgttgatgcgcggttacttactgttccgactcctccagttgatgtcaccagacggctagaggatcgactatcgcttggtccacctgcggaacttggtcgagagcttgacggaattgctctcctcgaagagcttccatatcttgaggaactgcgtggtctttctgagtcaccaggctgtgagaattacagcaaaatacagtaagggattgcattctcccgtttacaaccaaaaattcgatctgacaaaagggtctggtaagggatcttaccggatgcttagacaaaggcccatcaacggagtttcttgatgccgagcgatcacgagtagtagaagttgccggatgccttcttgagaaagcctctactgcacccgagaaccggttctcgcgagtctcctttcctgcaaaagtttaaagaaaaaccagtcaacgtgggaatcggattgtgttcaaaacaaaaggaacaaacagtttccagcaatcctctcctgtttttcgagagaagctcctgcagttaagcctgggtttgcagttgtatgattctgaaacaaaaaagtgttttacacatttttagccttgaatagagaga

SEQ ID NO: 20736 - DNA, 518 bp, Arabidopsis thaliana
gataggtacattacccgacaatcaaacaaaacgaccagagaagtcgagactcgacggcgtagaacacaaaaccctaaaggtaaatggcataaacatgcacgtggcggagaaacccggatccggatccggagaagatccgatcatactcttcctccacggatttccggagctttggtacacgtggcgacaccagatggttgcgctctcttccttgggataccgtacgatcgcgccggatcttcgtgggtacggagacacagaagcgccagagaaagttgaagactacacttacttaaacgtggtcggagagtggtcgcactaatcgacgccgtgaccggcggagacaaggcggtttctgttgttggtcatgactggggagcgatgattgcgtggcagttgtgtcaataccgacctgagaaagtcaaggctctggtcaacatgagcgtactcttctctccgaggaaccctgttcgagttccggttccgcactgagacacgtgttcggtgatgattattat

SEQ ID NO: 20737 - DNA, 554 bp, Arabidopsis thaliana
ccccagcggttaaatgatttaagtatgagtttaataattaaaccaaatacttcatgcaatcaagaaaaggagaattagttttttacttatttattgaagctctcaagatctgtatacaacatacttacaacatagaattcttttttatctctacaaaaaaaaacataaaactctgtactcaattctctgtctatgatttgttgttctgtggaaatactttcttgatgaactcaagaaaacgttgggagtagaatgttggatcaacggctgagatcgaaagagaatcaaagtgaagagatttataagcatgttcaatcttcttggtcatgttgtactcttgtaagatgtctataatgccaaggtagagtacgacgtcgcagcagtcatgtaaaatctgcttctctttatcttctcttcccggtatcagctctgctcttgccggcatgttcctccttgctgtatctgcagcctgcattttatagagattcttttcaaaaaccgaactggactaagttcaatcagtccatgtcgtctggacatatgtatccatttat

SEQ ID NO: 20738 - DNA, 548 bp, Arabidopsis thaliana
acttggtgcaatcatagctaacaaaaataaaataaagctttgacatttcagattcaacattgaagatgacaggaagaagaactaacctggttccactgtacaagatcctagtctagatgcaaaatattcaaatatcataatcataaaatcattgattgttaaacttctaaatgtcatagttcctacttcactgttaaacttctaattatctgtcctcagcttacttcacaccttgatttcactacttgactctgcatagttatctgtcctcagcttcttaaaaactctctcttctactttcaaatcagagtttgcaattcctctaccagcttcttcttctgactcccttacctctcttttccctctttcttctgcttgatttgccacatttccactgttaaagtaactcattcttgataaagaagaatcccgtcgaaaactagaatcaaaattaacatttagtgaagaatctctatcacaagaagacgaagcaccatttgtgttcttgtttgttgcttgtggtgttcctctttctcagttggtgtttt

SEQ ID NO: 20739 - DNA, 511 bp, Arabidopsis thaliana
tgataagagaagttgaagaacaacgaaccattacgttatctgattcttcattccaaatctccctgaagataaaagaaagtaaccgttgcttaacaccactaagaaacgaattcgaaccacttggctgacttagactatgacgcaacccattctctccagtatcatcttccttactcccagataaactctgctgtttactcttatcttgactcatcattgcctaacaatcaaaaacctcacaaagctcaaaactttatctactccagagaaagatactgtaaaaactttgcttacctgagagctagaattgaggaaaagctcatcatcttcacgacaaaagtaaccaatagcacgagcatcaacaagatgaccagaatctctaatctgaagaagatgaatcctctgataacgcaacgacaaaatcgctaaaagatcatcataaagaaacacacccatattatgagccagattaacgagatcatgaagaaaaaccctctcatcaaagacaaca

SEQ ID NO: 20740 - DNA, 570 bp, Arabidopsis thaliana
tgcttttggtctttgttttgattgtctcaaacgcggtttctgcaaacggtttgcgttttgcgtttatgttttcaattaacaaagtctttttagcttagaatgcttaagattgttgatttattttgaaaagaaaaaactacactaaacgcaatcgcaaacaaacagtaacgaccttaaaccctaaaccctaaacctaagtgttttattggttttctcagttactatagaactttgtttttagatttatccaagtatagattgctccttcttttgttacgatttttggggtgatttatttcagttcttactttgaaacatagtatacaaatgcataatacaattcaatccaagtgttcttatggttaaaaatatttcagaacgccgggaacagaagaatatgacaagttctttgaggaaggaatcttcagctgcatcggatgcaaaactcctctttataaatccacacgaagtttgacgccggatgcggctggccagctttctttgaaggactctccggtgccattaaccgagccgtaaagattatcttttgtatgtgtaatttagtttatt

SEQ ID NO: 20741 - DNA, 448 bp, Arabidopsis thaliana
ggcattgacgaatgggagattcactagcgtgaggcatagggttttagcaaacacagcaaagaagccacgtatgtcggcgatgtactttgcagctccaccgttagaggcgaaaatatcaccgttgccaaaaatggtgtcgccggaaaatccaagacgttataattcattcacatggggtgactacaaaaaagctacatactctctccgtttagatgtccctcgtctcgagtttttcaagactttatagattatattcataccattgaaagctagattttttattttttttttgcttgttgaaaaagaaaatatgattgttggattgttacaaatatataccatgtgaaatgtatagatttagatgaacaaaaagaaaaagaaaattgagttttggtcatttactttgtaattaactaatttcacatgtgaatcagtggatcattgcaat

SEQ ID NO: 20742 - DNA, 472 bp, Arabidopsis thaliana
catgaacttgttcataccagattttgttccgccggaaggatggcaaccgtggctcggcgaattcggtcttaacacacgtttctactcggaggtgcagaacactgggccgggtgcagctattatcaaaacttgttacttggccaggaatcaagaagttgagtgatgaagaaatccttaaattcactccagctcaatacatccaaggtgacgcttggattcctggtaaaggtgttccgtacatcctaggtctttttagtggaaacggttccacaaattctaccgtaactggctctagtttgtcttctaacacaacagagtcatcagattcaccttcgacggtagtaactccttcaacttctccaccagctggtcatcttggttcccatcagatacacttcatcggtagtgtctccttcaacttctctgccagctggtcaacttggtgcccaccggctacaccatcaatggtagt

SEQ ID NO: 20743 - DNA, 621 bp, Arabidopsis thaliana
tcctgtctataattaggattggaaaacaagtttcagtaatgtatcctcttaagagtatcttttcaaacaaacttctgctgcactaaaaacgctgttagtgtaatcttttagcctttttcatgactattgtttctcgttctgaaagaccaaattattttctccgcaggtccaaaagggtccaaggaacttcgaaaaagcgcaacagagaaagctttagttgttggtccaactttaccgccaagagacttgtgagtatacattttcatttggaatgtgactagtccatatagttagtataaataatttacgacattctcaagaatgttattcctgttttgtctttgtgattgatgctctacttatcgtgctgattgatactgataattattgattcttgaattgaaggaacaatactggtaatccaggcaaaagcacggccattcttcctgcacctggatcattttccgaaaggtttgtgtcgcatccttatctacttttatggactctctataacgacactacatctagattgcgatacctaggtggtacataaagccgcactaaggtgaattggtggtcagagcatgaaatgaaatttggcatatttatttacctgaaatg

SEQ ID NO: 20744 - DNA, 919 bp, Arabidopsis thaliana
ctcacaacaaagttcagtctcaacagttgcgttgtcaccttggctatagctgctgccactgggttaggtgctgtgcccttcttctttgttgagcttgatcctcaatgggctggaatttgcaatggcatggctgctggtgtgatgttggccgctagctttgatcttgttaaggaagggcaggaacatggctctggaaactgggttgttactgggatcctagccggtgctttgttcatttggctctgtaagcaggtaagcaactgaatgttcgtctgtcaatcacctagttacttatttgcatagtattttgaatttaaatctcatgtgttgacagttgacagaaacctatcacttattaattaaccatgtattttggacagattcttgaacaatatggtgaagttagtatgctggatattaaaggcgcagatgcaactaaagttgttctcgtcataggaattatgacacttcattctttcggggaaggatcaggggttggtgtatcattcgctggctcaaaaggttttagccaagggcttctggtcactttggccatagctgttcataacattccagaagggttggctgttagcatggtgttggcatcaaggggtgtctctccacaaaatgccatgctctggagtataataacatccttacctcaggtaatcatatgatgttctgtgatctgatttctttgtttgcataacaggatactgattattgttttctttgcattctttaccagcctctcgtcgccgtgccagcttttttatgcgctgatgcgttcagcaagtttttgcctttttgcactggatttgctgccggatgcatgatttggatggttattgctgaagtgcttcctgatgcttttaaggctgaattgcatgtggtgattaatatttttatttgagaaaga

SEQ ID NO: 20745 - DNA, 479 bp, Arabidopsis thaliana
gatgatgaaaatgataataatccacctattgagagtaacataagctctcatcggtctggtgatagacaccacgacgaagacggcaggaccacaggcccctcagcgactgacacccgagcttcgggagacacctttactccggtatctgctaatcatccaccgcctttctctccttcatcgtcatcttcatcatcatcatcttcagacggcgctgagattgtgcttaagctgcctcgtaattcgcctgactgggcaatcccgaaacgtcccgggaaggattccaacaagccttagaacatttcagatgcaacagagagccaaaagacgtaaatctcaagctgcactcttaactcaagctagttatggaaatcttcttacatattgctttctgtttttgtcaggagtttatttaacaatctctggaactacaacacactattctatctattatcaaatcaattattcattcatgagtataa

SEQ ID NO: 20746 - DNA, 416 bp, Arabidopsis thaliana
cctactggccgaggctaaaagggcactcaaaagcattttggagccaacttttaaaaagttcattccatcaccctattctgataagatataaaagctctagctaaatagaaaataggagatagagaaacagaacataccagataaagcgcatagtaacgcaagaacagtgatttcttgctcacttggtcacgaagcatatgggaggcccgtctatactctcgacaatcaaaataggactttgctaaaaggtaaatgtcaccatcaatcgcttcatcttcttccgggagaggagtagctgcttgagagaagccaacggaaggtaacggtgttgaaatagattcattggtgctgaaccttctccggatgctagagcttcctcgctgaaacctcgtattcgcaggtgtaaaattagacgg

SEQ ID NO: 20747 - DNA, 499 bp, Arabidopsis thaliana
ggaatgccccaatttttttcccacccaactaaaacttcaagtttctacaacactagaatttagatgtaactatcttcttgatttgcttttacagattttgataggtttggtgaagaacatcaagcagaagattaacaagagcttcacacagaacaggttaaaatagcatagaagatcaatattagattctcagatctatcataaacaaaattgcgaccatagcaatagaaagttgttcagttagaaattggtcaggcaggtgaagagaaaaaggcttcacctggtgagtttgaagtacaagataaagataatggcgaggacaaggactgtgattatcgcaccgatggtccatttgtctctagtcattctcctagtcattgttgtcaatattttcttgctctttccgacgttatcatcgactccatgaagcgtttcatgggcccgtaagagagactgtctctgcccgtgcagatcctgaaggattgaaacaccaagctct

SEQ ID NO: 20748 - DNA, 464 bp, Arabidopsis thaliana
tcgaatttggcaggcttggttatctttggcacgcaactgtaccttccagccatgttcacacaagtgtcttctccacacttgttgggtacttcgcattcatcaatgtctacatacataaatcataattattgagtttctgattggtggtcaagactacagaagaaaaacaggcacttaccgatgcatccacctcgtatgtatgggtttcctctgtagccactgccgcaataacagcttctataactcattctggaaaagtaaccgtaacggcaaaggcaaatgtcggttaagaagtaagagccactagaacgggtcaagtttgtgcacccaaagggttcctaaagcgagaatctgaagtatcaaaataccatcctagttctactacagcgtacgcatcggcctggaaccattctggtttggtgatatttgacgggaaatacttcatacttgtcaagaacgcagct

SEQ ID NO: 20749 - DNA, 841 bp, Arabidopsis thaliana columbia
gttaaactatttgccaaattaatcccaaaaatgtccacgatccatcgctaccaaaatttggcctcagtcgaataaaaaggctgagttaatggaatacgcattattgccttagccttaataagttgtgacgatttggtcaaactttcgagaacggcgatgcttattaatagtgtcaaagttctctcctccacattttctctaagactatccatttcttgttgtcattaacaaaaaaaaaaaaaaggaaagacgcctttgctctgaattttgaaatgcattatctgatgaaactcttcttctccctctctctcttctttggtaatttactataatctcatagcgccttatatcactagtggattctgtaaaacctatatgtatgaccggattattattattttgttatttgtgtacatgtagtagggatcaatggagcagtgggttcaaatcagccttcccaagccaataaaaatccgaagctgtttgtgttcggaaattcttatgctgataccggaaacatgaagcccactgcattgtcttggaaactcccttatggtatcactttccccggtaaaccttccggccgttattctgatggccttaccgccaccgattttctaggttctactctcactctcattcttaaaacgtcaattgttcttaatgtttctctacatgataaatataatcaaacataccaataagaaagttctatatataaattttcctttctactattctcacacattagaaatttatatcataacgtctatatcgtttgaacattaatatacttctaaagaaaattagcatgaatttactaaagttaaaatcttttatg

SEQ ID NO: 20750 - DNA, 771 bp, Arabidopsis thaliana
tagtcatctgctgctgttgcgcataaagcaacgcaatatcagttggttcaggcatcaaacgaagaacatgaagtccagccatagcgcaattcatttcgaaccgtgtgagctggaacctagagaacgaaaccggaaccgtaagcactacatttctcacatgacgtttcaacttagcttcagccatcagacgtaactccaccagaaatatagctaaaacttcctctggtgttgttgatctccaagcattgttcaccaaagctgcaataaacggtctaactccaatatcaagagtttgaaccaagaaaggaaggttcttgctagcgtgaaccacaggatcagtgtctacacgaccaacgagccgcttcatgttgaagatagcggctccggttagcatttcctgctcatgtgcgagctggttgctaacaccaccagcaggaacttcatctttgaaagtgacaaatgatttgatgagcttctggtttcttgtgttcctcaagatgtgaacttgagaaccgttccaaacagctatactgcattgagaagtaccaatgtcgataccaagggcgatttcgggtaatgaaggagatgatgatgatttctcctctccagtgttttcactgtctgatgctactgtgtatgctgcttctgccatttcctgccatagatttctgattcaggattcaagatttatcaacacaatcaaagatttatccttgagttcatcactcaacattcaaaacaaattaagaaccaattctaccacaaactggg

SEQ ID NO: 20751 - DNA, 493 bp, Arabidopsis thaliana columbia
atgcttggtttaaacgcttaagtccatgttcaagctgtgagacatacccactaaattcttgacccaatgtaagcggcgttgcatcttgtagatgtgtacgtccaatcttcacgatgtcattaaactcttgtgatttagcgtgcagagtatcttttaacttctcaacggcagggattaataattcattaatttgaagtgcggcacgaacatgaattgctgtaggaaaagaatcatttgtagattgagctcgatttacatgatcatttggatgtacaggattttgggcacctaaagcatgaccaagcttctgattcgcaatatttgcaatcacttcattgcaattcatattactttgcgtacccgagcccgtttgccacactacaagtggaaattgatcatcccacttgccttcaatcacctcttcagcagcatctacgatatattggcttaactcttgaggcagttgttttaactcagcattagttattgctgc

SEQ ID NO: 20752 - DNA, 548 bp, Arabidopsis thaliana columbia
  unsure (1)..(548): unsure at all n locations
nnnnnnnnnnnnnnnnnnnnnnnnctaaaggatcgcaccgataatccccaccggaatgttgatcaaaaagatccagtgccacgatgcgtactccaccagcagaccgccgagcgccggaccgagcagcggaccgacctgaccgggtaacgtgacaaaggtcatcgccgccatatattgctcgcgcggtacgattttcatcaccgtcaatctgccgaccggcaccatcatcgcgccgccaacgccctgtaacgcgcgtgccagcaacagttcgttcagcgtgccggaaagcgcgcaaaacagtgaaccgagagtaaacagcacgatggcggtaaagaaaatattgcgcacgcctgactttgtccgccagccagccgctggcggcagcatcaccgccacggtcagcacataagagacaatgaccatgtgcatatgcaacggactttccccgaggctttgcgccattgagggaagggcggtgtttacgatggtggtgccagcgactgcataaagaagctgaaagccacaatccacaattgccaacgggtgct

SEQ ID NO: 20753 - DNA, 522 bp, Arabidopsis thaliana columbia
gagaaagcaagttgtttcttgagtaatccaagttgtttctattttgcgattttaacgggtcaaagatttgctctaagggaaggaggtagaacagttggagccggtgtggtatcaaaagtgatgagctaagtcgctatagcagatttaaaagttcttcaaacgaaaaaacacaactgttctctagtatctaaagattcatctctcatgagatttctactactttgagagtttatatcaaataaacgagagattagtgttttaaaagaaaagcttctcccagtgtgatatcttcactttattctacaacctaacattgacaaattaacctttaagcaagccaaagaatggagttagaaactagactccaaatcatcagcattccaacattcaaccaaacctaagtgcaaccatggcaataactgtggcagctctgaagtaaacttctttgattcttctttccactttatttgagacttcttcttcgttgattgtttcctattgaaattaacaagggcttcctga

SEQ ID NO: 20754 - DNA, 1080 bp, Arabidopsis thaliana
tcaaattttgttcctttttagctttaggatttgatatttctagaacccagaagaaactcttgcccataacatctctatatttattggtatagaattaggtgagggaaaagaggatggctttgatcggaaaatccgagagattctctgctgattttgtgatgggtggtgctgcagccattgttgccaaatctgcagctgctccaatcgaaagggtgaagcttttactgcagaatcaaggggagatgataaagactggacatctcataagaccttacactggtttgggtaattgctttaccagaatctatagagaagaaggtgttttgtcgttttggagaggaaaccaagccaatgtcatacgatatttcctacacaggtactacattccaagaacccttactttagatcagcgtgctgaggtttgtgttagattcttattgtcactaaatttaattgcttttaggcttcaactttgcatttaaaggtacttcaagaacttcttggatgtcgaaagagaaagatggttacttgaagtggtttgctggaaatgtagcttcgggaagtgctgctggagcaacaacttccttgtttctgtaccatttggattatgcgcggacccgtttaggcactgatgcaaaggaatgttctgttaatggcaagagacagtttaaagggatgatcgatgtgtatcgtaaaactttgtcaagtgacggtattaaaggtctttaccgtggatttggtgtgtcaatagtgggaatcactctttaccgaggaatgtattttgggatgtacgacaccatcaaacccattgtgttagtcggttccttagaggtaatgtcatctatgtatgccgttattatttcttaatctatagcagaaaatagctaaaaatggttctttgattccgtgacagggaaacttcttggctagttttctattgggttggagtattactacctctgcaggcgtcattgcttacccttttgacacacttaggaggagaatgatgcttacatcaggacaacctgttaaataccggaacaccattcatgccttaagagagatattgaagtcggaagg

SEQ ID NO: 20755 - DNA, 495 bp, Arabidopsis thaliana columbia
tgtctcccatttcttcttcgtcatcgtcgtcttcctcttcttccgccggagatctccatcaattgacttcaaattctcctagacatcatcaccaacatcagaatcagagatcgacttcggctcagaggatgagacggcaattgaaaatgcaagagggagacgagaatcgtccttccgagacggcgcgtacttagactcgccttttcctcttcaacaagtcgacggaggtaaaaaccctaagcagcatattcgatctaagccgttgaaagagaacggtcaccgtctcgacacaccaacgacggctatgttgccgccaccgtctagatcgcggctgaaccaacagcgtttactcactgcctccgctgcgactaggcttctccgatcaagcgggatctcgttatcatcttctacagacggtgaagaagataacaacaatagagagattttcaaatccaacggcccagatctgttgccaacaattagaacccaagcaaa

SEQ ID NO: 20756 - DNA, 412 bp, Arabidopsis thaliana columbia
taatatacatgatccatcatctcacgtcatcaaagagtgaggcagattgagaggcaatatcgttgagggaagccataggagagttgccttcttcagaaccttcagggacaggtgaaggaggattagcaggaatgtacacaactcgcagtttgaaatcctcaatcactctaccagcctccttgttgaactgcaacaaagaaaccaattcatactaagaagaagaagaagctaaagcaagagagttcctttgcaaaagcatatagtgtgcaaaccatttcagcgagggcttctttggaagtagtaccatcagagacaacaacagtctgaaccaggaacttgtctttgcattgcatatcaagtggtgcctctttctgggcttgcatcgtcactcatacaacacaacaatcagctg

SEQ ID NO: 20757 - DNA, 545 bp, Arabidopsis thaliana columbia
tcgtagaatttgcgcatctccagaacaatccctgccaatgagatgaaatttcaaaattctgtttctgtaactaactttgcataagaacttgtttctatagcttaatcagctgtgttatttggtgtatagggtagcaaaattttgttgatttcgggatgtcttcagctcaagatccattctacattgttaaagaagagattcaggattctgtaagttgttcagaaattgccagagatgtttttttgtttagattttgaagtacagtgattgatggatgatgctttgttagattgataagttgcaatctacattccacaaatgggagcgtatctctcccgacatgggtgatcaagcacatgtggcgaaggagcttgttgctacttgtggaagcattgagtggcaggtactcgtatttagtcacggttctattaatctcgtctttatatataatttagctggtgtggaataggatttgtgtttgtaaatggatcttgtaggaatgtattggcccttatttacatgattagaaattccaattgaatata

SEQ ID NO: 20758 - DNA, 491 bp, Arabidopsis thaliana columbia
atccaactgctttgtcatttatccatgtcgttcatggcaggaaaaaacaaataaacattcattttaaaagcccaatcaatgtttttattgtacttgaaacctctgggagaagagcccttgaacttcatagatgaagagcctacaaaacgggatatcttaagaaatgggaagactagatttgttttccaattatgaaccacaagagaacttccacgtcccaatggaattatagttgtttatagtccaaacacacatctactttgaaacacgatgctttttgtcaactttcaactacttcgcccagttaagaaaagagataaaaagctcaccttacgcagtttatccaaagcgccacttgtgtcaaaggtttcatttccttcttcatccattgtaacagctgcgagcttggccaaggtgatgcccgcagcaaaggggtgccctggattactagagcaaatattgttgagataagaaaaaaagctagcaagtat

SEQ ID NO: 20759 - DNA, 536 bp, Arabidopsis thaliana columbia
aaggacattgagaggataatttccgctgttcctaaggagagacaaacttttctattttccgccacagtacctgaagaggtttgtcccattttcttgcataattcatttggttttggttttcgttgagataatccctttttgtaatgggttttgatttgtgttattttggtgtaaaggtacgccaaatatgccttgttgctctaaggcgggatcacgagtttgtcaattgtgttcatgaaggcactatagagacgcatcaacaggtcagacaaatgcacatgattgcatcactggacagacatttctctcttctgtacacacttcttcgcgaacacattatgggtaacgtagactataaggtatgagattcttaccagcatcagttgcaaagcacgatgactaatgttttcccttactgacttaactctggttcctgaaggtcattgtcttctgtacaacggccatggttacaaaattagtggctgatctacttggtgagctaaacttaaacggtgagagagatccattctagaaaa

SEQ ID NO: 20760 - DNA, 507 bp, Arabidopsis thaliana
aaataaggagaaagatataaactaacctggaactcctttcatttgcttaatcatatttttatgaagatcaagagcgcctttcacaatcactgaaggctcatccatcttccactgccagctctttcccacaggatttgtgtgatgcctccaacaaaacacacatttgtttgcacaagccaaactaggtgttgtctccatgcacctagtttattcgaaaatcaaataccgaataccttaacataagaatcacgacctaccaacataagactagaggaaacaaaatcagaactttcaatcaaacctgtgactctcaatgccataaaaggagtgcttgtagcaacctcccctgcctctaagttgtgactttgtccatctacatatcttaaccccactatgcgacccgataattttatagccctgcaagagataaaagtcatgctcattcaagtaaagacgagaaaatgaaaacactgcttcaaagctcaagtaacagaacccaatacctgc

SEQ ID NO: 20761 - DNA, 564 bp, Arabidopsis thaliana columbia
ccttctcctttcatcgtattcataaactcttgcttcattgtcgtcttcgaactatccgcttgcattctgacatgacaaggatcaaacttgttttttacaatcgcagacaagacattaaaaaaaatcggttacaagttttcggaatttcgggtttttaccttgttcttactacctgtaacgggtaaacacatgatgctccaagggctcctgatgtcattccacagctcagctgtatcagaggacccggctctgcagaattttaagctattttagtatcatatcacagaacaatgatatgcaaataagaataaggatttaaggttttgatgctctaaccagtgtcctgaagaatatatgttctggacaagtcttttagcgtttcatatgcagcgaggtcaattcctgcataaggaacaatcccaagaagagaaggaaacagacccttgtagaaagcccgaggtccctcccgaacccatatatcttttgtaagcttccacaacttaggtgcctttccacttcactgacacaagtctgtaaccgagtcttcacgagatccatagggta

SEQ ID NO: 20762 - DNA, 566 bp, Arabidopsis thaliana columbia
ccgtcaaccgaaaaaagccattgacttagtttctatatcaaaagactcaaacttgcattcttttaaggagattgattaccttctcactgacaacgctgccattgacaccagcgttcttggcgattaacttcagtgggtagctcaatgctttcttaacaatgtcagctccaacctggaggttaagatgaattgtaaaatggcgttataacccgcagacggcaaactcctcattcatgttatctttctctgctgtgcaactcttctggactaaccttttcttcatcgtttgctagagtctctttaatagcgtccactttcgatgcaagtcttagcagagtacatcctccgccaacaacaataccttcttccacagcagcctaattaaaaggtccaacaacttagtctctaccatatggatggaaacatttcaaggctctttgcttagagatgatgttacctttgtagcattaagagcatcttcaactcttaatttcttctccttaagctctgtctcagtttgtgctccaactaaagaatataaaacgtttagattattcttcttatta

SEQ ID NO: 20763 - DNA, 466 bp, Arabidopsis thaliana columbia
atttacctctatataaaatccatagtaatattatcaatagatcacacatacataaaagtagtagaactaaaaaatggcaaacctcttggtctctactttcatattttccgcacttttgctcatctccaccgcaacagccgccacattcgaaatcctaaaccaatgtagttacaccgtgtgggctgccgcaagccctggaggtggccgacgtctagatgctggccaatcatggaggctagatgtcgcggcgggcactaaaatggcacggatttggggtaggaccaattgtaactttgactcctcaggtcgtggccgatgccaaactggtgactgcagtggtggactccaatgtactggctggggacagcaccaaacacgttggctgagtacgctttgaaccaattcaacaacttagacttctacgatatctcacttgtcgatggatttaacatacctatggagttta

SEQ ID NO: 20764 - DNA, 312 bp, Arabidopsis thaliana
aacaatggttaaacaaaaaaagttaagaattggattactcgacgctcactatcctgacaatagatgaaccatcaatcttgtgcaaagccacaatggaatctccagtcttacaaattcccttcgtcgtggcaaatcctatagctaatctaatcatctcctccgttgaatctctagctgaacatcacaccaccggaataatcccacggtaaatcacaccacgtctcgccacatgagctaccgagtccgagcattcagcaatctctggcataatcaccgacagactcggaacgcttggcctgtatctagccacaa

SEQ ID NO: 20765 - DNA, 516 bp, Arabidopsis thaliana columbia
tctattaccaccactcattcataacagaaacccaccaaaaaataaaaagagagacttttcactctggggagagagctcaagttctaatggcgaacttggtcttatcagaatgtggtatacgacctctccccagaatctacacaacacccagatccaatttcctctccaacaacaacaaattcagaccatcactttcttcttcttcttacaaaacatcatcatctcctctgtcttttggtctgaattcacgagatgggttcacgaggaattgggcgttgaatgtgagcacaccattaacgacaccaatatttgaggagtctccattggaggaagataataaacagagattcgatccaggtgcgcctcctccgttcaatttagctgatattagagcagctatacctaagcattgttgggttaagaatccatggaagtctttgagttatgtcgtcagagacgtcgctatcgtctttgcattggctgctggagctgcttacctcaacaattggattgttt

SEQ ID NO: 20766 - DNA, 536 bp, Arabidopsis thaliana columbia
ggatcccctagtttttccacagacaacattgctgaatcatatactgaccagagatcatgggaagcgaataccgtgattgagaatgaggttagcttattatcctcgcctgaattcagttataatggtgttgctttctaattcatgtttcatgtgaattctctcagtttggtgaagttgacattgatgggtcacttgttgcttctaaatctattggagctgaggatattgtgatgctcaacaatggctgcctttgttgcactgttaggggtgatcttgtcaggatgattggagaattagtcaataccaagaaaggaaagttcgatcatatagtcatagagactacaggttgggaaagggggcattttcatttagtatgcttagagaatctggggaatgagtaatgactatcttatgtttattttcactttttaggattggcaaacccggcaccgattatccaaaccttttatgccgaggaagaaattttcaatgatgtcaaactggacggtgttgtactctagttgatgctaagcatg

SEQ ID NO: 20767 - DNA, 517 bp, Arabidopsis thaliana columbia
tcatgatctcacctactcaaaggtccaacggattctgaaaaaaaaaaaaaaaatgaccactgattaatatccacagcagacaaaggcactcataaacattttataacttttgtggcctataaatgcatacatccacattcatgtcggtatttacaatttcatatcaatagttacgtataaacatataatcagaaaatggtggtcaaagtatatgggcagataaaagcagctaatccacaaagagtattgctctgctttttggaaaaagacatcgagtttgaagtaattcatgtcgatctcgataaacttgaacagaaaaaaccacaacatcttcttcgtcaggtatataagtcacaatattttcagtatgatcacagaaaacgtgttattcattacgttgtatacttgtattagccgtttggtcaagttccagctattgaagatggatatctgaagctttttggtaggatcatctcaaatattttgcggctttatctcttaatgactacatgtagaa

SEQ ID NO: 20768 - DNA, 364 bp, Arabidopsis thaliana columbia
attacaaaatttgctcttatagaagacacatgttattaaaactgctaatgcacatatcataagctaaagtttcaagactcacacttttagaacttttcgaacatatactataagttatccaaaccctacatgatgatcatatatacatgcatgattttgtttacagatgcatatgtggggacatggatcacaatacagaaaaggacctgaatctctaaggggacacaaccaacaggaatgctaaggcttccgtgctattgctgcgccccaggctgtcgcaacaacattgaccatccaagggcaaagctctcaaagacttcagaacccttcaaacacattacaagagaaaacatgggatcaaacc

SEQ ID NO: 20769 - DNA, 462 bp, Arabidopsis thaliana columbia
taaggtgtccctctcagatatccagatgcaagatttgttagcgatgtatggatggtcgggataaacctagaggatcgggttgaaaggaatgagatcgagggagcgataaggagattattggtggaacctgaaggagaagccatccgagagaggatagaacatcttaaggagaaagtaggacgatcgtttcaacaaaacggttccgcatatcaatcgttacaaaatttgattgattatatatcatctttttagccactgacatgttgtttctttgtgttttaagtttttcaaccgataaattgtttgtgtatcagaaatttcttcctttgtgtgttgtgtattgttagaataaaattttcttcgtaagttggaatttacatatatacttaccacttaattatcagccacgttttcagcaactttttactagtattttgcaacctactaatacgaacgcatctt

SEQ ID NO: 20770 - DNA, 292 bp, Arabidopsis thaliana
ttttatttctaaagataatgagcagtttcgcggtcaaagatgtaatgagagttatatatagattactttaagcctgctaattccgcagtggctcgtgatactaggaataccaaacccggtctcatcctcttgccaccagcgatgaagatttgctcagcagcagatatcagtagcggattttctgcaccagcaatctatcacagatgagaatttacattagctacataattcgctatcatagagaccagcaaagaaatggtggcgaggtactaaccgatacacgcttgtcgtt

SEQ ID NO: 20771 - DNA, 630 bp, Arabidopsis thaliana
gcggtttttcaaaggtttaacaatttttttccaaatccgaaaaaatctcttaacaaaaaaactccttaatcttcgtcatctttttgtctctttttaaaaaataattaaaccccacttgatgattatcccattaatcatttaaaggtttttttttttctttttgttcaacgaatctctatctctctctagattttggggattttgctctctctccctctctgtctctctttggtgctcgtagctttctgtctcccaattgagagaaggagggagatagaaacgtcgatgggcttaattgtggatgatgataacgatggagaagttttgattccgccgccgaatttttcaatggtagaagatgaaatttaccgatctgggtttcctgagctggagaatttcggattcttatcaaccctaaatcttcgatccatcatgtaagattctcttctttcattcttctgaatcttttgttaaaaattaaaaaaagaagaagaatcttttatttaataacgcatagttgtcgttgtttatagatagacagattccttaaatcacactttcactttcatggcttttattagttaaatgtcaaaaaatgtgggataattatatacttgtgttgttgaattt

SEQ ID NO: 20772 - DNA, 597 bp, Arabidopsis thaliana
  unsure (1)..(597): unsure at all n locations
gaaccatgggtgagttcttctaaacctagtaaaatttactgtggaagaaagccaagtgaactatcagaagaagagttggaagaagagctattcaaaatgttcttaaaagcaagattttgtaagaggtacataatttaactgtcggcttactttcaagctcacaatagttcgtttagttaacatatgccttgttttcacggtttacagagacgttatagggatggctgcagattgctggctaggaataatggaccctttcctcaccttaggagatgagagtgctaaggaaaaatatgaaaggaagaagaatattcttaagttgattgatatatactatgatgctcttgatgcaccaaaaaagggggctaaggttgatctcccgcccgatctagagatcaaaaattttccacattacatggagcgtgaccctaagagagatttcaggtccacttctattcttggattaatctttgacactgtggattctcataatgcagaggaaccccaccatctggtacggatcttctagtttctatcaataatcagagtacacaagaactcatcatctcgaatatgtattacngtctatattgtatg

SEQ ID NO: 20773 - DNA, 652 bp, Arabidopsis thaliana
tgaaatgaagaagaagatgcttgagctgattgatatatactatgatgctcttgatgcaccaaagaaaggggataaagtctacctcccaaacaagctgaagcctgacatctttccacattacatggagcgggataaaaaattccagtccacttctattcttggattaatctttgactttgttagatcacagacaacagaggaactctcaccatcatctggtaaaggacctttatcggttcgactatatacatatcatcagatcaccaaagaaatcattaatcatgatatgtgttatactgtggtttacaatttagagatcagtaaactcccgtgtttcgaagatgagccggtctccgagtttcagatgcagaaatgtagactgtggtatgataattacagaactgagatgacacaggcgatgaagactgataaggatgaatcagccaatgaagttattcagagatacaagcaggtaaggtcctcaattcgatgtcaccactctggagatttagttaagtctaagagcaaagattctgccagtagacttcatgaacaccaatgttttgttgattggttccgtggaagtatgtaccagcaggagacaatcatgcttatcaaagaaatggtttattgcggtgtgcaggagtctatg

SEQ ID NO: 20774 - DNA, 534 bp, Arabidopsis thaliana
gtccttatttccacctaaccatttacactctatatagtaagcaaaaggaaaaaaaaacccctttcctatatacaccccctcccactttctctcacaaacccacaacactgactcacatcatcaccatggctttctccactagctcatgtctcttcttcttcctctttaacacttgttcttttctcaacccaaatcagtgcaagacacagctactcctttggcaagttccaaagagaggaccccaaagagcaaaaccctaacactcttgtccctatcgaaaccaacgagaagaaagagccagatgaccagacccctgcctttatcccccagtccgaaaacgggtacggcttgtatggtcacgagacaaccgacaacaacaatgaagagttgaacaataacaagtacgaggacaacgttaactacgacgcctctttctccacccccagcctaagcgaaacggctcaaaccaagactcttacaagaactacaaagagagctatcctaagacttacgagatttacgacaacaacaagg

SEQ ID NO: 20775 - DNA, 891 bp, Arabidopsis thaliana
tagaataattcttcaagctttgtgttatcaacagaatcatcaagattcttcacataaagattcatccctttacgtgttttcatatcccgtattatcttttctagttcaaatttagctttcaaatcctcagttctattagttttcctctgagctcttccaacatgcaactccttttcatcaactactaccccgttcatcttctctatcgcagtaaccgcggcctcagccttctcgaagttcacaaacccgaaccttctagacttaccttctccatctttcatcaccaccgcgctagttatctccccaaactccccaaagagcctcttcaaatcagcatccgtcgcagtctccaccaagtttttaacataaacattagtgaaaacccgagatttatcccattgaccacggctaacgaatggacaaacatgaatatgttgattgcggatgagcgtgccattgtgaaaattgcatgcggtgtagactgaaaggtctgagtaaaactggacgaacccatatcctttggaaactccagaagcatcacgagccactttgcaagagagaactttgccaaatgcagagaacatatcgcaaagttgcttgttgtcgatagattcgtctagattcttgacaaacacgttacctcgtccactcattctgttgctaggatcacgttctgaaaacattatcctcataggttttccctttaacttacaataattcagcacctccattgcagtcttcgctgttttccccacgaaaaaataaataaatcaaaccaattaacattcaaattcgttaaagaaaaatcgacataatttaaatcgaaacaaatacacgtgtgcctaaataatactaacaaaaaacaactaaaaagtgttttagattagggac

SEQ ID NO: 20776 - DNA, 581 bp, Arabidopsis thaliana
tctagtaacgttagcgtccgccagtgtgctctaaagcctcatgacaagctacgccgagcctgcagttattccctaagtctaatcctcgcagtagcccttgtcttattcctattccctcaggctcttttcccccgtgaggcgagttcgctctggtcgtatcttcctggcgcacagccttaccccaatacctggccgagcggcaacggccttgatcaggaggagctccagaccctcctcctgggtaccccgtctgcggcccgtgcccgcgaatggagcaagtattatacttcaggaccccatcttacaggtaaaaacctcagccaggcgctgtggacaaaggagcgttgggaagaattcggcatcgctgataccaagatcgctacttatgacgtttatctcaactaccctctcgaccatcggctggctttataccaaggcggtaacatcagctatgaagcttcgctggaagaggatgtcctagaggaagatagtaccagcggtttacacgatcgcgtaccgaccttccacggatattcagcaagtggaaacgtcacggcttcgttcgtctttgtcaactttgg

SEQ ID NO: 20777 - DNA, 551 bp, Arabidopsis thaliana columbia
gtgcaaaccatttgaccttaagtaaacgccaagctgatccaccgacccctgcttcaaggtcgagccattggccaacaagagaacagaattgaactgtttgactatccgaaatcccggttggtggatagtcagaattatggtcctgcctcgtgtttcagccatgtgtttgagcatgtctatgatcagcagagccgaagtactatcaagcccagaggttggttcatcaaggatcagaactttggggtcgtgaataacttcaactcctatggagacacgacgtctctctccacccgatatacctctgacactatcatcgccaacacgagccgtggcaacagcttcaagcccaagctcatggaccaaagacttaacccgtgatctcagttcatctgcagggagctttaaacgcagcttagcactgaacagaagggtttcctccacgtaagcaaaggaaacagagtatccttctgagtgacataaccagagattttcttgaaattggctctatcaccggtctcttgttgacataaccgacccggtttgagggatga

SEQ ID NO: 20778 - DNA, 469 bp, Arabidopsis thaliana columbia
tggaggagtttgggttgtctgtttgtgttaatgtgtataccaaaaatggttttccatcaatttcctcctttcaaaatactcccacggaactcatggtttcgataatggggatttggaaattttttgtgatatctttcttctccttctccctcttgcatatatagccaatagccctggaacaaatatccgggatccgcgggtatccgtatctggaaccgggatccgatccgaaaaaccggatatccgtgtgaaacggttccggatacggatagtaatattttatatccgccggatccggataatcataaaaaatatgaccggatatccggatccggtaatattcaatgttttatgtttatgggttttattgggccatactaaaaattaaaatctatgatattttccagcccatatcttggcccattttccaaaaaacctaatccttttatctcctcactcattcctctcg

SEQ ID NO: 20779 - DNA, 886 bp, Arabidopsis thaliana
catcaaaattgctagcgttcagttccacagatgcactaggttcagatttcttttctttagatcctcctccagttggtttacttttgccttccaaacggtcactcaaaagacccttgatctgccaatgcaagcaaatagcaatatgtttatctgaatgcaggtacacaagtttgtttgatggagaatgttatatctgcagtgcaacttaagatggccatttgtggttcttcaattcatattcaaattttactaaactagctatattttggttgatggacaattagtgtgattccacaacgtatctaagtagtatattttgtttgatggacaattagtgtgattccacaacgtatgtttgtagtacttagcttcaagaaggtataaaaagtataaaacttcttctacataactatggcatatctatcagaacatgttatctgcttatctggccaaaagaaataacaaggtaaaggtcgtttgttgtagcaagaacatcttgactggggctttaaatacacccgatcatgtcacaggatgagaaatttcttgacagtaaaaaagagtgtaatgaagaatcaagtagtagcatatgacaaacctgcttataagcaaaattagcaatggatttggcatctcttgctccttggtaatcgattggagcctttccaggaacaaaaaccttaattgttgggaaacctttaataccataatcctgaacaagagagtacatcatcagtatcacaaacctgagcctgagctttgtgcattatagtgagtaaaaaagtttttttttttcttgtatgattcacaagcaacggctacatggaaaaattgaaactttagctgactggtatcaacatcacaaacctgcgcggcagactgatga

SEQ ID NO: 20780 - DNA, 548 bp, Arabidopsis thaliana
gagggaaaagggctacaaactcattcatgtgccctaaactcctcaccgacgcagctctcactagctcgctgtaatcttcatctatcccgaaatcggtggttctccgggatgatgcggaggaggagaaggcggcggaggaggagctccggcttcttggaaaaggagcggagacggaggcggaggaggaatattgagtacgagctgcgcaaccggtgatgcttctcacgtagaaatcacgtgccttgcctaaagctcttagaggtgttgagattattctcaagaacttgctctggttttgtttcatcctctgtttttgtttttttttttttggggaaatggtttttttgttgtttttgtgttttgtttgaatggtgggtttgatttttttggagtgtggtgtggtttttaagggttttaaatatataataatgtttaaaagagtgttaaaggagaaataattgagagaacaaacgtgactttaaggatttgtttagatatttatcaaaaaagttgatttacgaaaataatagtcgaagagtgttggagag

SEQ ID NO: 20781 - DNA, 536 bp, Arabidopsis thaliana columbia
gagaataccaattatgagtttggctactaatcaaaacacgaatcattttaccgttgacaggaggagtaaagaagtggatcatcatatacttgccttgcaaaacagtattttcggcgatcccaagatccttagcaagatattcaagagcaccattaaccaccctgattcagtccaatagaacatcatcatccatgatcacaccaagataaaaacagtgtagtatttagtcatacccgagatgataaccaaagagtatagcaccaagacaagcaacaccaacaaaaggcaaaactgttccagagcttttcccttcagatctcagaggtatagcttcttcttcatctccatctacatttcattcctcaaaccatcagatgattagtccaaatcccaaactatacattagattcttcaaattgtatttaagaacttgtaagcaatcacagaatctaatgatagacaaagatagaagagcattagaagagacgaaccagatgaggcttgagctctgaccgatcgagctttgacagaagaga

SEQ ID NO: 20782 - DNA, 478 bp, Arabidopsis thaliana
gtagacccaattgtcaaaccagaaagaggtgccaagtccattcttcactgttactctaacaaaaccagccgctgaatcacgatacttaagcaactttttccacatccaagatcccagtgtagtagtttcgcttattgaccagaaagaagccctcttgataagataaatgtgtatccatctcgcccaaagagagtttgatgatagtaacctccagattagtttatagcagctgaccttatttgcctcattgatcgatcgtaggcctaaacctccctgctctttaggtgtgcaaacatcttgccaggctacttttgcttttttttggctgagagcgggtcccgaccataagaaagcagagcagagttggtctatctgttttgtgcagataaaattacgagttgtgccaggccaattcgcatggctttttatgagtatgtccagcccaaagtctcttatgtatatatgtcctacttatata

SEQ ID NO: 20783 - DNA, 549 bp, Arabidopsis thaliana columbia
tgtggaagaagaaaaaggcgggggttttctctctctttgttctgaggtttttttttttttaatgtaatcagagtaacgacattggtagtatctggggatggaggaaacgattaggaaaggttctgaagtggaagtgtcttctacagaagaaggttttgcagatgcatggttcagaggtatcctccaagaaaatcctaccaaatcaggtcgcaaaaagctccgtgttcgttacttgactctgttaaacgacgacgctttgtctcctcttatcgagaacattgaaccgaggtttattcgaccggttccgccggagaatgaatacaacggtatcgttttggaggaaggaacggtggttgatgctgaccacaaagacggatggtggaccggtgtcattattaagaaattggagaatggcaagttttgggtttattatgattctccactgacattattgagttcgagagaaccaattgagcctcatttgcgctggtccggttggaaatggctccgccagatattcaggtacgaggttgatgtaatcaagttggg

SEQ ID NO: 20784 - DNA, 514 bp, Arabidopsis thaliana
ctgtcaggtctggatttggagagacttgttttagcagctgggcccttagggatcatgcaggcatgcctcgacaatgttcttccctatattcgccagagagaacaatttggtcgtccagttggggaatttcagtttatacaggttgagcttgatcatccttctcataaacgtttccgaatatctcaaactttaatcataagattcctaaaacaattctgttgaatttcagggtaaagttgctgatatgtacactgcattacaatcttcaaggtagaaaacttctctcaatactctggaaattattttgtccatagaaatgtagctcaagcaaaaagttgttcctttggcatatcaggtcatacgtttactctgttgcgagggactgtgacaatgggaaagttgacccaaaggtaatttgataataaataaccatcccttctagtttcctgttatgaaaatagtcatgcatcaccaccgcaacctaatacacctgccttcttgtgtatttgcttat

SEQ ID NO: 20785 - DNA, 451 bp, Arabidopsis thaliana columbia
ctcacaagcaatcttcacatttatgttacatgtctctgtttctgtctaatagacacttattgcaataaccttccgacgcttaaacttaagcccactcattcgatcaagcttgcaaacactaccattctccaaaactgacactcctcgtttctccacctcaccattgctctgagacttaacctttgatatctccgtatgtaccatcaaattctccataactcccatttccattcacaatctatcaacaaacaacaaaacatcatcactataaacagattgttaaaccacaaatgttcaataatacgaaactgtttcatccattgttctttctttctcaaatctaatttcagaattcgatttcgcagaaacaaaaacttaatcaaagacgatatctacgaagaaacgaagattaaatacacaacggaaccgagattaaccgatcagattaaag

SEQ ID NO: 20786 - DNA, 552 bp, Arabidopsis thaliana
ctttcagtttttccttagtcgtctttttgtttgtttgatatcttctgattttccatagtcgtcatcaccacaaaatatcagctttaataaaggctctaatacgtacgggccctattggctagatgtgtttttccttaactaaataactaaagttataaaaagtcaccatctttttgttttactttaatttgttctaacgtaggggagactctagggtttattggagtgtctctttccaccatgagatcacggcagctgcataacgtttcggaggatcgagaaaccctgtctcgacgcaataagcgatcaaagacctcactcaatggccacatcccaatagatctccttatcgagatattcttgaagttacctgtgaaatccatagcaacatgccgtagcgtatccaagttctggacttacgtacgttggcgtcaagatttcacagagttgttcttgacaaaatcttcttctcgcccgcagctcttgttcgcatgcgcaaacgacaatgggtacttcttcttctcctcaaatcagcctcagaatcttgatgag

SEQ ID NO: 20787 - DNA, 456 bp, Arabidopsis thaliana
tagaacatctctcttcttcaatcatccaaactctgaatcccttgactccatttggataacccacgaatactcctttcttagctctgggatctagctttccttcttgtgaataaacatacacgacgcatccaaatcttttcaatccagagaaatttggaactgctgatgtccacaattcttcaggaatcttattctctatggatgacgatggtgatctgttgatcaagtacactgcagttgatgctgctttagcccaaaatttcttatcaagcccactttcactcagcatacttctcaccttgttcataatggttctgttcaacctttctgcaactccattctgttgtggggtatatgtgcatgttctgtgccttactataccctctttcttgcacacttcatcaaacttatgattgcagaactctagaccattatcagttcttaggtgctttagtt

SEQ ID NO: 20788 - DNA, 1438 bp, Arabidopsis thaliana
tgacaggtggacatgaccgttgctgaggatctttcaaaggctgcgcattgggcttgggctttgcttccagtggcccaacttctttctttcttgggttttgcagctttgaaggttcttgaatccagaaggtcaagttctcactgatatacccccgcaaacttgggatcggtggtgaatcgataccgagtttgaaccttaatgagctgaacggtccgtgaggaagagacttggtgaagatgtcagctatttgatgatgagacgggatgtgcttcacaatcagcgctccaagagctactctttcacgaacatagtgataatgtcgcaggaagagtttggttcgattgtgaaacgccggatttgccgtgagatagactgctgataagttgtcgcagtacagacttggggtctcatgaagaggaattccaagttccttcaggaatgagcacaaccaggttatttctgaagctgcttctgacattgctctgtactcggcttcagttgagctcttagagactgagtcctgcttctgcgatgaccaggagattaaattactgccaaggaaggtacagaaaccacctgtagatctgactgttgacttgcagcctccgaaatcactatcactgtaagctctcaatgtgcaatcagtgtcttttctgaatgttattcccattgtaattgttcctttgatataccgcaatatccttctcaacagactgaaatcgaactgagaaggagcatgcatcttcctgcaaacaaaattcactgcaaattgtatgtctggccttgttagagtcaagtattggagtttacccgcaagacttctgaagtaagaaggatcagggaaggcgtcatcagtatcagactctttatgaatttgcagagggagaggtgttggcataggactgcagtcagacatggcagccacaacaagtaagtcttctgcatacttttgctgtgataggaatagcccttctgaatgattctgaacctgaattcccaagaagtaatgtagctcacccaaatccttcattcgaaactgcttatttaactctgccaatagattcgataaggcctttgaattgttacctgttatcaccatatcatccacatagagtaatagaagaatgacatctttgttcttgatgtagatgaatagtgatggatcaggataactgcaagtgaacccgaactctagtaagaatgtgctgaacttatcaaaccaggctctgggagactgcttaagaccatagattgacttgtgtagatgacagacatgatttggtttgtctggatccacgaagcctgctggttgagtcatgtagacagtttctgtcaaatcaccatgcatgaaagcatttttaacatccatttgctttatttcccattccattattgttgccacatgtaacactcctcttactgttgcagatctaaccac

SEQ ID NO: 20789 - DNA, 1014 bp, Arabidopsis thaliana
tgagtagaccttgaaacactgcaaaaagatgagccgatgttccaccgattacccaaaactgctcgttcctccaccagtcttcaagggccacatcactccatttgagctccaagattgctgatgcgtagatggatgcaaatagcagcatgaaacacaagctcgctaagttacttatctgcaaattaaggacaaaatgaatatatgtaaaaaatgcattttcaaaaaggtgagtagtaaatagatgaaaaatagaacttacctctggtatgatgaacgtgttggttatgaggcaaaaagctggaagcatacaataggcgaggagcgggatggatgtaattggatagactatggtattgatgtaggcaattctctccaaaagtttcaacctcccattatagccataccatatagggcaatgtctactcagaagaatctcgatagatcccaaagcccatcgaagaacttggttcaaacgatcagaaagattgattggtgcagatcccttgaacgcagggcgtggaggattgcagtagatcgatatccaaccccgggcatgcatcttgaacccagtaagaatatcttccgtcacggaaccatagatccaaccaatctaacaaaagtgccaaataagatgtcatcaaacaggtaagaaagagaacataagaagattctgtagctgcatttgaaaactgacctctttgccccattcagtcttgtcttcgtaaccacagcttataacatgaatagcctccttcagaagagtagcgggattggttgttggtggaatgccgccttgttccatgaaggttgccgcaataaataccggcgactgaccaaaacgcttctctacactcctctgggacattagaatagacctctcatcatcataacctgcataaacaaggattgtaagatttcacatcacataaatcattacataaagaagtgatgttattcacaatcagctcaatcaaaccttcaaaaccctcatcgatgtctcgatattgaaaagtg

SEQ ID NO: 20790 - DNA, 509 bp, Arabidopsis thaliana columbia
tgtgagcctttgcacgtagttaacaacaacaaaattgctttgactattatctcaatcagtttcttcttgctagttctctgtatcatctaccatctatttatatttttattcttgatagcttgaacatattactcttctttcatgtcttgtcaaattttctttgattttacagttcctttttatgaaggcttcggtgttatccatttacaggtttagtagagcacaagtaaacgagcttgacaagaataggcagtggtctagggctcttgatggctccgactatcttccaggaatggtaatcctttctctttgattacacttgatcttgaaattaatgtctcctaaaggttaagcttgtaaatatgtaggtggggttgaacaacatacaaaagacagagtttgtgaatgttacaatccagtcgttgatgagagttactctctaaggaatttcttcctcattcctgaaaattatcagcactgcaagtctcctcttgttcaccgttttgggg

SEQ ID NO: 20791 - DNA, 596 bp, Arabidopsis thaliana columbia
ctaaattgcttgaacaaatctttgccaaaactgagcctctaactgacatagagataactcttaagaacaagctaatctctgatctattgaattaagttattaatgtgttcagtttatgtaatgtggtttgtaatgtgttccgtttcatgctctttgtttgttttaagtagttgtgtttgttttgtttcagtttatgtgtttgtaatgttgaatttcagtttcagtttagttagtattaatgaatgttggcttatattgtttgtgtttgcggttacatgagtttgcagcaaagtccatgtggtttgtaatgtattcaatttcatgctcttgtgtttgttttaagtatttgtgtttgttttgtttcggtttatgtgtttgtaatgttgaatttcattttcaatttaactagtattaatgaatgttggcttatattgtttgtgtttgcaggtggtggacaaggcttcttaccgacatcaattgactaggtggtggcaaagcttcttatcgacatcaattaactcgttttgtgttttgtccttttgtcacacacactagttttgtgtttgtttttttgtactacacccactagtttgtgt

SEQ ID NO: 20792 - DNA, 938 bp, Arabidopsis thaliana columbia
caatcctattaccgcaaaaggccatgaaagtgagaatcgacgaagttggaagctgtcgtggaagcgaagggaaaagaaggagagaaagactccaagtgagaaggagggtttcctgagaagacttgaagtataaattagccattgtggcatttatatccttttatgcttttatctgggtttttcttgagatttattgttagagagagattgtcccggtgatgtgccagaagagagtctctatgttgagctctgtgtaatcgttactggtgagagtggtcaacgattgtatttctcgtaaaccacagattttcatcgttgataatcgatcaaatttatctcagttttcaaatcatactttcaataaaagctaatatctcatttattcatcattttgttgagttttgagttgatcgatcatcttaaatctatcattggtgcgatgatctcggttcgttgtaagtcgcgatggttgtaggtgaaggatcggagctgtatgaggaagacagctatggcggtgtgggtgttgagaacgatatatcatttttgaagggtggatacaaacgtatgaatgaaatgcagctggctcaaggtgagaagctggaatcgatggacatattgttgaaaacggtggctgcaacgttggaaaggatggagatcaatgctggaaaacaaactgatcgaccagatccttctcaaaattccccacagagtatgattaactcagcgtttcaacaacgcggatctggtgagtataattttgtgttggataatcgtgctagcttgctgcgcaaaatagagatgcctgtgtttgatggatctcagccgtatgagtggttttctaaggtggagcgtttctttcgtgtgggtcgttacgccgatcatgagaagcttgatttggtggcgttgagtttggagggtgatgttttgaaatggtttaa

SEQ ID NO: 20793 - DNA, 514 bp, Arabidopsis thaliana columbia
caggtttgattattactcgaatacagtgcactctaaaacagccatgaattgatagcttgacacttacttcattgtcatgcgtaaatgcaggaaggcatcccatccgtagataacgagttcgaatttgacggatactccatcgataatatccaggtctgactacagaaactcagactagactgcaagattctttgtttttcttctccctccttcgaggtacaaagctcaaaacatggcaataaccgaagggagaagatagaaacgatcatgtgttgtatctttagatgataatctgcaggaaattccaaaagcaggttttagaagacaataattgttttctttttggttattaggagtaatgtgaatttccttgtttctacatctgtctaggtcttacaacaagactcttgacatttagggttcttgatcgtctaatttcctataattagaaatgttttgcttctctctttttgagttttaggaacattttgtgtaaatatgtttctatgcgttg

SEQ ID NO: 20794 - DNA, 508 bp, Arabidopsis thaliana columbia
atctttatttcgtcgcattgtgaacacttaaaaattctggtctgcaggttagttgatactgcagtgaagacatcgcgtagtgggtatctgcaaagatgcttgatgaaaaatcttgagagtcttaaagtcaactatgattgtactgtccgggatgctgatgggtccatcattcagttccaatatggtgaagatggtgtggatgttcatcggtctagcttcattgaaaagttcaaagaactgacaatagtaagccttcgtttttgacagtttaccttttctttatctgctcttgggaaacttatgtggttattttaacttactttggttcagaatcaagatatggtccttcaaaaatgcagtgaagacatgctatctggagctagtagttacatcagtgatctgcctattagtcttaagaagggagctgagaagtttgtagaggcaatgcctatgaatgaacgtattgcttcgtaaatttgtgagacaagaagaactactgaagctggtg

SEQ ID NO: 20795 - DNA, 967 bp, Arabidopsis thaliana
attaaattccaacaaacaaagaaaactgataattatttgctttttatttaaattttgtagtgtaaagaaaatgattgaacatgaatttttcaattccaaatttcttcaattgttgttgtcaattgtcatacctatgaatatatgtatgtccatgataattcattagccaatatatccatttgagagatgttcattagctactatttttcctagttgataaggtcttaattaattatttatttaaattgtaaatggtctttattttgtgctgctatttctactaaaaattttattaaagaagaagttgacaaaaaaataaaagaaaaataaaaaataattgatcgcactgtcaaaccaaaaaaaattgaaaaccctaaattggttgaatgggaaaatcgatggtcagattcgcagaattcgccattagactctcttccgagaatccaaccagaccacacagaccttctccttctccacggaacaaagtcttcgtcaagaagacgacgagagacaccacgtcacacctcgattactccactctggttaagctggagaagcgaggatcgcactcgggttcgaatccgcgctctcggcttcgggttcggatcctattaaccggttcccatcgctcaggtcgtcgaggattgcgtcagacgctggttccaggatacgctcaaggaagccaaatctggtgacgttggtatgcaggtcttggttggtcagatgtattgcagcggctatggaatccctctagatgaaaacatggttcacttgttggctctaatgtttctgggtctaggttgttgtcttatagttcttctagagttgatataaaggtttgattttgtcgtctctgtgtctacattgtatgcctctgattaggttttgttgtgattggtctgaattagggttcttaaaatgtatgtggttagctctgatttgaagatgtgattgtgattctgattta

SEQ ID NO: 20796 - DNA, 334 bp, Arabidopsis thaliana columbia
ctctctgtcgtctacttgataagaattctcaaagcctaagccatgataaattcttctcgccctatcaccacctgcgtgagtttcaaaaatagcgagaatgtttgtgctaaacttcttcagaatataacaaatcgacctgcggaaagtgggtttattgcccccccgcccgtccccccggcaattccagaatagccaatccattcgcgaattccaaaacaagattcgaacccaccaccaccagtttcgcctcaagattctccagccagatcactctgccattcgccccaatcccatctggatccggttgcgaaatgtgatctccttccactccatc

SEQ ID NO: 20797 - DNA, 1107 bp, Arabidopsis thaliana
ctaaagccaaatctttgccgatgggaattctgcagacggtgtctgcggaattcgcaatggtgttaattcgccagacattgtctggtgaatttcaacatgttgaaaaaagaggtaaaaaagcgtcatttggcgtaagttttttgcagagaacccacgcttataccttagacataaatcctttgatagtcgcttgattagctgcgcaccatacgcagccctggcctcgccaccttgttcaaattcgacaattcgtcggccaatttcctggtacgtcgtggtcattaacgcgttaacgctacgtaccgtttccgtccgggcgctagaagcatgtcgttgagttggaaggtgacgtggaagcgaagagaaaagaagaagggaaagactcttagtgagaaggagggtttctgagaagactgaagtataaataagccgttgtggcatctatttcctttttatgcttttatctgggttttactgagatttattgttagagagagattatcccggtggtgtgccagaagagagtctctatgttgagctctgtgtaatcgttgctggtgagagtagtgaatgattgtatttcttttaaacagattgattatctcattgataatcgatcaaatctatctatgttttcaatcaaacttttgataaaggctttaatctctctattcatcattttgttgagttttgagttgttagatcatcttaaatctatcatcatgatggcacctttgtattagattgcggactacgaggtaagcgatctgatgaagaatggtgtcttcttgagcgacgcaataaagacttttatggttttgtttagattggtcgacgtagagatgtgatgatagttctctgataaatgctgtataaacgacgaagttaatctttttagaaagataagcctaggggcttcagatcgatatattaatacgttttgtattttcttgtagttcgccggaaaattggtcacgaaactggctgatttgataacagcagacctgcgccttagggttacggccaggatgtgcttgtcatagaaaaccagtaagaactcatggtagacagcataaattgagctgaggtcggacttctatgaaagat

SEQ ID NO: 20798 - DNA, 542 bp, Arabidopsis thaliana columbia
cgtcgtcttcacatatatctgcatcgtctcctgcaggatcatggagttctcaagacactgatgttacttccactcctgccttggttgttcagaatcctcagtcacctgtgagtgtttatcgatttcttgttatactatagaaactcgcaaccgcactagtggtaaactcattgagccgcatataaacgttttcaggaaatggagctgataagcggtatgagatcacagatccaacagcttcagcaagaaatgtcagtactacgagattctgtcaaaacgtgtttagatgctaacgcgagcttgcaacacaaggctcaccaagaaaacccaatgaaacgaaaatgctgcgtctgcgacgaaacacaggtcgaggcggttttgtacaggtgtggacatatgtgcatgtgcctaaaatgtgccaacgaactacattggagtggagggaaatgtccgatttgcagagctcagattgttgacgttgttcgtgtcatctacgatacaagaaactgaaatcaaccgttttgaaaacgctgaagaattca

SEQ ID NO: 20799 - DNA, 375 bp, Arabidopsis thaliana
cgccagtgtgctctaaagggccgcgataccgtggcgcatgtcgtagtccagcacgttattacgtaccgcctgctgcgcggcctgctgcactttgcgggtgatggtggtgtaaatgcgataaccgtcttcataggcactttcgccataacggttatacatctcctggcgcaccatttcgctcaggtacggcgcagagaaagcaatctccggcgcgtgatagttagcgttaatcgcctcagtgcgtgtctgatcgaactgttgttgggtgatatacccttcatccagcatccgcgacagcacgacgttacgccgcgcgacggcacgatccatcgagtagagcgggttgaaggtggaatgcgctttcggcagcccggc

SEQ ID NO: 20800 - DNA, 651 bp, Arabidopsis thaliana columbia
attgattgaggatgtattcaatacaattcaattcatagggtcttttaaaaactttatcgtaaatgcattcttgaaaatgcagtttttgaaaaatatcaacgccatacttcttgctcaaagtatgaattatcaaagtattgggcaacgtgtaaccaagagacaagccgatattggataacatgtagtaccgtcacgagattttaaacctcgtaattcgtaagtaatgaccaaatttttacatcatcgtgctactagacgacaaaacaaaacacgtgaaaatcaaaaaaacctatcaatatcattaaccagaccacatctccaagaaacttgattgatactgaagcaatacaagcaacaaaactatcaacgccgccactccccacggcgagcttccaccgtcacctccggctccgggactcacgtaagttgtccgacgactgcttgaaaacatcccgagaagcgcatcagggttctccatggaagataaccaccggaccaagactataagaaacagaggaatcaagagaagcgcaaaatttatctgctcttccgctgattcggctgcttcttcaagctgaagtccatgaactcacaagacactgaagcacggctaggatcaaagactgggtatggtagtgcgatcgagaatga

SEQ ID NO: 20801 - DNA, 549 bp, Arabidopsis thaliana columbia
tggtgttcttttggttagggagtcctcttttagccaaaatttgacagttttgaaacacaacagtcccatccccaaatataaaatctactgttcccgtgatggtgcactcacggtagaactgacgcatggtgtgcgtgtagagtgtatcttgataacccctcatcgcacatctgaagaacacagagaggtcagagtctgatctcagtgctaccgcctgatgcttctctggccctgctgtgttctggaacgttatatctcttgctaagaatcctcttccgcttaccgctgaaatttttgtgtcacaatgtttcaaaaccattagaattaagaaaagaaaaaacaattgttatcaaaacatgaattaacaactagaaaatcttattaccgaatgtagctgatcggaaagtggtccaaccatcgatgaagctgcggttaccggaaataacagtcacgtcaatgccatcacctaacattacaatgttccatttcttcttcttgatctcaacattctccaaatataaacgttttttaatgtatatgacgaaacgt

SEQ ID NO: 20802 - DNA, 473 bp, Arabidopsis thaliana columbia
cttggcgcaatttcaagagcgagttcaacagttttgcagcttcagcatgagtgactaaaggattatcagaagaagtatgacctgtagattatcacaagttggatagaaacttaagcagccagtacagaaggaagtgtcaaacttctgagagtgaacttttggaggcaataaaagacaaaagtggaaagtgctgaagacactatgtgcaccccatggtacctcttttgagaatatcacgtttcaaagtttctataacttcacgagcataactcacacaagtgtcatgctgtctactgtaaaagtgtacttcaattgcggaaaatttatagccacgagacgcattcctctagaggtggaagttgcaactcatcagccacatggacttttgaagaacgccacataacttgtttgaaaaacttatgcgtaaattccatggcctttgtgtctcgcctctgaacaaatcaagaaggttg

SEQ ID NO: 20803 - DNA, 638 bp, Arabidopsis thaliana
tgatttggataaagattctaacagcttttgcttgtctagtcctggtgagtgtgatcctagagtgaagtctttgcttttgatagctagttcattcgattatccgccccggctcgctgagagttggaaaggaaacgatccttgtactaactggattgggatagcttgtagcaatgggaacattactgttatcagtcttgagaaaatggaactaaccgggacgatttctcccgagtttggagcgatcaagtcgcttcaaagaatcattcttggtatcaacaatcttactggtatgattcctcaagagcttacaacgttacctaatctcaaaacactcgatgtttcgagtaacaagcttttcgggaaggtcccgggttttagaagcaatgttgttgtgaatactaatggtaatcctgacattggaaaggataaaagctctttgtcttctcctggttcttcttcgccttcaggtggttcgggttcaggtatcaacggtgataaagaccggagaggaatgaagtcttcgacttttataggaatcattgttggttcagttcttggaggtttgttacaatcttcttgattggtttgtaagttttatgttggtacaaaaagaggcagaagagattctcaggagtgag

SEQ ID NO: 20804 - DNA, 1061 bp, Arabidopsis thaliana
tatgtgcgagtatactttgggattgaatggctaaagagcactagacatcagaaaagggtgacgaaaaacatcctagtaaatctgcaagatcgtctgaagatgacatttggattcttggaaaaggaatatagcagcagacaacagcaacaacaagtaacataatatacatacatacatagcctttggtctaaaaatggagggctcgaagcaactcgttccagcttgaaaaacggaggtttgctcttgtatgtatgcacacaagtagtcatgtgaagacgagagagtgtgaatggaggtttgctctgctagtgcaactttgttgattctttatttttatctgcattcactgcttctttattgtatgatttgtctgtagtgaaaggagcagagttttgtgattatgttaatatgctctgctactgcctaaaactcttatagaaactgatgatgctctctagcattcttataaaattgctagatgagagacattggttttgttgatgaaagaaactacttgttttagatttatttctaaatgtttttcttcatttatcatgaacaacaccataaattgacatatgaggtttgtatcgtttggtcgtatcgaaatttgctttatgtggagagcaataaagtagtagtatgtgagtataggtaacccaaatttgaccattacaaatatatttgtaactttttatatctggcgagccataggttctacaagttaatcttttggtttaaggtgagattattaaaatttttaactaaatccgatccaaaattatctgttaacttttttttaaagagaaaaaaaaaaagtaaaattgaaaaaaaaagaagttggaaagtcaggccgtataaaactgaataaaataaagtaacaagagaatgatgattatccatatattatttaaatcaaatgataagtctgtaaaaaaaaaaaatggcggaaaaaattggattaaggtgaaaatcgctttctctgaaaatcaaagacgaacgagtaagagagaagtagtagacgagaagacaacaacaaaaatttgagagagagagagaga

SEQ ID NO: 20805 - DNA, 1080 bp, Arabidopsis thaliana
tatctttttgtcatacagatgattatgttagaaggtgcaaaagcaacaaccgaaactgttgatgcattgaggagtggagcttctgcaatgaaggcaatgcagaaagcaacgtaagtgttcatcacattttcaccatattactctttactaccattttaaccgtcatcagttctgggaatcgttaatacgagcttggtattcaaaatacttatgcttttcttgtgcttgaatgctttaacatttctagtgcctgactaactcaaaacacaatattttgcagaaatattgatgatgtggataagaccatggacgagatcaatgagcaaaccgagaacatgaaacagatccaagaagcattggcgactccaatgggggcagcggctgacttcgacgaggtaactttcttgtacccaaatgatcatatatttttcaactaataatgacttttgtctaagaaaaacttctctttgataggatgagcttgcagcagagcttgatgaactagaaagtgaagagcttgaatcgcaacttctacagccggcaacaacagctcctccattgccttcagttccagtgcctgcagggcgtcaaccggctcgtcctgttccccagaagcggactgctgaggaagaagaactcgctgcattacaggctgagatggccctctaaggtctcttctatctataatcaaagcaaaatcaatcaatttgcttacagactatggatttgtaatttaactagttttgcaattggcttggtttaactgcaggttattcacctctccgagcagagacatgtatgcattgatagacacgaacagacgatgtatataaggatctgaatcagattaattcggagcgaaaaacttttataatccccgtcgttaatgttatctgcaatttgagtgttcttcacataatttatcttttgtaatttttgtatctttttatgacactttttcctttggttaataatcactttactcctatgttcatcactttcgcctgataagactactcatgaatagtcaaccatatacgttgacttcgctgctttaacaacatcatgccgttttggtac

SEQ ID NO: 20806 - DNA, 479 bp, Arabidopsis thaliana
tgacacaatattaaaatttaatattactaaaaacttttctagttaatataattttatatacattaaagtctaaagatagctgcgtatatatgtgtattggtcagtgttatgtataggttacctgaatatttttgccgactgagactggaaaagattcggcgaagacaatttcgccgagagcagcaggacggaggtggtgaatagagagatggattccagcgacgcgtttaaaaccagaggcgattccggcgccgagactggcgagtgcctcagcgatcagagccgatacgccgccgtgcaagactttgaacggctggcaacatttttcagttagggtgaggtggccggagactctggtggcggagagctcatcgaatacaaatcctaagattttaagcggctgatcaatgataaattccggcgattttggatccatttcttaggttttaacgatcgatcaaaccaactgtttttttttg

SEQ ID NO: 20807 - DNA, 569 bp, Arabidopsis thaliana
tattccgaaactgtagacgtcgctcttctcgtttaaccaatttgttaggtaatatctgcaagaagttgaagtttatggaacttaatgaaggaaaaaaacaagttcaagttacattatgtagctgtctatgaattagagaacttactcaggatcaagatatccgggtgttcctgcaacaaccgttgccacttgagtttcagctccgacagaaaacgatcttgaaagtccaaaatccgcgagtttgcttcgaaacgattatctaatagtatgttcgtacttttgacatctctatgaaccattggtggctcacacccaacatgcaaatactctaaacctattgttaaaaaattgtatccatgttgagtgagtgattatagcaaagttggtaggccaaaaagggattggaagatatatgaagttgaagaactttataatgtcatcacaatgttataaaaaggtgactggaaatgttaaagttagcaagattaaaccttgtgccgcctcgatagcaattttgagtctactagcccatttcaaagtaggtccagaagattctcctgtaaataaaa

SEQ ID NO: 20808 - DNA, 720 bp, Arabidopsis thaliana
ttctcctttggtaatgactcactcagctccgcctcctctgaaaccctaacttacgctgtaaattctcttagtggtcgaaactccgatttgagttgattctttctctaatgctttggagttgaaacggcgtttgcgtctctatcaacgaaaatgaaacgatggtatgtttttatgaacaattgttttctctctgaatcctatcaactgttctagggttctcttaaattgttagttccaaaccaattgattcatgttttttttgggtatttgaaagtttgagaaatggaaatggtgtgaatgaagacaggatcagtgacttgcccgaagctctgcttctgcagatattgtctatgcttccagtaaaagatgttgttaccactagtgttttgtctaaaccatggaggtctctctggaagttggtacctacactcaagtttgattatgaaaacaatcaaagtgaagatgagacatactcagagattgtttgcaggcttttgctttccaataaagctccttttcttgagagtttgcatctcggattcaggtttggcgaatgtcgttcggtggaagttggaatgtggattggaattgcatacgcacgccatgtgcgtgactttggtactccatgttgaatctgtgaaagggtctttcatatttcctacaggcttgtataactgtgaacactagagagcttgcactgaggagttgggactcgttgat

SEQ ID NO: 20809 - DNA, 835 bp, Arabidopsis thaliana
tagaggtattcgaaggtaaaaatgaaaataagtggatatctataagtgaggttgaagaaaaagatggaactctttgggttggatcggtgaatactcctttcgctggcatgtataaaatctaaaattgagtaatacaaatatgtttttccaacaatatgattcatatatagataattagacgatacatcccccctccccctattcttattttttaggataacaactaataagtccgtttagtaccactttatattgtgctaggtagctacatgcatgccttttgataatttaaactgtgaacaaaatattaatattaaaacagttattatttataacatccacgagaaaaacacctcataaccaaaaaccattaatgaacctttggtttctttctattgagctctctctaggtatcttacttaggcaccatgcttcttttatttatacatacatacggtaattgaccactgcatgcatacaaacatatagagtttgtgttacatgcgaaatcatggcttagcttcttccttctgaggctcaacagtttttacaacttcgttggcctcggcttgactgcggcaacagtatatgcacagtccattccaccagtacccaccgcaacatccgaacctacaaccaccaccaggcaagccttgctggggctctacaacagcgtcattgacctcgacttcggcttctatagcatcagttgcttcagtactcggcttcacttcttctttaactgcacgtgtgatatacatgttatacaccatggatcaaatatttaatcatctgttaccaaaaaaataaaaatttaatcatgcgaaagtgtgaa

SEQ ID NO: 20810 - DNA, 778 bp, Arabidopsis thaliana
agctcgaattcgtaataacttaagtacttttaatttcttgaattatgccgctcatgatatgaaaatgatacaaggtgacgaatcaaatatttcaattgaaggtttccctcaaaagtgacaagctttgccttcactattgaggaaattaacagttccacgtcaattttgcaccttctctgtttctacttctctcttagttttttgtcattttcttgttgcgataaccaaagctacaagctgatccaaccgaaaatcaaaaggagaagaaaagaagcggtatttctagtcgattctccgatagccatagccgcgtaataagaattcgctaatgacgcttcttctatcggttgttgtatctctgtactcgagtcagttccagaaccagattcacctcctgtctcttcaggaggtggttctttcgaagacttcaaactgtttcacacaatacaaatacataatcaaagctttgatctttataaaccaaactctgtctttctttaactgttttaactaaatctaccttgacaatttgggacaaaaagtgatggtgtaatcagcaccactacaagtgaaagtacttgtggcatcatcatacgcgtaactgtacgatttaggacaagctgacttaaaaacttgtgagtacatcgacggcttgcagctatctggtgaaccgtatgcgccactgcagcaatattccggtcttccaaacgcctcacacgcacttctacaagccaaactcctcttggctttgagctccgttgggcaattctggtttaag

SEQ ID NO: 20811 - DNA, 968 bp, Arabidopsis thaliana
attcatccttcattttcttctccgaagaattcggaatttcctcaacactactttcgtgtgtatgacggccatgttgttcccacgtacgactccgttaccatgcattcttacgttttccgaaattctatgttttcagttttagctgatacgaaatcttttttttttccttaggttgcagcaaggtgtagagagaggcttcacaagctggtgcaagaagaactaagttcagatatggaagatgaagaagaatggaaaacgacgatggagcgtagcttcacacgcatggataaggaagttgtatcgtggggtgattccgtcgtgactgcaaattgcaagtgtgatctacaaacaccggcttgtgattccgtcggatcaaccgctgttgtctcagtcattacgccagataagatcgttgtcgccaattgtggcgattccagagcagttctctgccgcaatgggaaaccagtccctttatcaaccgatcacaaggtcagttccgttcaaaacatgttcagtttcatttaagcaatgattggatttgtggattaacttggagattgtgttctttgtaatgaaacacagcctgatcggccagacgaattggatcgaatcgaaggagctggtggacgagtcatatattgggactgtccaagagttctcggagtcttagcaatgtcacgagcaataggagacaactatttgaaaccttacgtgagttgcgagccggagtaaccataacggacaggagagacgatgactgcctcatactagctagtgatggtttatgggatgttgtgtcaaacgagaccgcctgctctgtagcgcgtatgtgtctccgtggtggtgggagaagacaagataatgaggatccggcgatttcggacaaggcttgtacggaagcgtcagtattgctaacaaagctggcgttggcaaggaacagtagtgcaacgtcagtgtcgttgtgattg

SEQ ID NO: 20812 - DNA, 545 bp, Arabidopsis thaliana
  unsure (1)..(545): unsure at all n locations
agataaaaaacttttggaacacacatctaaagaagaaattgatccagatggggatcgatcctgtgactcatcagccaagaaccgacctcttcgcaagtttacctcagctcatagccttggcaaatctaaaagacctaatcgaacaaacatcacaattctcatccatgcaaggcgaagagctccaactagccaatctacaatatctccaacgtatgtttaattcttcggcttcattaaccaacaacaacggcaacaattttagcccgagtagtattctcgatatcgatcagcaccatgccatgaacctcttaaactccatggtctcttggaacaaagatcaaaaccccgcattttgatccggttcttgaactcgaggctaacgatcaaaatcaagatttatttccactagggtttatcattgatcaacccacccaaccactccaacaacaacaataccatttaaacaatagtcctagtgagctacatcgcaaggtgcccacttcttgatcatgtcctttcagtctcanacacctttgaatagtgag

SEQ ID NO: 20813 - DNA, 741 bp, Arabidopsis thaliana columbia
tcttgttcagattttggtaaaccatcaggaatatgaatgtgcaaattcattcctttctctctatctgattcttctcctacatgtaaaccattcttggttttgttatctttctccattgaagcaactccatgtaaacacccgattaacgatttcaaaccacctgtttgcaaaatcaaattctcaacttcaacctttggcttctctctctgcaatcacataaccaaatctagtcactatcactaaattctttggattctcaaattgaaaaaaaaaactatagaattacttacttcgagatctttgagttcaaagtaagctctccagcaactgtaagagtcatcaccttcaagcgtcgaacagtaatctgaaatcaaaatcaaacatgattcgttgatactcttatctgaatcagtgttcgtctatgtataggaagtgaatgaaattgttgtacctgagagttcggattcggctttttcaataagtggcggatcttgaagaatccggtcgaattttccgcggctgaagagttcaagcttaggtacgtctctggtgcttgaacaacgaaccaccgggaaggatctcgccaggaaacaaggccgtgagacgaatttggtgtcgttaaactcaattgggagatgaacgaacgaagagtcctgattttatcactctagtgaagatattttcaaactcttaagcagaaaaattgagttatatataatacttggaactaggatgatgagt

SEQ ID NO: 20814 - DNA, 437 bp, Arabidopsis thaliana columbia
cttcacacgctcagggtagctgacttttctagctaccaccaggaacaaaatcagaatgaaacaacaatcaagaaccatcatatcaatcaatttcttccgaccagatacatcaccattataaagactctcggaataggactctcttatatcttcttccaactctgacactgcttctatcaaatccttcatatccacacccttcttttgagcttcatccatgaagatcccgagaaatcgatgtttgtgctcttgaatcatttggagatgttcttttccatgatggtatggaccgattgagagaacccttggttcgtaagcgtccttgtagttgttgttccggagtctctgatggattctaaagatgcaacacttttctccaccggctgatttcttgagaagcttcgggaccgaccctcctgaaattaaatcatgagatt

SEQ ID NO: 20815 - DNA, 544 bp, Arabidopsis thaliana
cgtttttgtcaatttatctcgcagtcgctttatcttcgaaagcatatgtgcacttctaacgaaatacaactccgcatttgagagcattgcatccacgtcgtgtttaaacgattcaatacttctgtagtactgattctctagtctttcgtgaatcagctcagggtataatggaaccgggaacctgcgattttaaaccagagttacacaatgcatgaatcattactgccagataagaaaatccacaagtttgatcatatgagttatttaaataagcaccgactcaactatcgtttctgcttctcaagtataccacatgggttttcatgttcgagtttataggactagggaggttttgaaagaatcaattgcagagagctaagtgttgtgaagtatcgtacctattgcagaaatccatcttttgagctgcttcgtttagcttttggatccgtaactatcctgaagaaaatatataacaaaagcaaataacagttacgaggcaagcaaggataacagcaagatgagaaatgatagtttcggggagaga

SEQ ID NO: 20816 - DNA, 486 bp, Arabidopsis thaliana
  unsure (1)..(486): unsure at all n locations
tgtagaacgactcatcggcaccgataccatcccggcctctctagatccaacatacgacgtcgtttcaaaagacgttatatactcaccggagaataacctctccgttcgtctcttcctccctcacaaatcaacaaaactcaccgccggtaacaagctccctctacttatctacatccacggcggcttnggatcatcgagtcacctttctccccactctaccacaattacctcactgaagtagtcaaatccgctaactgcctcgctgtctctgttcagtatcgccgtgcaccggaagatcctgttccggcggcttatgaagatgtatggtccgcgattcagtggatttttgctcattctaatggatctggtcctgtagattggattaacaaacacgccgatttcggtaaagttttcctcggcggagatagcgcagcgggtaacatatcgcatcacatggcgatgaaagctggtaaagagaagaagcta

SEQ ID NO: 20817 - DNA, 831 bp, Arabidopsis thaliana
caattcgattcttttcttctttccaaaatgttataattagcttcattctttaaacgatttcttgtgtaaatctttgttctttttgacacaacacacaaaattctcagagcagaatatcagatatagttcacagcaacataggagttgttcgttctttgggttgttatatattgcaatctggatgcagtttattatgatgtatcagtagagaagagagaaaaagattgtgttggagggaaagagatgaaatatgacacgtggagggcgtcgattggtggagtatggatagaagcatatccaagttagatggcttgtgttggttcgaacagattttttatccaccacatatttatgtttgatccaaaagccaacacaagcaaagaaattaaaagtgttcttgttgctgtagaacacaaacagaacaaacaaaaaatcaattgaagagtctctcagtcgttaggggaagcaaatagagaaatggctagctttactgcctccgcttccaccgtctccgccgctcgtccggctctccttctcaagcctaccgtcgccatctctgctcctgttcttggtaaaaaagccttccttgatctttctcagatctcatcttttagtagaaattcattctggttatgtgcaaagtgaagaagatctttgtttgcttatatttgttgagtggttttgaaaacatgtatagagataagtctagtttggtggtgaatcacaagaagtcaagaaacaattttgatctaaaggtttgattgtagtcagaccaaacattaataatagaagtattgtgtaaatgagagtgtgattttagaccaactttag

SEQ ID NO: 20818 - DNA, 561 bp, Arabidopsis thaliana
cccgtcagagaagagaaaatggctaatgagtcttggttacagagtctggggagtgatgggtgaccaatggagtagctttgcaggctgtcctcttcccaggagaaccttcaagctccctaactccatctactatgtcgcctgatcaaaaccaaacacaaaactttgatttagcttcaaacaaaaagaagaatccacgaataagagagagctgttttgaatctgtgtcttgtatattttcccctttttcgtgtcatattatattgagagacttatgcatccaaaagaacaaacaaatggttatatgtaacagagagaaatcaaatcaaaatcacacattatcaaccaaaggtttacagtaccaactaagcaagtgtggaatgagtacatcaccattaatcgtctatgttgtcaaagctttctccagtcttgcctcaaatgagtgtgaatgccaatttacgctcttatcgtgcacttccagaaaaactgtgattgtcggggaaaaggacacctgattgactattgcactcgaggtagttgggtctgaaagcgtgatgaaacaat

SEQ ID NO: 20819 - DNA, 2200 bp, Arabidopsis thaliana
atataacaaaagcccaaaatcaatttcacaaaggcccaaaatggaatacagaaggaaaaaaaacacaaagatgatcatggttcatgcatggatcataagcatttgaattggttatataaaccagaaatgaaaagagggagagagaaaaaaaagactcaagaatcagaatgaaactctgatcttattgttttgttagtaaataagatttaatcaggcgacatagtagatggagttagggagcttgaaggttctcttgggaactggacaaccagagaagctgttccattgtgcacccatcactccccaaactctgtacccaagacttgtaagccatgtcctcaaatctgctttgtattggctcacactcttcttttcatcatcttctcccctgcataggtttgatacttttgttatacttggctcattatgttataccaaaatgctcgaattatattgattgctcatagatttatatggaccaatgcatgtaacataatcataacccgagttcaaactcgataagaactagctagatatgataaagaattccactattttgtccccaaattagacataaatacctattaatgttttaaatatgatttcacaaccaactctttaattactatcttttctttctttactaaactaaacaaattaatgacacaaccataaatgctgaaaacatcttaaagtctccaaaaccttaaataacttacctaaaagaaactcaaatagctaatgtttgttttaaatagataaatttggtttttagggtttttatttcgattatggtctatagttctttgtgtttagagaataaatgaagtcaacagaacgacaaaatttatctgaagtgttctagttttactttttgatttggtgaaattagaatttaaatttcggtttaatgcggttattaaatatgattcgaacctcagaaggaggttagaccagctgtggtaaccggcttcaataagattttcgacggtggcagatctgagatactctttacgagaagagatcaaaaagatcttgaaacctctctctctgatctcatggtacaacttcaccatgtgtggaaccgctggtgccttgcccgaattttgccattcctcgaacttggtcgtgttcagttgctcaccactgtttcaaatcaatgtaacatgtcaatcccggtttcattctaaaccgaattaaagctaaccagaaaacaaatgaaatgattagaggtagacatttaaacccatctaaaccaaaattcaagccaatttttttttatgtgacataatcatttttttttgttcaaatataattcggatctttaatatccataaatcaaaccaaaaaccgaatcaaggctaatgtatatggttaagtttagtttatttacccgaaacaaccgttgctcttgtggtaaggaatggttgagagaagagtgtcatcaatgtcaaagatccaagcatccatgccatcgcatgtcttcttctcgcaacaagtttttccgaggtagaggatggcttcatcgacggctctctccacgtcatcttcgtattgagatgaggtcatgtacttttggacgaaccatacacattcctgtggaaccaccttaaagtcccttatgttgttaagctccacgttgactctccagctctcacagtatccgtttaggttgggagctttcaaagatgtgacgccggtttggctagtcttcgtggtggttgtggttcctttgagctggctcaggatgttccagtcacgagctgagacaattccggcgaagaggaatgtgagggttagcgagagcaacaaggatctagccatgttgagtttattagtggtgttgggatctgatctctaatatggttgtgtttatatagagtatgtcgaagtgcaagtcaacaaaatacaaaaaaaaatgaagtttattagatttactactggatgggtttagttctagtactactaactatagcatcacatgtatgggttaattttttttaggaagatttttttgatattgttaattaacaaatcaccttaaataatttgtgaaatgtcaacaaaaacacaaagtaaggtttaaaatattttctccaaaatactagttttgtttcttacatttaaagatagaatgtcattagacattgatattgttatacatatgttgtcatcaatttttttcttttgttaaagatgg

SEQ ID NO: 20820 - DNA, 1020 bp, Arabidopsis thaliana
ctaaagatttgctttacatctcccgtaaacacttttctgcgatacaatgcctttacgttatgtaacggagagttcggcatgtcacaccccgcgttaacgcaactgcgtgcgctgcgctattgtaaagagatccctgccctggatccgcaactgctcgactggctgttgctggaggattccatgacaaaacgttttgaacagcagggaaaaacggtaagcgtgacgatgatccgcgaagggtttgtcgagcagaatgaaatccccgaagaactgccgctgctgccgaaagagtctcgttactggttacgtgaaattttgttatgtgccgatggtgaaccgtggcttgccggtcgtaccgtcgttcctgtgtcaacgttaagcgggccggagctggcgttacaaaaattgggtaaaacgccgttaggacgctatctgttcacatcatcgacattaacccgggactttattgagataggccgtgatgccgggctgtgggggcgacgttcccgcctgcgattaagcggtaaaccgctgttgctaacagaactgtttttaccggcgtcaccgttgtactaagaggaaaaaaatatggagtggagtctgacgcagaataagctgctggcgtttcatcgcttaatgcgtacggataagccaattggcgcgttactgctgctctggccaacattatgggcgttgtgggtggcgacaccgggcgttccccagctctggatcctggcggtgtttgtcgcgggtgtctggctgatgcgcgctgccggatgtgtggtgaatgattatgctgaccgcaagtttgatggtcatgttaagcgcacggcgaaccgaccacttcccagcggcgcggtaacagagaaagaggcgcgcgccgtgtttgtcgtgctggtactgatttcgtttttactggtgctgacgctgaatacgatgaccattctgttgtcgattgccgcgctaccttggcagtgggtgtacccgtttatgaagcggtatcccatctacgcaagtggt

SEQ ID NO: 20821 - DNA, 622 bp, Arabidopsis thaliana
gtaaagcagtacctctttctacagatcataaggtcagtctttatctctttctaactctttcttgatttgtttgatttagtggattttaactcttgtttacgtttgaaaatgaacagcctgatcgtccggatgagctggatcgaatccaagaagcaggaggacgagtgatatactgggacggtgcaagagtcttaggcgttttagccatgtcacgagccataggagacaattatttaaaaccgtacgtcacttcggagccggaagtgacggttacggatcggactgaggaagatgagtttctgattctagcgacggacgggctatgggacgtagtgacgaacgaggcagcgtgtacgatggtgcgcatgtgtctcaacagaaaaagtggtcgtggaagacggcgaggagaaacacagactccggggaggaggagtgaagaagaagggaaagaagaagaggagaaggtggtggggtcaagaaagaacgggaagagaggagagatcacggacaaagcatgtacggaggcgtcagtattgctgacgaagctggcgttggcaaacacacagtagtgacaacgtaagcgtcgtcgttattgatctacagaagaagaagaaagagacac

SEQ ID NO: 20822 - DNA, 534 bp, Arabidopsis thaliana columbia
agttgatctttaccgtactttaactgtaattaaatcgcacgtttttattcagtagcgaatataaaaaaatatttagaaaaaatgataaaataataaaagaatatggtggtttacatatctatatatccacataattaaatatataaagagaatttgtcagcaactaaaaagattaaggaaaaatatgagatcaagccacgtgggctgatgttgcggctgcgagaagccaatgcaaaagatcaataaggcgaaacgcgatcaccgtggaggaaacgggaacgctgacgaggaggaaaagcagcgtcgcgattgctacagtgggtcgagagttcatgaggaagctctgaagaagaccaacggagtcgcagataacagagtcgtagctgttgtaaaaacgtttctcccaatccatccagtgagaaggaggcttgtagttacgctcgaccatcttcatctcgtggatacgtttcctaagaacgatcatgttctcgtccaccaatcttcctcctccatagtaatgatcttttcctgatg

SEQ ID NO: 20823 - DNA, 1155 bp, Arabidopsis thaliana
caggctcaagttggatcttcggtaattatgttttggccttaagagtctgttgtgtataatagatactctctttatgatgggaatataagagctttcttaataatggtgtaggtgtttgatcttccggttagtgtttataagggatactctttgcctaaagacactgaggaatatctctcttctgttgggttgaagaaaccactatatagtttaagagcttcagatttgaaagatgatatgtttggtgctcttacaccatgtcttttccaggtaagatcataaaatggccttcactgtatttctcttctctcctatgatgcattcttggagaatatctgcatctgccatgatttgtgatgtgggattttaaactgaaatagtaactatctctctttaaatttcttcactaggagccagctccttgtacagtcaaagtatctgaagatgagactacctcagagacgaagtcaaaagatgacaaaaaagtaagctataagaacaagtttctttggaatcttattgagttgcttagctgaattttaatgattatgagacaaagcgattaagctcgttgcttaagtattcatttttcgcaggatcaacttccttcagcttctatatcttatgatcctttggaaaagctttcaaaggtggagccatctgcttatatatcagacgtgagttgtgattatgtttgtatataccgttactcatgtttcaatggactggatgcaaaattttgtgctcaagttggtctgtttctcttatctcctcatgtgttaggaaacttgctttatcgagtttgacggtgcatcaaagggaaatcccggtctctccggcgcagcagcggtactgaaaactgaggacgggagcttggtatgtatccttttgaatcactgttactaattaaagaatgcagtgatgtatctaagtatcaattttcaacatagatttgtagagtgcgtcaaggtttgggaattgccacaaacaatgcagcagaataccatgcgttaatcctaggattgaagtatgctattgagaaaggttacaagaatattaaagtgaaaggtgactccaagctggtctgtatgcaggttcgtcaattaaaacgttatatatttttgtgcaactaggtaagtttaatgaatcatatac

SEQ ID NO: 20824 - DNA, 507 bp, Arabidopsis thaliana
ctctagaggattgtgctctaaagctgattaataaagtgattctggtgccgctggcgctgatcatcagtgcgtttatcccgtgggcgattacgctctgttgatgattggtggcgcgtttctctgctttgaaggagtagagaaagtgctgcatatgctggaggcgcgtaaacataaagaagatccggcgcagagcagcagcgtctggagaagctggcggcgcaggatccgctgaagtttgaaaaggacaaaataaaaggggcgattcgtaccgattttatattgtctgcggaaatcgtcgccatcacgctggggattgtggccgaagcgccgttgcttaatcaggtgctggtgctttcaggcatcgcgctggtagtgaccgtgggcgtctacggtctggtaggggttatcgttaagattgatgacctggggtattggctggcggaaaaatccagcgcgctgatgcaggcattaggtaaagggttattgattatcgcgccctggctgatg

SEQ ID NO: 20825 - DNA, 921 bp, Arabidopsis thaliana
ctgagtttgggcttgacaagataatggtacaggcagtagcagatgagattgtctcgcaggcgaaatccgacgggtacaaagcacctgaactccacaagatgaagaaatgcaatccaaggagtgatgtttacgcctttgggatccttctcttggagatattgatgggtaagaaaccaggaaagagtggaaggaacggtaatgagtttgtggacttgccttctttggttaaagctgcggtgttggaagagacgacaatggaggttttcgacttggaggcaatgaaagggattaggagcccaatggaagaaggtttggttcatgcattgaagctagcgatgggatgttgtgctcctgttacaacagttagacccagcatggaagaggttgtgaagcagttggaagagaacagaccgaggaatagatccgcattgtacagcccaaccgaaaccaggagcgacgccgaaactccattttgagtctaattgtgttcttctacaagctttttttttcttctgtaattcctcactttagttggctatatttgtttccttggcaagaaaccattctgatttgattttatctatatttgttgatgagaaatggtgtaagtgtaacagaagcagttcaaagtattaatattgatagaagaatatatgatacatgatgatacaccaaatgagtaatgaggcagaagaagaatgcactgtactacaattttggagttgagtcgaacaacactgcggctcatcaaagctggcctaggttgacgagtggaggcagagaagagtctaaaatggtaaaagagaaaagaaaggagacgatgaaaatgtaaatgacggggacgaagaaaacaagttagttttcttcctttgtctcctcagctagtcagtatctcttcggtcttgggtttgaggattatca

SEQ ID NO: 20826 - DNA, 572 bp, Arabidopsis thaliana
ttttgatcttatgtttgcagagcactacttgcatgattgtaacgtggccatctactttattaattgctggggtgttatactattttcgtatacgcggtactagacaagtagaaaaagaaaaaagaattccaactttttcttgtgtttgttcttttggaaaaggatgtgacttcatacttggactctttaagtcgaaacaaattttatttaaattccatacttaggatgcataaaaaccacaacacacattcactaaggctctctcgcattattaggggaaaaaaaaaaacaaagacaaaaacagaacacagcttagcaacaagagaacaacaagattattcaaatcagagattgttcttcctatactcagcagcatatgcaacaatcttctcagagtcagggagagacttagacacactctctttctccatgcaccgctttgcccaagcgatcagtttcggactctctgactcgatgctaaagttccaaacttctcataggcttggaaccaactcgagaatgtaatcaaggaaatgtctacatcccaaagctatctcaccaaagtaaggttt

SEQ ID NO: 20827 - DNA, 557 bp, Arabidopsis thaliana
ccagtgtgctctaaagggctccggtaagatcggcaaacgggtttttcgggataaaggacaagaccagctgcggaacctacagatcagagactttaccaacatagttactttcaatggcgttcagacgtgcagtttctgcaccaccctgaaccagaccttcagccgtcaaaccaaacaggttggtgaccagcacaccgaccagcgccgcaatcagcgtggtatacaaaagcgtaccgatggtcagaaaactgattttgcctaactgagatgcgttatgcagacgggcaaccgcgctcagaatagaggcgaagactaacggcataacgatcatttgcagcagttgaacatagccgttaccaacgatgttaaaccactgtacagaatctttaagtacctggctgtcagaaccactaaatggtatgcagggcaaggccaaaaaccacacccatcaccagacccaccagcacttttttcgccagactccactgtttatggcgggtctgagccagcgcgaacagcagtaccacgaacaccacgatgttcgccattatatggaa

SEQ ID NO: 20828 - DNA, 610 bp, Arabidopsis thaliana
aagtgaagtgcatagagcagagcagagatctccttctctttagccgtctctccatcaatttctccagcttcctgcctgtttgaaacttcttctactacttctctatggatggattcgaacattgactcttcaactccaagacccttcaagatcgtcttcaacacacatatcttcccatcaagtccctccttagattcattgctatgcatagatacccaaatcctcggggcataagcattcctcacatcataatcattgaagatctgctggcataatgctgtcttcccaacaccgtattctccgacaaccacaagactcttgaacagcttgtaagagttttgatccaacaagaagtgttgcaatgatttgatctcattctcgaaaccatagatatcatgacctggaagtccagaatcagtttccacacgatcctccaccatgttttgtttcgtcaccagttgtccctagccattcgttgtatctatcagcgaaccgatttgtgaagtaactctggctacacttgttaaccgcgcgatgaatctcgttgagtcatttccaagcaaaagctggaacaacaaaaagatttgcaggtgaaatcaaactaagtttt

SEQ ID NO: 20829 - DNA, 443 bp, Arabidopsis thaliana
cccggtgtctcggtaggcttctaatatgacctttgaggaatggataaagatgaagaatcacccaaaaggcgaaaaataccttcccaaacaaaggtccccaagcttcataacctttgttaagagcgtcagagaatccagcaacaactccgaccaagttgattataagaagtgacgtcggagggatcaagagagttgtccatttgacaatgtaaagctcaccgaattctaaatcatctgcggttttcgatgtgactgtgaaatttgtgtcgagaccagcgagcattttgaggaatccttggaaaacggcaaagagatgagctgagacacctccaataacccaaaactggttcgttctccataaggcttcgatactgactccgctccatcgaagctcgaggacactcgtttaagatgattgatataaagggccctagaacagcatg

SEQ ID NO: 20830 - DNA, 904 bp, Arabidopsis thaliana
catctcagggaagagcaacaatggaagtcacctatccaatctcgcagcaggtttatgccgtagattctctttaccagaaatcaaacacggaacacaaaacttcgatgattccaacgtcattggagttggagggtttggtaaagtctacaaaggagttatagacggcacaactaaagtagcggtaaaaaaatcaaacccaaattcagaacaaggactcaacgaattcgagacagaaatcgaactcctctcaagactaagacacaaacacttagtctccttgataggatactgcgacgagggaggagaaatgtgtctcgtatacgattacatggcatttggaacactccgtgagcatctatacaacacaaagaaaccacaattaacttggaaacgaaggctagagatagctattggagcagcaagaggattacattaccttcacacaggagcaaagtacacgattatacacagagacgttaaaacaactaacatcctcgtagatgagaactgggtagccaaagtttcagactttgggttatccaaaactggacctaacatgaatggaggccatgtaacaaccgtcgtcaaaggaagcttcggttatttagatcctgaatacttcagaagacaacaactgactgagaaatcagacgtttactcattcggagttgttctgttcgaaatcttatgcgcaagaccagcgttaaacccgagtttgcctaaggaacaagtgagtctcggagactgggcaatgaattgcaaacgaaaagggaatttagaggatataatcgatccgaatctgaaagggaagatcaatgcagagtgtttgaagaaatttgcagacacggcggagaagtgtcttaacgatagtggattagaacggccgacaatgggagatgttttg

SEQ ID NO: 20831 - DNA, 572 bp, Arabidopsis thaliana
gttgcaggttgtttctgaagcagctagggatattataatctggaaagaatttgcaatggaagctactagaagcacaagttatcatgatcttgggataatgcttgtgaagcttcatagcgtaagtgctctctttgctgttaaagttttagagtatttttggtttgattcggctttgtgtaatgttgttcagatgattttgcaacgatacatggatccaatctggcttgagaactcgtttcctttgtgggtacaaaaatgtaacaatgcagtgaatgcagagagtattgaattgctgaatgaggtaatggcttcaccagaggctgatagtgtcattgatgtgtattgtttccttaactgaagccactttatctggttgtgtttaggaatttgacaattgtatcaagtggaatgaagtcaaatcactttctgagtctccaatgcaaccaatgttgttgtcagaatggaaaacgtggaagcatgacattgcaaaatggttctctatatctcgccgtggtgttggcgaaatagcacagcaggatagtaaaagtgtgtttactcagatgtcaggctag

SEQ ID NO: 20832 - DNA, 507 bp, Arabidopsis thaliana
gaaagagattttgagttgaggaaaaatgagtaaagaagagttcatgaagatccaggtttcttcaccattccttctctgttttctttttaaaatgaaagttttctgttgacttaatctgagaatattttatttgtagacttgtgttcttaaagtgaacatacactgtgatggctgtaacagaaagtcaagaaaatcttgcagaaaatcgaaggtagaggagacaaaaatctgttttgactttttaaagtctcgaatcaaagtttttttcagtttgttgactaaaagtcttgaaactcatttttgtgttttgtctgaaaccaaaccaaaaactcaggtgttttcacgaccaagattgactcagagcaagggaaagtgactgtctctgggagcgtagatccttcagttctcatcaagaagctcgccaaatctggtaaacatgctgaaatctggggagctcaaagggtacaacaatcccaatcagtccaaatggccaatcagtttaaggga

SEQ ID NO: 20833 - DNA, 516 bp, Arabidopsis thaliana
cgactctagaagctagcattgttggttgcgttccctttgtggacgctgctgcctccctcggtcttggctccatcagcaaacagtttgctttttaaatgcatgccaatctgctgctcctccttactatattcgccaacataatagtgctccgtagcgtcgaccgaatcgttggaaggagggaagaacatgcttccccactgaggaaagtggattaaggtaacaggcaacgtgcaagcaactatcatcactcccatccacgttagcccttcttcagttgtgaagcgcgaagtcgagaaaaagacgagctgtgtgagtcctgacccaaagttccctccagccccggttaaacccgagataatgcctagagctcgccgggagacaaagggcacgatagcaaaggtggctccgcaagcggcttgtgctcctaaagagaagaggaccatagatacaacggcagtgacgagggtgttggcacgtccgagccacacacaaaagagaccaccggacgtctgaatg

SEQ ID NO: 20834 - DNA, 516 bp, Arabidopsis thaliana
cgcaataagcaaccttgtcaatctaacaactctcaagctccacaacaatgactttcagtttggcgtccctccagaacttgtccattgccgatctctactctccatcgacctctcatccaaccgcctcaacgagtctctgcctgtcggttttggttcagctttcccactactaaaaagcttgaacctttcacgaaatctgtttcagggttcattgataggagtcttgcatgaaaacgtggaaacagttgatctcagtgaaaaccgatttgatgggcatatcttgcagttaatacccggccacaaacacaactggtctagtctgattcatcttgacttgtccgataatagctttgtcggccatatattcaatggtttgagttcagctcacaagctgggacaccttaacctcgcgtgcaatcgattcagggcacaagagttcccagaaatcggcaagctttctgcgctacattatctgaatctatcaaggaccaatctcactaatatcattccgcgtga

SEQ ID NO: 20835 - DNA, 687 bp, Arabidopsis thaliana
atataatcaaaacatttcaaggcaataagcaaaaggtttgcttagcaaatgaaagatagatagtaatgttatgcaagcattgataacatttgcatttttttttttcactgtgtgacatattcttatatgcgatcatccttcaccattccaccgtgggtggaatgtatgatcaaacattgttgggtgtgttctcaggcggcgtagcagcagagcggacgcggcgtccaccctctgacttggcgttctcggcaaaccggaggcttccttgatgcatgttcttctgcttctcctgctcattccactcagaaccataataatgagcctctgtacctttcactggatctgtggaaggaggcaagaacatgcttccccattgaggaaagtgaactaaggtcacaggtaacgtgcaagcgactatcatcactcccatccacgttagcccttgttcagttgtgaagtgtgaggtcgagaagaagaggagttgtgtgagccctgatccaaagttccctccagccccggttaaacccgagatgatgcctagagctcgccgggagacaaagggcacaattgcaaaggtggctccgcaagcagcttgtgccccatagagaagagcacatagccacaacggcagttacaagggtgttggcgcggcgagcacacacagaagaggccacagcgtctgtatga

SEQ ID NO: 20836 - DNA, 645 bp, Arabidopsis thaliana
  unsure (1)..(645): unsure at all n locations
nnnnnnnnnnnnnnnnnnnnctaaagaagatggcaggactgaaattacaggcagtaaccaaaagctgggatggtaaaacccaggtcattaaaccgctgacccttgatgtggcggatggcgaatttatcgtgatggtcgggccgtctggctgcgggaaatcgacgctgctgcgcatggttgccgggctggagcgggtgacagaaggcgatatctggatcaacgaccagcgcgtgactgaaatggagccaaaagatcgcgggattgcgatggtgttccagaactacgcgctttatccgcatatgagtgtcgaagaaaacatggcgtgggggctgaaaattcgcggcatgggcaagcagcaaattgccgagcgcgttaaagaagcggcgcgcattctggagctggacggtctgctcaaacgtcgcccgcgcgacgtttccggcggtcacgccacgtngtggcgatgggcccgcgattgtgccgatccggcggtgtcctgtttgatgaccgctctctaactcgatgccaactcgcgtgcagatgcgtcttgaactcaacagttcacccgcgcctgaaacgacttactctacgttancacgataggttgaacgatgacgctcgccacgagtaatggtgatgacggcggtg

SEQ ID NO: 20837 - DNA, 1153 bp, Arabidopsis thaliana
attattggatccatttcttcattgtctagatgtcgcaaacaaattttaaactaaatcctaatttttctaattttgtgccaatagggatatggggccgtatagaaggatctattgaggcccaaacccatactgacgagcccaaaggttcgttttgcgttttatgtttcggttcgatgccaacgccacattctgagctaggcaaaaaacaaacgtgtctttgaatagactcctctcgttaacacatgcagcggctgcatggtgacgccattaacacgtggcctacaattgcatgatgtctccattgacacgtgacttctcgtctcctttcttaatatatctaacaaacactcctacctcttccaaaatatatacacatctttttgatcaatctctcattcaaaatctcattctctctagtaaacaagaacaaaaaaatggcggatacagctagaggaacccatcacgatatcatcggcagagaccagtacccgatgatgggccgagaccgagaccagtaccagatgtccggacgaggatctgactactccaagtctaggcagattgctaaagctgcaactgctgtcacagctggtggttccctccttgttctctccagccttacccttgttggaactgtcatagctttgactgttgcaacacctctgctcgttatcttcagcccaatccttgtcccggctctcatcacagttgcactcctcatcaccggttttctttcctctggagggtttggcattgccgctataaccgttttctcttggatttacaagtaagcacacatttatcatcttacttcataattttgtgcaatatgtgcatgcatgtgttgagccagtagctttggatcaatttttttggtcgaataacaaatgtaacaataagaaattgcaaattctagggaacatttggttaactaaatacgaaatttgacctagctagcttgaatgtgtctgtgtatatcatctatataggtaaaatgcttggtatgatacctattgattgtgaataggtacgcaacgggagagcacccacagggatcagacaagttggacagtgcaaggatgaagttgggaacaaactcaggatctgaaagcagactcagtactcggcagcacatctggtggggacatgacgt

SEQ ID NO: 20838 - DNA, 707 bp, Arabidopsis thaliana
gaagaaattctctactttgagaaatcagtcctcaggatcggtggtttatggttagtcactctgttccaccattcccactatagaccttatttgtttccttcaggctttcttgtgacccaacaacaattatatgttatcgcaaatttgctatgatcgtagcccaaggccaaaactgaagtgtctcgttatgctgtctcaaagtgatggttctatttgccccaaaaacaaaacaaaaaaacaacgagacacacattatgatttctagaaaaagacttataattaaaaccatattttttttttaattcagcagttgacattttgtaacaaagtttaatgtttcaatgggacatcaagtatcacttggtcaggatactcctttgcatttcctttaggattatcttcaaaccgtcggagactaaactgtttcatctcaactcctccacctccggcctccacctccatcgccatatccgccagtatcctccccaccgccggcgccatcttaaaaccatgaccggaaaacccgccgcctaccaccacatctctcccaaactcccctccaagaaaatcaatcacgaaatcctcgtccggtgtcatcgaatacatacaaagctgagtcgccacgggtccttcggaatcaaccatccctccaaatctctcctttatccactctttaagctcctctaacttcactcctggcccccatg

SEQ ID NO: 20839 - DNA, 993 bp, Arabidopsis thaliana
ttttagtctgtcctgacattgcaaaaccattactgtctgtgtccaaacttactagagattacccatgctcctttgaatttgattgtgacggtgtccgtgtacatgataagggaacaaagaggttgctaattctgggaacaagtaaagatggtctttatgtgctgaagaacactcctatccaagccttctattccacaagacaacaagcgacatcagatgaagtatggcatatgaggcttggccatcctaaccctcagattcttcagtacctgtcaaagatcaatgctatcaagatcaataagagctccaagtctatgtgtgaagcgtgtcaacttggaaaaagctcaagattaccattttccctttctacttctgtaaccactaaacctttgcaaaggatccattatgatttgtggggtcctgcacctatagtgtcaggtcagggctttaaatactatgctatcttcattgacaactactcccgtttttgctggttctatccattgaagttaaaatctgatttcttcactgtgttcatcaactttcaagctctagttgagaatcagttttctacaaaaatacaaagctttcagtgtgatggaggaggagagtttaccagtaatcagtttgtcaatcacctacaagcgtcaggaatcaaacaactcatctcttgtccccacacacctcagcaaaacggactagctgaaagaaaacacagacacatcatagagttaggcttatccatgatgtttcaaagcagaatacctcaaaagtattgggttaaagctttcttcacggcaaattttctgagcaatctgcttccctcatctgtcttggatgctcagaaaagtccctatgaagtgttacttggcaatgcacctgattacacttctcttcgcacgtttggttgtgcttgttttccaacctgcgagactaacacaaaacaagtttgatcctagatctttacagtgtgtgttcttggatcaatgaaaa

SEQ ID NO: 20840 - DNA, 851 bp, Arabidopsis thaliana
tcttcagccttcttcctggagaagtcatccttgcatctcttgacggattcagtaagtctacaatatacttaactcgacttcatgcggctatctttaggtaatcatgatcattgaaactgttgattcctgttttgatagataaggtctgtgacgctgttgaagtagctgggaggaatgtaatgtcaacctcttccactgttacaaccgaactcgttgatcacaagtaagtaaaatcgagtatttggaattgaaactcctggttatttggatatggaaagtgttttaagagaaggatgtaaattttggtttgatgaatataggtatggtggtaaagcggctgaggcgacaaacgaagggctcgatgcagcaggatatgcgcttggcacagcctgggttgctttcaaaataagaaaggctattaacccgaagagtgtactcaagccttcgacgcttgcaaaaaccgccattagatctgcagcttcacaaaaaaaagcctagtaaggctgcctgatgaagcaaaacagactcattggtcctgtttgtttgtatcgtcttgttgtcttttgataaataagttaaactaaaaagaggtgtggattagtagttgttgtgaagtgtttatgtttctctatgagaatcatgtaatgcctctgaatttgatcgggatatggtgctgtatgtgtaagtggccaaaccagaatcccttaaaattagttttcatgtttttttaacgtgcaaatagagtgagtgagtgattgtatcatgcataatctctccttccagctaactagcaatgctaaagaaagatcccaaagataaaaagttgaagatgcatttgactgttccaaaag

SEQ ID NO: 20841 - DNA, 801 bp, Arabidopsis thaliana
tagtgagctttgcactttgtgtggtgcagagattgggatcatcgtgttttctcccgcgaaaaagcctttctcattcggacatccaagtgttgaatctgtattggatcgctacgtgtctcgaaacaatatgtccttagctcagtcgcagcaactgcaaggaagccctgcagcgagctgcgaactgaatatgcagttaacgcatattttgagcgaggtagaagaagagaagaagaagggtcaagcgatggaagagatgagaaaagagagtgtgaggcggtcgatgattaattggtgggaaaagccagtagaggagatgaatatggttcagttacaggaaatgaagtatgcattggaggagttgaggaagacggttgtgacaaacatggcgtcgtttaatgaggccaaagacgatgtgtttggtttcttggacaacaaagtgacagtccctccttacgtgaacatgccttctggtccctcaaatatttataattttgccaatggaaatggttgtttctgattcataataatgcttttggtttttgtgttttttggtagcaaataacttgtaggctagtatcttactagctgtattttctttcttcaaattattttttgtttctatagcaccattgagaaaagataaatggattcatgccaacttgtcaagggatcaaatctttattaatgttatcaggttgaactacttgaatggtaaatgcatatatagcttaaagttaagatttacttacaagactcgcatgttagaggtttttttttaacggccgaaaaatcaatgaaggg

SEQ ID NO: 20842 - DNA, 856 bp, Arabidopsis thaliana
cattttaaagaaagctcaagactgtactaaatatactatacacacatataaatatatacgtacaaattcgaattatatgcagatacaaattactagggtatccgaaaaaaaagaaaaatataggtattaggtttatacaaattaacgagccttgaatcatgataaataaaaatacctgagagatattataatggatatacaaaacattatgcagatcggtcaacacgacaagctaaagaaccaaggaaaatatagaaaaaaggacgacgagagatcgatgctttaatttggtgcaaaataaaaatgcacatgtaagttgatgagacgatgcaaatggactcttctgagcttgaaagcccgtgtaaattaggttttaccttttcttcaacctgtggaattatagatatgtgtataggacactatttactcgtttggaaacaaaagaaacgagccgttatattaagaagaagaagaagaagtcaaagaaagatggctgtgtagaagatgatgttcatcgagagagagaactgatattgatcttggttataagtttcggtgaatgtgaagagacagagagagagagagtgagaaattgatgattcgatgacatataaaaggtatagagagtgtggaccgctcaattgcgcgtggctttctccatgtccccatttgcgtacgtcaccctcctcccgcttcttttcacattcttcttcactttttaaaaaaatatatattttagctataatatattttttattaggagtaaaacggagttaaagactttaagatatcaaacttattacttctgagttctgatttttcagattgatgtattatgaatatttgcataattgca

SEQ ID NO: 20843 - DNA, 590 bp, Arabidopsis thaliana
  unsure (1)..(590): unsure at all n locations
nnnnnnnnnnnnnnnnnnnnctaaagcaacccgcaccgagctggcgaaccgctggtttgatttaatggatattaatgcgggcaccatcgctaccggcgaagaaactattgaagaggtgggctggaagttgttccactttattctcgacgtcgccagcgggaagaagaaaaccttctcggatcaatgggggctgcataaccagctggcggtgtttaacccggcaccggtgacctgatttcttttggaacgtccctcgcaaaacatggccttagtgccatgtttttattgtttaaagcccccacgtccattaataatgcatttgcattaccttagttcaagcttataatttgagcagaaaacaggctgtaaaaggacagtgaatcatgcccgctaatgctcgctctcacgctgtactgaccactgaatcaaaggtcacgatacgcggacaaacaactatccccgcgccagtgcgtgaggccttaaaactgaagccaggccaggacagcattcattacgaaattctgcctggtgggcaagtatttatgtgccgactgggagatgaacaggaggatcatactatgaatgcattt

SEQ ID NO: 20844 - DNA, 605 bp, Arabidopsis thaliana
atgttaaccacttcctccattgaaggcctagaatctggatgcttagacacacatgccattgctatctgcaacatctgcaccatttcttcctctacgttgtgttgctgcttgatcagctctacgtcaaacacttctccagtccactcctctctcaccactgattgcacccactttggcagatccaccacttcttcatgcccagtagtcttccctgctgctttcccagtcagcatttctagcaacagtacaccaaagctgtatacgtcggacttctgggtatgtttccgtgtttctatggcctcgggtgctctgtaacctaagcttcttgatgggatcaaggtgtgatggctcatcaatggagctataccgaaatcagagacacagacatgaagttcttgggttaagaggacatttggtgatttgatgtttccatggaggagtttagcaccagatgcagaatggatgtgagaaattcccctcgcagcttccaaacagatccttaaccttgtttccagtccaacgctgctcttcctccctcattgtttcatgcatagaattcacttaaagtgttactttaaagcaacttttataccttgagtacatgt

SEQ ID NO: 20845 - DNA, 603 bp, Arabidopsis thaliana
ctaaagatggcgggaactttgcttgattccaacatactggactccagtcttagatactggaatcagtctcgttgctcagggggagtaaaattgtgaagcgcatcaaatcccgctcctcgtccagcagactggagaaattacgcacaaatttgtgaatcagcgcacggattttttcttattgagtacaacaggttggacaaattttgccggagggggaatgtgccggtgcagtaaaccggcacagagtggcggaatcagacagataaggtcatggactcaacaacctcaatccagccatgctcactggcgatatcctggccgtttaaccaacggcgcacgatattcagtgccatcattgcgcacacttcctgacggatagccaggctgtagcgcgtagtgctgaaacgcacacgcagagcgaaagtgccgtctggcgtggctagcgcaaagttgagatgctcgttctcgaaacccgaaacagccagtgccagcccggcaaaatggttggccgccgttctgtaatccagtgcgcagtttgcgcagggttcctcctgtgaaggaacacttcacacgccagcaatggagcactgcgcgagaaagttg

SEQ ID NO: 20846 - DNA, 497 bp, Arabidopsis thaliana
cttcaacggcacgctttctcctctgaaatctctgcgagcaaacttcttcatctacctcttaccgtacttcaggtttgtgtaaatcatttttataagaacttcagtgaaatagattagcaaccctaattgaatttaatcgaatcgtaactattgtgaacggaacccatccatcttgcataaaaaccctagtttctgaacagcctttcgaaacttctagtgttattgtattggctctgatcaacgttgttctaaagttgtgaactttgattgattgcaacagagtgtttaagatgaaatctgtcgtaatgtcgaagaacaagggcttagctgaacaagatctaagtaaacttgatgtagctcagctgcatcctctctctcctgaggtcatctctcgtcaagccaccattaacataggtatacacaagtttttgtttcattgagttttgatgctgaagaaactgatcaagccgtgcattgaaagctaaagatatgactat

SEQ ID NO: 20847 - DNA, 437 bp, Arabidopsis thaliana
  unsure (1)..(437): unsure at all n locations
tnnnnnnnnnnnnnnnnnnnnnnnctaaagtgatcaagggaagagaaggggcggcggtcaatacccggctcaccatgaatgccgacgccaaactccatctcattatccgccagggtaaaagaaggtttgcccgcggcaggaacggtacaggcaccgagagcgatacctattgagtggccttgattattcagcttacgccccagttccgcacaggcgtccagtgagtcgccacgctccgccgctgcgcctacgagtttttcaattaatacggtgttggcaacgcggcgtcgcccggcagtataaagactgtcttttaccgcaacgtcgtcatcaatgaccacagtggtcacttttacgccgctatcgtgcagtaactcggtcgctgtttcaaagttaagaatatcgccggtgtaatttttgataatcaacagtacacc

SEQ ID NO: 20848 - DNA, 615 bp, Arabidopsis thaliana
cccatgtttgaacatcgagcgttaaagtgaatatccactcattatgacacccacttatttttaacctcttctatttaatttttcaagattctgttttccctttttatttttaaaattcttatattatcttttattaatatttataataattcccgagagtttgatcgccgatgagttcacggcggacttgctgaaggtcttgcctacgtcgctggtcttgacgacgagtgtagacccgttttggtaacttaatctcacttttgataattttgttttttgatttatttcataatcaaaacctatcgtttaatacccttttctatattccacttaggttttccgcattaaacaagattatcagaagctacatacgcagaaacagtaagttaaattactcatacatattaatacatcaaaaacattattcacaaagtttatttatatattcgtttattttcgtaggttgacacgtttggtggtatttacattagaggttgctatctcaaccatgtccagaaacgtcgaacaatttgtcatccttttcgatgctagtaagttcctcttatgtcaatttacattttatacactaggaaaaagggttcaaaataaaggggg

SEQ ID NO: 20849 - DNA, 1362 bp, Arabidopsis thaliana columbia
tacattgcgtaaggaaataggtcattaggtattacaaagaacataataaaaagtaattataaatctcaacccataatgacagttttccaattaattttagtgtaaacattaatttcggactaaaacaaaaatcgtgattcacggtttaatttttgtaaatcctaacaagttgtttaccagatctacaatcatggtaagttttatattcgaaagaaaaagtcagtactttaacatgtaaagtttatactggtcaattaaatcaccagagagtaaattcagaaactggaaagcgatggttttgtacctttctcttttgattcatcgtatgaactaccgaattattttcaccacgatccataatgttctgttttgcaggttagatctctgcgtaaaaggtatagcatttactggcaataaatagaaaacagagcatcttctgctccgatatttttggggggaatattttattcaaattaatgtaaaaatctgcaggttatgttactgatgggacaattctcaagcggtgctaggataatttttttactggcttcgaaaggagacacgtcagctggtagaaagaagctcgctcttaccctcacgcgcgtacaagaaatcacagaaacgtggcttagggagtgggttgtaacttcacatacccgtagcgtcactctctcaattccttcgtttatggtgttagttacttaatatttttatggaatatggttattgagctaattcacccatttttttatctcgttttaatattcgtattctttttgtaacgttccaaatttttaatattatcctgtctgttatcaagcccataaaataagcccatggcgcttccacaaacccatactacaaatcattacggttcccaaagcagaagaatcaaaagattcacaaaggaaaaaaaaaaaataaccgacacgtgtcagtcactccttgacaactggataattcttagtggccctgtaaatctaaaaatttcgctgtcttcgtcactctccctaacttcctttttctggttctctctttcttctttctattttattcaaaagccaattcccaatttcccaccaaagcatcactttggcgcaatccgaagattctcgccgccgccgtcgtcatgtcgccgtccgacgaatcgacgaacggttctcgttgctcatcatgcatctccagcgacaacgatggcaacgatttcggtaaatcggatgagtttacatgcaaacaatgcaaaaactccgattcgaaatcgaaatcaaaatcggtgaatgattcggataagcttcgaagaatcatcgtcgcttccgtcaaaggattcactataggtactggtttaaaaggtggtttagctat

SEQ ID NO: 20850 - DNA, 639 bp, Arabidopsis thaliana
tcccccgtcctgccgtgttcagaacccttccaaatccggtaagtcctcaaaatggactgatatatatagtttgttataacatttattggtgctgatctgctttagataatccatgacacattcatctttttgtctataacaggattcacggaagcaaccaaaggatgttgtggaacaggaacagtcgagacaacttcactcttgtgcaacccgaaatcgtttgggacatgctccaatgctactcagtatgtgttctgggacagtgtgcatccttctgaagctgccaatgagattcttgccactgccctaattggacagggcttttctctcctcggttgatctcacgtatttttcttatattctcttttcaaatcgctgtttctatcacacattgagtcatacatttgtttttctttgaattatgtatcaaagcatcactgttttactaaaaatgtattgaaacttattacaagtactaaaccaagagttgagaacacttagtaccagaaactatatacaaccatctccctgtgtgatcaaaagatctacatataccattgctatgaggaaaacctaatgaagtgttaaaatgaacagcgtagaattctaagcagtgagaaatctcagccagagcagcag

SEQ ID NO: 20851 - DNA, 1025 bp, Arabidopsis thaliana
gagggaaaatacttgttgagattgaaaggcaaagagtaaaactcttcacttctagtatctgatttgaacgacatgaatcgatcccaccaaaacatccctcggtctttcctcgtcgcactgtctttagatgacattgttacatcaagaaagaatgccaaaatcccagccacaaaggctttagaagagaatggaacattgatcatatcattgaactgcacagaacacaacaaatcagctttgtgttttggttataaacttatcataagtgggaagatatcgaaaagattgagattcttgttttgttatttacccatcttgcgtgtgtgtgaactggtccatacttgttaacagctgtatactggttgaagtactgtggtatcgataagcccatgaagaccgagaatccgaggatgaattttgttctgaagctgtttagattacagaactgaagtaagcttagaccaccagcacctgcatgcaatttcatttctttgctcagtttgcagtttaaaaaacctagcggtttcaacaaaagaagaggtgtttcaagaaacctaccaacgtatgcaaaaaacaagcaatgtaatgctgcgactactggagctggaatcgaagcaaagatagctccaaatttaccaagaatggaaaagaaaatcataaaaccggctgatatttgaactacccttctactaccaacgcgtgttagcgctaacaaaccggcattttctctgcaagatcatcattataaccattggattttgcaataaagatcgttggtttcggttcaaatacttcatttgttcataggtaaactagtcttacactgacacagatgctccatttcctgctccaaatagtccacagagaagaactcctacaccctatacataaatgcatttgcttaaatatataatctagtaaggaaaattaggatgaattttttttgttaatgttacctgccaaccaaccccacggctgagaacggaaggcgggggcggagttgcgcttgcgaacctcgacacaac

SEQ ID NO: 20852 - DNA, 420 bp, Arabidopsis thaliana
ggagcttcactgccttgataaatatttctcgcgtgcgccatcatcgttttcaccacgttagcttcgtttacatcaaactccatcaacgcgccatcgctctcaatcgccccaacgcttgttaccagataatcagcacgaaaatcagccacaaaggacgccgctgaagggccaatgatcccgctattatgagagcgcaacgtaccgccgggcaccatcacttcaaagcgcgggttgtggtaaagaatatgcgccacacgcaggctgttggtgattatccgcaaatgattatggttaagtaacgcccgggcaacatgctcaacagtcgtaccaatggtgataaatattgttgaaccatcaggaatatagtctgccaccgcttcggcaatcgcttttttttcctcggtttgcgaaactcacgct

SEQ ID NO: 20853 - DNA, 537 bp, Arabidopsis thaliana columbia
ttagataaaatacaaagtcatctcaacccacataacatctggtgcacatagccaacgacctcacctgaagtaatggtggcttcagatctggatatttctctgccagatttcgcgtgtagaacgctgccaagttgctgtaagaaaaaaaaaacgaaatagtttttacatgtgggaataaaacatgaagatatacctttgcaagaagagagatggttataaggatcacatgatgtacctgctatatgtggcagtggaatgtgacagacttatcatgcactgagcaagtgacaccataatcactgacctcaacgcagtaaactccgaagatgatttccagagctggaatgttttatgaaatctcagataaagaaggatattgttgataatgtgtgcggttgtgacatcaatataggtcgtcaaatattacctcaagtgttgcattcaaaccagggaatgctaatgtcaatgatcctttgtctccctgcaaaccggaggtagcaataaaactctctggtctttttagctttagatgtgcta

SEQ ID NO: 20854 - DNA, 685 bp, Arabidopsis thaliana
tccctagagcggtgatacttaaaactatttaacaagcagagaaggaaaacgtacgaatgccggcacttccagctgaagtaggagttccggtgccaccagaatttccctcaagagccgtcgcaccaccaaacaatacaagacgaggaccaatataaccaggcgttccttcatcaccaacagcaggcacagccgtcaaggtgtgaccacacctagggccaggcccatcctcttttttatccatcatagcatccaccaccgaatacgtaggtgcacacctcggaccaacaactagcgccggctgctgctcttgtccaacaaccgcagccgcttgctgctgagaagttgccggattaggatccgaaggcggcggcgtaggcaccgatccgccttcaggaggaggtgattggtcgttcatctgctgaggcgtttctctttccataggcgaaggagattggcctccatcaaggctctgaaactcacgatcctgatcgttgtcagccaccatagacgaatcttcatccattatcaaaaagcttcaaaagtgggaaaacaaaaaaaaaaaactaactaaagaaagaccgatccagctaaaattcgcagaaaagcgaatctgtgatcaacaacatatctgatgttaacttgccgctctctcggagaatattccggtaaaatcgaaaccctagtt

SEQ ID NO: 20855 - DNA, 728 bp, Arabidopsis thaliana
tgatggtccctcactttctcttctctttaccctttttccccattcttaaagcccatcgtttaacaggcccctttttaaacatccaggcccattagtgtaagaataccgacgtcgttttgagtggagtttcaattttagttttttgacccttcttctttgctctctcgctttgctttctcgcggcaatggcggcggcgacgggaaatgacgacaacggctgcttcgataaaccagaatctgaaccggcaccggttaacgtttcgcctcccctgtcgaagaatgctcagaagaagcagctgaagcagcaaagatacgaagcgaagaaagctgagaagaaggcacaggagaaggagcataagagaaaagaaggagagagaaagcttaaggaatgggaagaaaccctagcgaacgcgacggaggaagagaggctgaagcttattgagtcgaggaagagtctgcggaaggagagaatggagaagagatcggaggagaaggagaagaagatagagaggctgaatcaagctaaagaaataggtcaaaagatcgtagtagatgttgattttgctcatctcatgtctgagtctgagatctcaagcctcgttcagcagattatgtattgctatgcggtgaatgggagaagcacttcaccttgtcatctatggcttacaggagtccaagggaagatgagtactgagcttgacaagcttcctggttttgagaaatggttc

SEQ ID NO: 20856 - DNA, 968 bp, Arabidopsis thaliana
tatgttaagggttcgaagatagcagaaaagggtcttgtttgattgatagaattgtgaacaaagtttccgagaaagtgaacacaatgctaatatatagggctaaattttgataagaaacgggagagtttcatgtgtgttaaaattaagatggtggaatgtttgactatgaagttgtcttggtgtttgatctaatggataattccatgggtttaatctatggaaactgatgtaggttttcagtgggaccggtattggttagttgttaactataaaggaagagcatacactcaaagagttgagccaacccttgctcttgttgaatcggagttgcctaaggaagccttcttggaagattgggagccaacaaatgactcattgttgggtaaatttctggcttaactacgagaattgtctctgaatcgagacttcaatttacgttcttgattattcattttgcagtgataagagctcctggtatgagtccgttaaagataccgttgactaggccaagctcggtagcagaaggtgtgtcgatgtgggaatggtctggctctgcttttgatgaaggagaagaagctgcgaaatggttttcagattatcttggaaaacaaagccgtttggttcggtttaataaaggtttcagtttactttcttttgaatcttttgatttgcaacaaatcttaatgcaccgagttgatcaagttatttgtctacagatactgaaactagaccttcacctcctgagtttgcagcgggttactctacaacattcatggatatgtttccgtttttggttgcatctcaggtgagccaatatctatatttccgatatcggttaatgtgaataggcatttccgcatttgatcttctttttgtttttggttgttagggttctttagaccatttgaatacccttctgccagaaccggtgcctataaaccgttttagacccaagtaagcgatatcaa

SEQ ID NO: 20857 - DNA, 562 bp, Arabidopsis thaliana
gttttttatcctggcatgctcattgtaacttgtgagatcatatatggttttgaaattggctagtttactaatagtttaacccatctagatgtatagttttggtaggttacaaatagtttacgagttgattagtcgaatattaagtttgtgtggcaaacattgtatggcatagattgtggtgaagtctgagacattagtggtacaaggtgttattgaccacagactgtgtgaagttgaagcctttttctctgtatctcgttttataatatctgaacttacaagttgttgcgctgtccacagacatgattgaagaattaatcagcaggggacaacagcttgatgctgttcattttacttatgaagttgggcttgtggataagtccctcctgttcctttgctcaaagcttatctaagggacgcaaagaagtcagcagcttctatcatggaggactctagcaatactggccgagctactgtagctactcattgcatctactcatttctatcgcagctaaatatttttatctgtgcgccctgaaagttaatatcttccttgttatgt

SEQ ID NO: 20858 - DNA, 911 bp, Arabidopsis thaliana columbia
tatatatatatatatatatagttcaatccatatgccacttaaatctttttatttattttattgcgacatacacgccatcctgtacaaccttttgtatataggcttggtttgcttgaaaatgttgtcgaaacacttcctgataaaaagcattggtggtttacatcaattttacctactgaattatgctgaagtttttctccaacttttcatgtccacattgcagaatttgaactgtctgaggctcaaagggcacatgcatcagccattgaagatttggttcctggccttgtagctgtgaagaatcaagttagtagttacatggatgatgaacacttctggctgatttattttattttgctgatgccgagactgaatgggcatgattttgaactcttagcaacatgcaaggtaagactgtatactggaaatacattcttctgaaatgtcagtattgatccaatattattaaaatcgtaaacgtttatgctataatgaccccttcaaccgattgcaataagaacaagtatagcctcaggaaaaaatgtatttttgcctgatgcttttaaaattggattgttttatatcttttatgctctgcattttttcccaagttactattgtacctatttctgaaactttaataactatattgtgcggcacaggtatttgaaacaagggatcaacttttactaaagctgcaaaagaaagagacagggtcaagcaagagcactactggtcacgaaactcctgaagaaggtagcagtagggaaacagaaaccgttgagggagtcattgacaagatagagactctaaaaattgagcaaagggagataagtgatgagtcatctgaagaacaacggaggagtttcagagatgaagaggtaactcctttagtgatttagatgtcgatg

SEQ ID NO: 20859 - DNA, 537 bp, Arabidopsis thaliana
tagtgttattagaagtattatcacgattctccagagctacaacctgagatgtaatcgcatcgggctgtgtttttctcctccgcctgttatgaccatccaatctacgcctacaacttctcttcccctcatcaaactcagaaagcagatgaaacctaacaactaaaaagtaccaatctttaaaaacccaatcataaccaacaaaaaaacgaagatggactacgaacaaaagaatcagattctctttcacctgctacactgttggcaaaacctctgcatctgtttcccaacaagagctttagtagctttgctatgaacctcacaaactttatgtcttctatgataatccttagcaattgataaatcttccttacaattatcaacctgacacttcggatagtttcctcctcctccgccgccacttcccggagatcccgacctaaccttcttactcggtctggttaaatccacggcgtgcttcaacatcgttaaaacacaaggtagatcaaatcaagacgttttttgtacttagctggagag

SEQ ID NO: 20860 - DNA, 679 bp, Arabidopsis thaliana
ctcatcgcttctcggtgactcattagagagctcatttgtctccaaatgctctcttttaggcaagaaaagctctgtttttggcaggaaaagctctgttttatctgaaacagagtaaacagagtactcctttgtttgatcagaaacagagcaaatttcctctgtttttctcaaacttttgcagatagcttgaagcttggtatcaacagaggaagggagaggattcatgtcttcgtgtatgaggtttgggaagttaagcttcgcgatatctccacggagctgaaaagcagcttggtcgtaagctaaggcggctttttcggcggtttcgaatgtcccgagccagagacgggtccggttcttgggcaaacggatctcagcgacccatttcccccagtgcctttgccttacgcctctgtagagattcttggttttggaggtagaaggtgttaagttcttcattctgatacggtttggagagaggtttgagattgtgctacgtctatggttaagctggttctgaatctgatgaatttggtatggtgtgagctggtttagacagagagcatagatttgtttacacgaagctcgtgtttggacaggaaaaaaagagaacagttccatgagaggattgaatagagactttgctcttgtgaagatataagttggatttaaatcaagatga

SEQ ID NO: 20861 - DNA, 806 bp, Arabidopsis thaliana
gatccatcctaggcggatgttgaggttcaagagtttgatttgactttgaggaataggagtggtgaagaaagaggacttgatttgaatctgggaagtggtttgactgctgtggaagagacgacgacgacgacgcagaacgttagaccgaacaagaaggttcggtctggatctccgggagggaattatcccatgtgtcaggttgataattgtactgaagatttgtctcatgctaaggattatcatagaaggcataaagtttgtgaagttcatagtaaagctactaaagctcttgttggtaaacagatgcagaggttttgccaacagtgtagcaggtataagaaaggactctcatttcttttttctggaaatggttctctgttttctttttgaatctggtattaactaaatgaattttgcaggtttcatctgctttctgagtttgatgaggggaagagaagttgtaggcgtagattggctggccataatcgacggaggaggaaaactacgcagccggaggaggttgcatctggggttgtggttccggggaaccatgatactactaacaatacggctaacgccaatatggatcttatggctttgttaaccgccttagcttgtgcacaaggtacactagttttgcgacttgtagaagtattttagtctgggaactctgctttgatgttcttgttttattaacagattttgttgtgtgtgatctgcaggtaagaatgcggtaaagcccccagtgggatctccagctgtgcctgatagagagcagcttcttcagatacttaacaagataaatg

SEQ ID NO: 20862 - DNA, 965 bp, Arabidopsis thaliana
aaaaaataaaaaatgtaattaaagaagaaatcatctttaagtggattataataatatttaattgtagttctaattctaagtttaagagaataattatctttgaacattattaactagactagtggtttgtgttagtatcgtcgtataaagtttaatacctctttagcggcgaattcaggataattgtcctcgaattgtttaacagcgcgtctgatgaattgccacaaggctcttttaccaagtcctggagcgttcctgaagtcgctgacgaacacaaacgaagacttcgcttcagggttgctgaaatcaatagctctcacacacttctcttgtagctgaatcctccagctgaggaacttgttaagcttctccttgtcggagaaaagctccttgttctgaaactcaccgtaagaactgtagatcacgacgtgtccttctttgtcaacaccgtgagcaaacaccatcttctcgaactcactcacttcttctccggattcaacgagttcgtcgattttgttttctttacgccactggacggtgtttttaagcatggttaaagcttctttgaccttaaagtctcttgcacggaggaatttcgtgaggatcacgtcagatctctcgtcttggagtagtggaactccccagatcgagacttcttccggctccactggctctgcctcagcaacggcgacagtctctaccacgacaggtgctacggcggattcaggtggtgaaacagagacgatagattcttcgattgcttccacggtcttggttccatcttcttcggcactggatgctttctcggttgttacctctgctttctcttcaggtttctcctcagatttggtctcaaccggagcagcctctgatgatttctcctcctccgccgctggaaccgccggtttctcttcttcaaccttaacctcagtcgttgtctcttctttcttctcctctgttttctc

SEQ ID NO: 20863 - DNA, 602 bp, Arabidopsis thaliana
catcggtgattcttgaacatacaaattcaataagagctaacgataaagctccagactaaaaaccttcgacctcatacaaccggtggaacaaaagtttaatgtagaacgtcggaacactattttgtgtggacaacgatctttacattccctacaaataggtctagtcatacgatggttgttgcgaagaacacgtacctttctacctttgaataaccaagatgaaccgggcttcatatataagtccttcccaatcaaacattcaatgtgtagggtgacacaaccatactcatcacaattataaaactgccctttcggatttatttttctctcgcaagcttcacaccaatacgccatggtacttgtctcgatctccttcccataagaaagaatgagcacatgattatcatgcttataccgtcaccttctgaggtatagcagcacacttgaaacacaaagcaaagacacattgaacgcaattaaatgtttcatgtgtgacataacggcttgactctttgcaaacactacatgttctccaatctcctggtttagatgttaggaataaaggatgcctatgacttcgatgaactaatggttcagaaatt

SEQ ID NO: 20864 - DNA, 517 bp, Arabidopsis thaliana
ggatagatttgagaattctcgaaatgtatgtagatcctgtgttagtcttagtttctgtgtatcgatttcttcgaaatcaagctagatttttgtttagatccgtgtgatccgtgtgatttgagtgatttttgtgttttatttgagatcagatcggatcatgagtagtctcttccttgcacaccaagtgttcgacgtttttctactatatatagtccagatctgagctcttaatgtagatctgtattgatctttatttgaattttgcagagagatttcaggaaacaaaatggtgaagatctgttgtattggagctggatatgtaggaggaccaacaatggcagtgattgcattgaaatgtccagatattgaagtggcagttgttgatatctctgttcctagaatcaacgcttggaacagtgatcagcttccgatttacgagccaggtcttgacgatatcgttaagcaatgcagaggaaagaatcttttcttcagtactgatgtcgagaacatgttagag

SEQ ID NO: 20865 - DNA, 699 bp, Arabidopsis thaliana
accctaaactcagaacaatgccgtacctttcagtctacacacagaggaggtgcaaatccgtggggagcacctcgccggaaaacctacatctccgggtaaagtttctcacttttcctattgtttttgcgacacgattcgattgtttctattcccgttttgacgtataagagagtttgaatttgcagagatcaattgtctgtggatgatgtcaaggtttacgctgccgttccagtgaaacccagcgatgccttccccaatgctagcaagtggtacgagtccgtggcttcccaacttgctaaaaggttcgtccttttttcggaattttgtaataatcgattcagatttggatttgtatattgatcttccaggaattgacgagttttgatttgttgcagtttccctggaaaggccgttggagtacaattcggtggctctgctgctgctgctccagctgttgaagctgaggtacctttacttgaatgctttattctttattaccatagtcgtagaccttagaaaaagggtaatgaatgtagtttggaactatgatttgaaaggtgatatttccaatcttgtattagggatcacgagctatcattggtaggggaattgattggagtgtggattggaatgctatgtctgtgtgtgtgtgtttacgctatcctgcataattgtcaacaggcacctgcagctgcagct

SEQ ID NO: 20866 - DNA, 572 bp, Arabidopsis thaliana
tgcacagaaataaagagaaagtaggagaattaactcaaaagagacgaatattttaaagtgacaaaaaattcttaattatatacaaactaaaattcccggttaacaactgatcgcatcgtatttcattggtatcggttggttaaatccggtcctagataacaaactcccaacagcagcaagatctcggcagaaaactccttggtacgcgttcgaattccccggtttaatttctgcaaaatcggttaaagtaattgaaccggatttttcaaccggttcatgttcttcaaccgttttcgttgacatttgagtcaacaccatcatcttcttcctctgttcctcctcagctatcgctgccgccaaagctgtataacctctctgaatcaatcggtaaagcaacaaagaagacatcttcgctcgatctttaacggaactaatctcactctgatcgaagaaatcgcaacgttccatgaatgctaaagccttgtccggtttatgcctgagacagagcaagagatttgctcgatcaagctccgatctcgtgcaaccgcgtctaactccgaccaatccgtaat

SEQ ID NO: 20867 - DNA, 1122 bp, Arabidopsis thaliana
attagtaattgggtagtaaaatatttagaaacctacgaagacaaaacaagaaataaagtaacgaaattaccttaatcaaagtctcgagaggttcacgaacgggtttgttaccaccaccaaagattttccccttggaacctttatacctcttcaaattacggttaagcgcgtgactcacaagccccaacgacacactgtagaggcgcgttagattccctaacggcgttccaatcgccgtcgcaaatccgctcttagcgtccacaagaccgtcgaggcacgtctgctgattagtcacaacgccaccgagaagactcgtgacacgatcaacgagcgcacgcgtcatcagctccgccgctttcagctcctccgtaaccgtttcaaggtattcgacgctaagctctgctagctcaccgcaatcagccaccgcactgacctcttccaccgtcgacgtacctggatcagcttccacgcgctgggcaaagcggttgatgactttggagaggcgacgagcttgtttgaggcattgcttcattgtgaactttccgtaatggtaaggatcggaaggtgatgatttaacggcggagaggatcgtgcggcagagctttgggtaaggagtggatttacaagcgatgtttggtggtagtggagaaggctgcgatggagactgtgatggtggcggtgttggaggctgtgttggtggatgtgacggaggctgtgttggaggctgcgttggtggctgtgacggaggctgtgttggcggctgtgacgaaggctgtattggaggatgtgatggaggttgtgacggaggacgtgttggtgagactagtaaagcccatgacagacagagaagagccaagaacacgagagatgaagaatgagtttgcattttttctaagcttttttttcttccgtcttgttatctactaggagtttgtcctagttcatgtatgcatggtatgagagagatataggtatatgcatatgcatttataatgcatggcttgagagagaaacttatgaataatgtaatgcatgttgccttgtttaggaattattagtccgagacaatattatacacaattttatacaactatatagggcgatagggcacgtacatatata

SEQ ID NO: 20868 - DNA, 477 bp, Arabidopsis thaliana
cagggaaaccgtaatgcttgcagatggccattgcatcatagtagttctggaccatatagcgtggtcctccagtgagggaagatggaattaaaacctggttaccttcttcattcatagaggtagttccagcttcagaggcctttttcaaactgttgtagttctcacatcgtagctttgattgtttaaacttgatataagaaagccggttagattcaatagttgtataagcatcacagagaaattgttgaaataacctctttgagcgtgtcaaggttttacactcatttggtctctcttgtatcctgaaagcaaaccattgacgcatacttatacactttttctttttcttcttggctgaattgggcaagcatttctctataccaggagtgtaacatcttcgccatagcacaaaataagaggatattgcaatgccaagtaggagatatgaatctgacttatccgtgttagatgactgta

SEQ ID NO: 20869 - DNA, 851 bp, Arabidopsis thaliana
agtgtgctctaaagggtattaacctgcaatcgggtaacgatgcttgtgtcgccatggccgattttgccgctggtagccaggacgcttttgttggcttgatgaacagctacgttaacgcactgggcctgaaaaatacccacttccagacggtacatggtctggatgctgatggtcagtacagctccgcgcgagatatggcgctgatcggccaggcattgatccgtgacgtaccgaatgaatactcgatctataaagaaaaagaatttacgtttaacggtattcgccagctgaaccgtaacggcctgttatgggataacagcctgaatgtcgacggcatcaaaaccggacacactgacaaagcaggttacaaccttgttgcttctgcgactgaaggccagatgcgcttgatttctgcggtaatgggcggacgtacttttaaaggccgtgaagccgaaagtaaaaaactgctaacctggggcttccgtttctttgaaaccgttaacccactgaaagtaggtaaagagttcgcctctgaaccggtttggtttggtgattctgatcgcgcttcgttaggggttgataaagacgtgtacctgaccattccgcgtggtcgcatgaaagatctgaaagccagctatgtgctgaacagcagtgaattgcatgcgccgctgcaaaagaatcaggtcgtcggaactatcaacttccagcttgatggcaaaacgatcgagcaacgcccgctggttgtgttgcaagaaatcccggaaggtaacttcttcggcaaaatcattgattacattagattaatgttccatcactggtttggttaaaaattaaacacttgaaagtgtaat

SEQ ID NO: 20870 - DNA, 716 bp, Arabidopsis thaliana
tcgactcgatccctctccattttgaaccaggccacctgattggatccaagtcgctgataccacttataatcccaggggatctgacaaaacaggtgaaacatgttagaaagttgggcatataaaacacaggtgtgcaaggttatcttaaagcttgaattataagtctataagtaaccttctctcagatgcatcttcagattcaaccctcgctttaaatctcatcccaatgcaaaagggatagtcaacaaccttcaagaactttggtgcagggattatgaagtttgaccagcttgccctgaaaatgttttaccagtgaactagtattaatgctaaattcctgatatttattggagttaacaaacttctaaggaacaatcaactagaacaatacacaacttaaggcttcaggagattctaattatgattctgaaatgaaattttaaatgctgaaaacgaaaaaaggtcattgtggttggggcttacttggggttgtaggaaatgctgaaaacgctatgggtcgatatggcatgagctacttcagagaaattgttgtggttcatattctgattatattgagccgagagagcagcggtgccttcgatttgagaagctcttctaactcccagtcgcagtttgccatcatctcctctgtatcagagaaacccatatatcacaaaacctcttacagaaaatcaaagaggttgtgtagtgagaaa

SEQ ID NO: 20871 - DNA, 1148 bp, Arabidopsis thaliana
tcttccattggctgttagtaaatatcttatcttctcatagatttttagcttcagcatgagacagtgccatctccactgtccatccaaaattcgacggtccagatctcatctcatctatcatcacacttcatattatgacaagtagttagtagactgtcccaataaaatcacaaccaaacacaactaatttaagtgagaaaagcacataactttatcacaaaaaatatttagaaaagtaaatacaataagcatactaaaatgcaaaacgaaacaatttgcgacatgtattaaattttttgtatattactactaaacaagcgaaaaataaaataattcctatcatttatgtggaaacaaatagttgcaaagaaaataaaaattcttacaaaaaaaacagaaatcagaatattgagcctaaaaaatagtttgaggtaaaattacaaaataaaataagtttgagatatttgtgcaaagaacttaatatatttattcatttgccccataaataccaaagacactgcatcttatctccactctcaaaatcatcttcttcacccaaaaacccctaaaagccttatcccttcttcttcccatggctgcttcagcttcgtctctcgctctctcttccttcaaccctaaatctcttcctttcggcgtctccagacctgcctccgtttccctcttatctccttccctctcctttaaactcaattccgactccgtttccttctccatcgccgccaaatggaactctcccgcttctcgcttcgcccgtaacgttgcgattacctcagagttcgaggtggaagaagatggtttcgctgacgtccgtccgccaaaagagcaatctttctctgctgaccttaaactcttcgttggtaaccttcctttcaacgttgacagtgctcagctcgctcagctctttgagagtgccggaaatgttgagatggttgaggtatggatttagggttttccccaatttgtgagttatagaagaaagtattgttcttttagggtttttattgataaattgataccattactcctttttttgttatttgtcttgtaggtaatctatgacaaaattacaggaagaagcagaggttttggattcgtgactatgtcttcagtttctgaagttgaggcag

SEQ ID NO: 20872 - DNA, 501 bp, Arabidopsis thaliana
tcttgggatggctaagtgtttgagtagcgatggtttacaaagcggttcaagctctccaaccacaggactacaaggaacatttggctactttgcacctgaatacgcaattgcaggatgtgcttcacagatgtcagatgttttcagctttggtgttgttctactcgagcttataaccggaaggaaaccgatacagaaaccaagcaacaacaaaggcgaagaaagcctagttatatgggtaattaacactggtttatgaatctttagttgtagctttagccaacaaatttcaagtctctgaaacttatttgttctgtggtgtgttaggctgtgccacggttacaagatagtaagcgggtgatcgaggaactgcctgatccgcggctaaacgggaagtttgcggaagaagagatgcagataatggcgtatcttgctaaagagtgtttgcttttggatccagaaagtagaccaacaatgagagaagttgttcagattctttcaacc

SEQ ID NO: 20873 - DNA, 971 bp, Arabidopsis thaliana
ataaacttaatactaaaggtagaaaataagtccttgtaatacacgaaatctttcatctctgatgcaaaagtaagtcactcttcggggttagatgtcatctttaaaagatccaaacaatccattaagataagaatactactcatcggtactgccaataagcacttcatcgaccacagaagagtctctaattccgcatgaagtggtgaaaggcttctacgtgaccccttcaaacccaaatacaccaatcttcctccctgcacaacaagacaaccatgtatgctcctagcctccgctccatgccaagacccatcaataaaacaaacaagattatccgtaggtaccgtcattaccggcgtagtggggtttgcctcgtttaaggggatttctcgctgatttgctcgtctccattcttcttcttcatgaattgctaagtccaaagtttccttgggtggtacactcaaattgtcaaaaatctttcgatttcgcgccttctagatataccacataatccatggaaatatccttatgctttcttcatctgcacccacctctttacccccaatacaaataatctaaattattgtggagggaagctgaaggaaacaatgttggggatgatggaatgttagatagggcccaaacttgtctagccggagcgcattcaaaaatcaaaagattgatcgtctcttcttctgctctacatctaggacatccattatctctagcaatatggcgacagaaaagtcgttggcacgaagccaaacaaccagacacacattgccacacgaaatgttttaattttcgagttttaatttccaagcttgcgcctttaatgccgtaacactaggtccctgagaagggtgatcgcaaacagggtgagaaagagttctcgcggcttcatatccagatttgacgctataattcccagactttgtcatggtccaacaatatccatcactcgagacattaag

SEQ ID NO: 20874 - DNA, 577 bp, Arabidopsis thaliana
taactcgctgacacagtttgttgaagaacgcacataagcgtccaatagctatcctaacacctttaggtaacaaacctataaatggataacattgaagattaaaaacaacacagcaaattatgcaagaatttcagctaaaagaattcatcttatacctctgattgcaactggaagaagttgttgcatcaacacatgataatcatgtgatttaagtcctttaatagtagaatcttctatcttcacacatctggaaatattagaacagtagccatctggacctctgaagtcaaataaccgcttatagaatactttcttctctgttttggacaaagaccaaggagctggaggaaggtaggttctttgtccacgggcttggggatgtaaatccttcctaataccaagcagttgcagatcttttcgagctttaataccatcctctgacttcccacaatgcagcattgtagagacaaggctagcagcaacatttctctccacgtgcatcacgtctaagttatgtctaaccggcatttctagacaaaataggtacagatatactttaatggctcgacatttattt

SEQ ID NO: 20875 - DNA, 510 bp, Arabidopsis thaliana
attacaccgtcaaatctggatacgaagtcgcgagaactctttctcgtcctatttgcgaccacccttctcagggacctagtgttacggcattaaaggcgcaagcttggaaattaaaaactacacgaaaaataaaacattttgtgtggcaatgtgtctctggttgtttggcttcgtgccaacgactattttatcgccatattggcagagataaaggatgtcctagatgtggagcagaagaagagacgatcaatcacttgatctttgaatgtcctccagctagacaagtttggccctatctaacatcccatcatcccctactttgtttccttcaccttcactttacaataatttagattatttgtattggcgtggtaaggaagtgggtgcggatgaggagatcttaaagatttttccatggatcatgtggtatatttggaaggcgcgaaatcgaaagatttttgataatttgtgtgttccacctcatgaaactttggatttagcaattcaaga

SEQ ID NO: 20876 - DNA, 1078 bp, Arabidopsis thaliana columbia
gatcccttatcgggtgactaatgttcgttccatcggaaaacaaaaacacaacaaactcaaaaccaaaatctccataaacatatatagagctattaattatcatattaaactctcacacactcttattataaaatgttttgactcctgatattagaccaactgcaaaaactaaactaatcactccaagatttaacaatcaatcattattatgattactataatctatatattactattaaaataaacctttttgtaatgaggatattgtgatgatctgatcaaccgtgaaccattccatacgacagagccatgagcaaaacagcagcctccttctcatcttgtgggaacacttgttgataagctgagcttttgctcaacattattgtcaaatcatcgaagcaaaatttgtttgacgaaatcgaagaattagaagaagttgtagatttgctgatctctgaatctccggcaaccgtttccgcttccatttccttctcctcttcctctttgatcttgcactttttggccttggcaccattggaggagagtgattgtatttttcccctccgtttgatctcttttttttattttgcaacttctttttcagcggtaattgttgcactcggggcgctaccgccacctcttggtcgccggctgcagcggccgcgagccatagcggctcgccttgcctttctttgccgtataccacatgcgttacaaagagactgcaatgataaatgaaaattagtatgcgaactgtagatgacaaaaaaaaaatcatagaatgttggacttatgagtatcattgattaaagtattaatgtttaaaggatgtatcaggtttaaataaattaaatatctacattcttgaaatataactattaattttaaaaatgtgaactaaactaggtagatatagatagtatgacatatatcaagacaatttcgattgaagtaagtgtgattaatctaccttgggacctcgaggtcacttcgccaaagaggagtcttggtggtgttcaatccgaacaaccctaatcacgccattgttatactataccgttctcgttgattgtattgt

SEQ ID NO: 20877 - DNA, 823 bp, Arabidopsis thaliana
ccctctgacggattgtggccgtgggatcaaaaatcgtttttctttaggacatgtcattggctgatgtgtcatttggtcaacgatcgacgactgtacggacattacttggtgggaaccactcgacgaagtcggcactttgagctcaacgagaaactctctctcctcctccgcaaacaaatctccgacttggatgacagaaccggatccgaaattctcgagtcgaccggttaaagagtaaaccgatgaaatctcagtcaaatgagatccgttgaccaaactgagatttagcttcacgttatggagagtcacgttgagcaacgaagcgattctttcggtgaacgcgtctcgtagcggcgcgtgaagcaacgctccaggagaagcaatgtaaacggaatgaaccgggatctccggacgagagaaacgcgtggtagacacgacgaacggaatgcgcgttgcgtttagtttagctttcaaaactgcctccggttgatcttgaccgtccgataaaacaaagatgctcgttgacggattcttctcccgccgatcttcaacgacattaaccgctttcttcaacgcgtcgttacgctcattccaactccgccggtggtttccattccgccgagtgcgtcgaccattcgccgcgccgatcgtcttcctttcgccgtcattcgtcgtaacggcattaaccgttttgaccccgtcgagaaaacgacgatcgataaacgatccatttctcggagaagagagatcaccgatctcatcgcgtgtttaaccgtttgcaaattagcaccgccgttgcttaaatcgagaaccgttaccagat

SEQ ID NO: 20878 - DNA, 1229 bp, Arabidopsis thaliana
  unsure (1)..(1229): unsure at all n locations
agtcggaattcgaaaactcaatcttctcctctgtaagaaactcctcaatcattgtcttaacacgctctggttcctctgtctcacattcaatctcataacaattcccaaaatcatacttagtctcatcaacctcaagtttaacacctctccactcataaacattcctaacattctcaaagccacctaaacaaacaaaccctaaaaagtcattaaacccatattcctctttaacccttttcaaaaccctagatccaatatctgagagcttagccggtgactcaacacattctttaccaatccaatactcaatctcctcttcatcttcctccacacgactaatcccattagctagagttggcttcgctttaagagagacgatacaacgcggcggagaaggagaagccgcggaaacggcggccgttttgaaggaagcggagacggaggacggcgcggcggagagagaggtcgtttttgggtgtgtcgaagaaggtgttgcgttggtgaagggttttgaggtggtatggagtgaggagagtggtgagacggagatgagcagcggcggttaggagacggagcttgacttcgacttccatggagtgttttaagagagaccgattcggtcggatttggaggaagggtttttgtgttttgggtctatgaggtggtggagagaggaggcggcggaggaggaagatggtgcggtggttgtggtggtggatggttgagatttgcgggattgttcaagctcttcacggtcttcgattttgagttggatttttgttggttttcttctcaacatttcttcgatacaaagtgatctctgtatcatcctcatgcttttgttcttgtgattggactaacctaggcccatatatataaggtccgttaaatagttggcccatttctggcttgctggacttaaattctctgattgtggattctggattgtggattgtggttgtggcaacaggtttgtttaccgagttttatgttctttggtggatctagggtagattgtgaaaatgataaaaacaaatcacgatctgttaatcaaccacaacaatcgatcaaacaacccaaaaacacttccgattaatatgaaaaagataacaatgtgatccaatgttcataaaacaagggaatcactagatccaccttgcaagaacaatgttcttcacagaggatgaatcatattacccaaaacccaganacataggggatcctctatc

SEQ ID NO: 20879 - DNA, 1613 bp, Arabidopsis thaliana
taaaaaataatcacatctttagctggatccacaaaattaggtcagggttcatgacctttttagcattgttttagattatcttgaccattagttgtggtgagagttgacaatttaaaaagtcaactagtttttaaaattaaataccataacaaatgatgcttaatatatatgctttaatgcttatagttatttaaactttataagtaccataatttttttttttttttttctcgatctaactccatctattattctacggatataagctctcctctaaagagagccaatcgggaatcgttgaacttacatgggaaaaacagaatccgtgtgctcttgcacattttgcaaggtaatctgcacgaatattactagttcgaggaacgtagttaatatttaaagatacaagtttatctctaaaaatcttgaaatcttctagctccgatgcaaaattaggccactcctccggggtattaaccatggtgataagatctgagcaatccgtcataacttgtaccctcgatatcgacaatcccaccatgcacttcaaggcccaaactaatgtgtctaattccgcgtgaagcgtgataaacaacgtcgtgatcccttcaatcccaagtgtaacagtctttccccgatgttcaatatccacccatgaccacttcgaggttcagatacatgccacgacccatcaataaagcacactggaacgtccaaaggtaaaattgggacttgcaaacatggcaccgtctcctccacttgctcctctctcatgttggctctcctccaaacttcttcctcttggattgccaatcctaaagtgtcttgaggttggacgcaaatattttcaaaaatctttcgatttcgcgctttccaaatataccacatgatccacggaaaaatccgtaggctctcctcgctagctccaatctcctttgctctccaatacaaataatccagattattgtatatagagggcgacggaaacctagatagagaggagggaataccggacaaagcccagacttgtctcgctggtggacaatcaaatagcaaatggttgatggttcctcattagccccacatctgggacactttttatctctaccaatatggcgaaaatataggcgttgacaagttgctaaacactctgacacacattgctacacaaaatgctttagctttcgtgtagtttttaatttccacgcttgcgcctttagtgccgtaacactaggtccctgaagagggtggtcgcaaacgggcgagagagggctctcgcagcttcatatcttgtcttgacagtataattaccgaacttagtcaatgtccaactatatccatctcgcgagacatttagcctcggttttatccctaaaatcaaagtaatatcctcgggggggggggggggggaacaactcccgtagacgatctactttccacctcttcgtctggaagtcaatcaaggtgttaacgtagaccaaagggttcctatccataattaaacctttcggtggtcttggaggagtatctgggatccatggataataggcgactatatgttctaggaggttgcacaaagaaaaagtttgttctagcataatatgagaatagatgat

SEQ ID NO: 20880 - DNA, 1158 bp, Arabidopsis thaliana
ttccgagcactgtaccagcaaggccccaagaacctgttctttgactggtacagaatcatcgggtggatggcaaatggagtctatgcatccgtagtcatattttccctcaacattggcatctttcatgtccaatctttctgttctggtggccaaacagcagacatggacgcaatgggaactgcaatgttcacgtgcatcatctgggcagtgaacgtacagatagctttaaccatgagccatttcacatggatccaacacgtcttgatctggggaagtatcgtcacctggtacatcttccttgccctatttggcatgttacctccaaaagtctcaggaaacatcttccacatgctctcggaaaccctagcacctgcaccaatcttctggcttacctcactgctggtcatagccgccacaacactcccctacttggcttacatttcgttccagagatcgttaaaccctctggaccatcacatcatccaagagatcaagcatttcagaatcgacgtccaggacgaatgtatgtggacgaggaaagatcaaaggctagagagaagaccaagattggagtgacagctcgtgttgatgccaagatccgccagctgagaggaaggctccagagaaaacactccatattgagcgttatgagcggtctgagtggcgtctcagcatcaactgatacaacttccaccacacaacatagttgaactcatccagtaagtttcctctttctcgagaaaaaaaatccattaattggaactggaaggaagcagaccaaagaagaaaattgggattgaagataataggcaacaaagaaagggacagagaatgttgtattgtgtgagtttgtgtgtgtatactaaagaaaatgaaaagaaagaaagaatttgaatagagtttcttataaatagattctttttctttctgaagaaagaattggttttgattgtaactgaagaagtatggtcatattcacatgtagatatgaaaactgatttcattcattatctgtctcattcaagttcaaagactcttcttctacatatagttgcaagagaaagaaaatactatcaattttttgttcgttacagatatatttaactctcacagcacaaagaagagattttaagaagttgagagaaggtatacaagaaa

SEQ ID NO: 20881 - DNA, 689 bp, Arabidopsis thaliana columbia
agtagaatagaatttggcataactcatctcaccaggttgaagatattgcaaaatgggtcgaagctcatcggccacgaggaatctgtctttgtctctgtccatctctgcgaacagaagctgaggtgttggcacattctcatcctcctctttctcgaactttgcgaattctttatacatttcatatgcattttttacaaactctttgtactctagcttcccatcaccgttcgtgtccatgcccctatatattatatatatcaaacaacatgttgtttcctagttaagcttcatttatgatcatatcgaaacacgatatatcacgaaatgcttacgtcattcgctcctttagaacccatctttgtgtatctccgtttctgctgtcttcagggtgcaagaaactgcaaatcccatattttcattcattttttattttcggaaattttaaaagtgatgagatttttcaaggcatattaattacttgttgaactcctcaatgtcgagagagccattatgatcaaaatcagaattcttgaattgctccatccaccaaccggcttcaccgtgacccttctcgtttttctctgtttccatattatcattgttttttcttatttgcataatgaagaagaaaaatctcgaaggatcaaagacaagttaatatattaccaatgtcttgtttagagaattga

SEQ ID NO: 20882 - DNA, 230 bp, Arabidopsis thaliana
  unsure (1)..(230): unsure at all n locations
actttatttgngggagcataaacattgaacaagttgatcaagttccttgagaaactcagtataagaatggatcgcttcttcttcaaggtacccaaccatacgatgagcaaacttgggagagattaagtaaccaaggaaataagcgttgaagaagactccttgcacagtgatcacgagcgctctctcgtaccatttcggtttcgcgacttccatgaatgtcataagatgca

SEQ ID NO: 20883 - DNA, 584 bp, Arabidopsis thaliana
cataccccatacaaaaagacaaaaaaatattactactgtttgttgttgcctgcttgtttaaacgtttctcaaacactaactcgggacgtttttaaggaaaaggaaacatgttataagagtggttcaagaaacatactgttcccgcggagtatatgtctccagtttctgaatccgttgttcagagcaaccaacactgcgtcttcaattctcttggctgccttttcttctccaagtccgtatttcagaagcattgcagcgcttagaatggttgccaatgggtttgccttatcctgaaaattcaaagaatcaacaagttgtgctctttgattttggcattaaactagttttgatatcagggaacaaaaaccgtgtttgtttgaaggatagagttagaacctgtccagcaatatcaggtgcagaaccatgtataggttcaaagagtccaggtccctgtattacacatggcgggtttatgttcagactagatcatactgcttgcatactaaaagatcatattattttatatcataccgaatcactgagactagcagatggcagcattcctatgcttcttgtgatcattg

SEQ ID NO: 20884 - DNA, 545 bp, Arabidopsis thaliana
  unsure (1)..(545): unsure at all n locations
ctattactctcattctaaatagcaaggccatacaatagcaaaagataagcccaaaagcccattgacaggaaaagtaaagaagaaatcagaacattcgtagcaacattcaaagaaagccgaatccaagtatggcttaagcagaggtgatgatgtatatacaagtcaaagaacttcaaattctttagaacaaagttttaaacttgagaaaaagctcttcttttaatcgaatcaatgatacccaattggagctggagcttcctttagttcacgaccttggtagtgaatatcctacaaagtaaaaccataattgatcagtaacacacgattttaagctttagaatttagtctcaagcaaataatatacttacagatgcaaaatggtttacatcacggtgatgagcctcgtcagcacgaacaaccatcacaacatcacgaagtgtcgcatcagcaggaagcctccagtaatcaatagcaatagccggagcaggaacattctcaatgttacnctttgtcaagttccttgagaaactcagtataagaatgga

SEQ ID NO: 20885 - DNA, 973 bp, Arabidopsis thaliana
tgtgccctacgacgtggtcgctcatccttacgctgccggtgtctacgacaagaaggcaccctccggttatgtccgaagagtcgacgaccccggagtgtcgcagctggctcgtgctagctccaccgaggtccgctacaccactgcatttagcgacgagaacccggcggcttgtcgtggtcatgtgatgtcatatggactactactgtttcaatttgttatggcttaatttaatgtcttgttttgtacattaataccataacggtaggtttcttgttttggttttagttccttggtctgtattccttacactttatgattgcaatatgtgtttttccctttcttccaaagacttttaatgttaataaatatttctacccaaaattaaattattttcatttatggtttgtaattgtgaagaaagcttcaaatgcggatcaagttgtagttaagaaaaccattaaattaaaatagagagagtagttgaaacaagggttccgagcttccctctttaacctaggacatccttaaaacaagggaacaatataatacaagttgtaacatttatgtatcaaagtgtttatcgatgagcaaatcaagtagaattaggatgaagtcgagaacacgatacttgatagcgattctacttgtaatttcgctctgttccaaggcaagcagccatgatgatgagaaaaagaagaaaggagtaacatacgacggttctgagcggaacttcattgatcataaatggaaaaagagagcttcttttctctggttctgttcattaccctcgaagcacacctcacgtaagcacgtctactctgtttttattattacccaatcaaaaagatgatttcacttcatggatcggattctggttttgttgcagatgtggcccagtatcattgacaaagctagaattgggggacttacaccatccaaacttatggtttctggaatgtcgatgagcctgaca

SEQ ID NO: 20886 - DNA, 739 bp, Arabidopsis thaliana
tttccaaaaatcaataatatacctctccaacaactcttgcacatttcttgtatggttttttagatgacatccccaactcatgcattgcaaagctggaagacaaaataatcgaacattagaaggaacaataccactgactaagcttaaaaatatcagtagctttgagccgaacgaaagtcactcaacagaattctccgatgtactggttttagtccgtctctaacatcaggcaaagcacgtccaagcaaaacagagagcgcatacgacatatacgactcagtagcttccttatgtagctcaaaaggcacaatacgagattcgtccccagaaacaaccaaaccgccattgttagctccggactcttccttgacctgctcatctccgcgcttaccagcaccgacaacgaatttgccggaccgaggagtacgggaggagaagaaacgcgtggcggagggttcagtgcggcggagaggcataatgggtcggtgagggggaatcggaagaaggagcggcgaagaagggaggaagagagacggagagtggaggagagagacatgagagagttagggttagggattgaagcagtggaatggcataatactggagtcatgcccagagggttttagggatttttacaagtacaaatggattaaagtgctaaaaccctagagagccacaccggagaatttctcaggcgcgaatttcaatactttggcgggggtctttgtgtcaaacaaaa

SEQ ID NO: 20887 - DNA, 975 bp, Arabidopsis thaliana
gcgagaacgagtggataaatgggtatttggaggcgattcttgacagccaagctcaggggattgaagaaacgcagcagaaaccacaagcttctgtgaatctgagagaaggtgatggacaatatttcaatccgactaaatacttcgttgaggaagttgtgactggtgtcgatgaaaccgatcttcaccggacttggctcaaagttgtagccactcgcaattctcgtgaacgtaactctcggttggagaatatgtgttggagaatctggcatctcactcgcaagaagaagcaggtccttcatatttactaatttttggtcgatcaatttgctacagtgaaatgtattcgaattttgattttgtttatggaatctacagttggaatgggaggattctcagcgaatagcgaataggagattggaaagagaacagggaagaagagatgcgacagaggatttgtctgaagatttatcagaaggagagaaaggtgatggtcttggagaaattgttcaaccggagacacctcgaagacaattgcaacgcaatttatccaatctcgaaatctggtctgatgataagaaggagaatcgtctttacgttgtcctcatcaggtattttctctcttgcttccattgattcttctgtatgttaggtcaacataaagagtgagtgtatttttttcagtttgcatgggttggttcgtggagaaaacatggagcttggtagcgattccgatactggtggacaggtacattgtgttccaagtatttaataagcttgaatccggtatctagggttgttttaacttgttttatttgtgaatttttaggtgaaatatgttgtggagctagctcgagctttagcgagaatgcctggtgtgtaccgagttgatctgtttaccgccagatatgctcatcagaagttgattggagctatgcagagcgaacggagatgcgtaccactgctgaagattgtgat

SEQ ID NO: 20888 - DNA, 788 bp, Arabidopsis thaliana
taagacagagagacgtagcgcattgattacagacgcgacacatctgacatacaacatttgccactacaatgcacgactgtcttcggattaatacattaatgttacatcgttagtatcaatcttacagattataaatagcttagccgattgtttaagatagtattattctaaattcatatacactcgtgcaagtacaacaacacactaaagttattaaataattagacacatttgatgtagataaactactttttttagtgacgtgactttacaggcccaataatatattctgaaaagcccatagtaatattcacaaaagccccttgataaagttgcaacgcgcgtacttatctgacgtgtcaggtcacgccacgtggattagaaaaaaagtggtaaaagacaaaacccttttgtactcaacggatctgagtgaatcctgaaaacttttttaggatttcaaaattgatttgaaccaaccaatgattcttggatcccatgaataagccttcacgtggcttttgatttcacattccacgaaaatccaattttaactgaatttgagataattttggtttagtgatggcgattaggttgaatcatagtgtaattccagtgagcgtgaagcttggagctccgacgagagtatcggctcggagctcgttaccgttcagcgttggagattggcgtggtgttctacattttccggtgctaggcctttggttctcgcgaaggtgaaactgagagcagagagtactgaggaagatcgagttccaattgatgacgacgac

SEQ ID NO: 20889 - DNA, 824 bp, Arabidopsis thaliana
ggcaacctgacagcgatttcctggatccacgtttcttctctgctctcgcaagcaatgcgtgtggctattccggccgtcatcgtcgcgctgtctgttggtaccagcgaactaccagcacatgcttgcttgcgactccggaagccgcgacccctgttctgcatatcgccggtggcatgatcgtggtggttggttatgcgatggttatcaacatgatgcgtgctggctacctgatgccgttcttctacctcggcttcgtaaccgcagcattcaccaactttaacctggttgctctgggtgtgattggtactgttatggcagtgctctacatccaacttagcccgaaatacaaccgcgtaccggtgcgcctgctcaggcagctggtaacaacgatctcgataacgaactggactaacaggtgagcgaaatggttgatacaactcaaactaccaccgagaaaaaactcactcaaagtgatattcgtggcgtcttcctgcgttctaacctcttccagggttcatggaacttcgaacgtatgcaggcactgggtttctgcttctctatggtaccggcaattcgtcgcctctaccctgagaacaacgaagctcgtaaacaagctattcgccgtcacctggagttctttaacacccagccgttcgtggctgcgccgattctcggcgtaaccctggcgctggaagaacagcgtgctaatggcgcagagatcgacgacggtgctatcaacggtatcaaagtcggtttgatggggccactgctggtgtaggcgaccgatcttctggggaccgtacgtccggtatttggagactggg

SEQ ID NO: 20890 - DNA, 871 bp, Arabidopsis thaliana
ctgttccgtcttctacaacccaaatttgactcttctcctcttccgcacatacacgtgatatgagtctcgagtcgtgactcaccaacacaactccacctgtgaactcatctagtgcatccgccaaggcatctatactctgcatgtctaagtgatttgtaggctcgtccagaagcaaaatgtgtggttttgacattgagatcgaggtgaacacaaccctagccttttgtcctccagacaatttcgcaattggagataagtgattgtgacttggtagcccaaacttgcctagcttcgctcgcactgcctcttgcttgctaaatccctcttggtcaggatgaagacgaaggagatactgaaccggtgtttcccccattgttaaaaggtcaacaaaatgctgagaatacctgccaatcctcagcttctggcttcttctcatttcaccctctgttggaactaaatctcccgcaagaagatttaatagagtggactttcctgctccgttaggcccaactatcgcaacccgtgtccccatatcgatacctacatcaacattcgagagtctgaaatctggcctgttgggatagctgaagctaacctcaattaactgcagaagaggaggagtgagctcagttggttctgggaagtggaacaccacactgtaatctctccacttccttggagcttctggtgctgggccttcttcatccactgtcttgccctttgacttactcttggatgcttcttttgcagcagtaaacttggccctgtcctttaccttctcctgttgaccccggtttccagtcctcttcgctgctttcatctgtttgtcgtagacatcaaattttttgttcatctccttgcgacgctgctc

SEQ ID NO: 20891 - DNA, 976 bp, Arabidopsis thaliana
gctcgggtttggcctgatgaaggaaaagaagtcctgtagcaatctcagcagcgattctgaaccgtgctctccaagatagtggtggagtattatctttgcaaaagagacgatcttctaatgttccattttccatgtactcatacaccaggcagccatattcgggacaagcaccgaggaggatcaccatgttagggtgcctcatgcaacttagaacctcgatctagtgaggagacacatatgttaattagtatggagaggacatgcaatacattaggataatgtcggattatattattacctcttggttaaactgcttcaggccttgtgagacatctgacttcaagagtttgatggcaacagaagtgttttcaagaacggctttatacacaggtccataccctccttccccaatctttagagcatctgaaaaaccgtcggtagcaccttcaacatctctgatgctatatcgtctgtaggaaatactatcggccatattctgttccttgaacctggcttgcatctccacaagtcgtctcttctgggtctctatttccgctagacgttgtgccacttcagttgcttggatcgcagtctgtgttttttgcttgtccatctcagacaatgccctaagcatctctcttgctgcctttgcttcctccagcctttcagtttcggcggtagctctaggtcctagaagatgaggggcctacaagcattcattcaatgtctgatattagtcactcatctttgggacctgttcaaggaaacattctcggttgtgctcatggaagtaagtatcttacactttctctggacatggaagcattaaactgctgcaattcgaatctcaatcttctcacttctgcttcaagattttgattctgatcatagtcatgcacaaagaacacaaacatctcagaatcatgcatctgacactcagcataaccgaaacactatgtttcccggtcgaacaaat

SEQ ID NO: 20892 - DNA, 559 bp, Arabidopsis thaliana
cccttttgttttcccaaaagtcctattttattttattttattttatggttttagttttatagtaattccatcgtcaaagaagaagcttgtggatcttcgtggccttctctggcgttgtaagtttgtcttctgtgtttctcttcctgaattaccatcgccttcgatataaaggattcatatttgattctgtgtttttttcgtttattgctttagaaatatagattcgaaggcttgtgttgtttcattgcaaaacattcaattcaatagaggaagaacttgttggtaatttatggcaatgagaagtgctcctcgggattcgataagcagtttgccagatgagatacttggcaaaatcctgtctttgattccgacaagtggctgcttcgacatcggttctgtccaagaggtggaagaatctgctatgtcttgtagacaacctttgttttgatgagtcgatggttgtttacccaacgatgaagaagcaagacgcggttcacatcgcttccttgagttcgtagacaagacacttgctttgctaagcaattctcacatgaagaag

SEQ ID NO: 20893 - DNA, 758 bp, Arabidopsis thaliana
acagatgaggactcatctatgcaccaatattggttttcgagcttgtttgtcttctaattatctactttcctcacattacaggttctttgcatccgaaagcctgaggaagctattgatctgtttatggtggaaataatgcacatgcgtcacaaattcgatgttgacacacgattggtatgtcttgacttaatttattgtaaaatagttccctcattataggtttatatatgaaatacttgccggtttatagtatggacctgttggaaacactgacttaattctgaattaggttgaggggcttgttctggatcatggttcgagacaccctgacatgaaacgacgcgcagaaaattgccacatcttaacttgcaatgtgtcactagagtatgagaagaggtgtgtaatataattctttggtcaatttggcgaagagaaagtaaaggcctggatgtttctggtgatgtggactaatatttctatttatctatcagtgaaatcaatgcaggatttttctactctaatgcggagcagagggaagccatggttaccgcagagaggcgatctgttgatgaaagagttaagaaaataattgagctgaagaagaaggtgggactgcgaccatttctccaagttttattttaaaaccctgtaaaaaatactaatacatgttttatttcttgtgcaggtgtgtggtgataatgacaactttgttgtcataaatcagaagggtattgaccacaccatcattggatcttctt

SEQ ID NO: 20894 - DNA, 604 bp, Arabidopsis thaliana columbia
tgaaaatatatatttgatatggtgtgatatagatttcaatattattttgatatgattttttcttttagcatttattcattaaaataaagtgtgtagaatcaaaatccagtttattatgattaaatagatagttaaattgtattttaaatagaatgtaagataaaaaactgttttaaataaaagtactaaattaaatataaaaagtgtgtgtgagatactatttagaattcaaatattatcgatacaatagagtatgtagaattaaatgttgtttattattattattttcttttgaatctaatgttaaattatattcaaaagaaaaagtgtattttgttacaactagtgcatcaggttattgaaagtgtatagaacaaaattttgaagtggggagaaaaatcttctttgaaacgttcagggtcgagctcggcgccaagcttggaacgccttgtcacaccgactgtctgattgttgtgatttgattccgtagctgcttatctatccatccaattaatgtagccggagtgttgggtgaacatcgtgtctctaccgttacgtcccgccaaatggtgtagatcgtacttggaatatatcctgactagaa

SEQ ID NO: 20895 - DNA, 643 bp, Arabidopsis thaliana
  unsure (1)..(643): unsure at all n locations
gaaagatatggacatggaagaagctggtgatctcactgttgataagaaagttcctcttgagcttctgccagttattcgcatcagtttgtagatgagcttggagaaaaacatatggtatgcttattgtataaaccagaacgctttttctgtttattttgtttttttgaatctaatgttaaattatattcaaaaaaaaaataatcgttgttacaatcagaactctttttttttatctattgtgattgcttgaatgtgttgtgtttgattaatattagaattcagaattcagaattgcaattacaaatggaaattaagctttgattatgctgtctacatcagtgtttagtgcaccattgattgtgtttgattgatgtttggtagttgaactcttctctcacactgaacaaataccattaacttttagttttgctcatacattctcttttaaagataaaaaatacttgggttttatattccaactttttattttgctcattcattctcttttaaacccgaataatacttggttcatcccgggaatcaactccacaacttaaatattgcatggagcacttattacgaatgagttaaggtgataattcgacaatgacnattagactgaccttcgtagggatatatagta

SEQ ID NO: 20896 - DNA, 709 bp, Arabidopsis thaliana
ccaacataatcgaatccaaaactatagatgtcaacattctcagtgacaaaacctgttaccatatagtggggctctccaaagccttgtgtcccgcaaacgatatcttctacccccaactctccctctggaattggtatgctgaggctgaaagaagagagcttagcggtccaattctcgtccaagaaaatatttgtaagctttaaatccctatggattatagtcctagggaattcagtatgcagatacgttacagcatctgcaatctccttagcgatcttcaatcttacactccaagccaatggcttgattacctcccccgcacctcctatataggcaagagctcccttttctgggtattcacacacgagaaccggacgaggaaactctagacaacacccccaagagcttgagaacattcttatggctgctcatcatcgatgaaaccgcaatatcacggtaaaagttgtcagggtcaaagttaaagggttcacctttatagtacttgatcagcacggctctgttttcaatcgtacctttgtaccacacgaatctgtctacaccgattgcatagctccagtcgaagttgtttgtagcttcaaggatttggtgagaagaaaacgtacggatgggattgtatttacctcctgacgatgcaatgagtaaagtcccacatcgacaagttagagagccgtggtcataagcattgtag

SEQ ID NO: 20897 - DNA, 537 bp, Arabidopsis thaliana
gaggatccctttgaagctaggaatcccagaacctgatgttgaaatatgtccaaacaatgaggctactcgacctctctgcagtggttgtaaagttcgttgcaagaaccctttcttcataaggagtacagaagaagaacctgcatcacacgcttgttcaatagactgctcataaggtctagttgttactattcgaattcatgttttacattctctgtctaaattgtaaaacagtgtgctttaaaagtctttcaacattttctgttaagaaccatttccaattattatttttatttgtctcgcatggtaatttttattgagaatataattgggttttaagaatatttgatgccatacttattgttcttttacgtcggattatgaataatgagaatatttattcataaccgttgtggacctaaaaaaacaaagaatcacataacataatctctttagttgcagttttattcgtaacaaaccttgaatgtcatgatctttgcaatttccatcagttgggggttagctttcggaagctagatg

SEQ ID NO: 20898 - DNA, 944 bp, Arabidopsis thaliana
gaatcttggatacaagaattcttatgtatctctagtaatgatgtggtcaattaactttccccaatttgaatcaatttaacattctatagagtatagaccaattccattagcaggcactactacatctacttcagaactgagcattctagagatttttgtttacttctgttaagaacaaaatacgtttttaaagacaaatttttgaaatgttgactgaagtaaaatgaatcacagaatttgaagataagtgataagtaatagatagtaagacctctgcagagaagagagaaaatccgaggagcgttgaacttcagaaatggcggattttctcgccaggtatgaattggaatggcgtttggaacgaggagcttctgctacgttcgccggtaattcaataacagcggaagatgtcgttgccgccgtcggcgtgaggattcgtaaggataaggcgggaatggagagagatgaagagggacgagagtgagtgttgaagagatgaggaggacaacgtagttcgagtcgcacaagaagtggcgtctccattgttttttcgagctaaccgagccagagcctacgaaagtatccatccatctttgaacatgttcttgtttcttttaccaaagtatccccgcgtttttaattgtaatctagtgctagtttgagaagtgaagggtagtatagtaaattagaaaaaagttctaatcccaaatggccaaatctcatcctcaacaacgcaaggacaaacgccgttttatgatgggcttttcgggagagacaaatgggcttttaggcaaaccattaatttgaaaggattatctaacgggccatattgttaaaaaaagtgcaacaccaaattttgtaatgttgccataccaaattggtgacgaaatctgagaggacagtacaaaactttgacacaaaaaaagaggtcagtacaaaatagt

SEQ ID NO: 20899 - DNA, 562 bp, Arabidopsis thaliana columbia
caaaaatatagtataattttttgtgtcgtaactcgtaaatatagtataatttaaaaccgtatttttagaaaccaaacttatttttatattttcgttctgctttggtaatttcctctggtcgttcctttgattagtacaaaagacaaattttataataaacacaaaattcaaaaactgtatttattcagtcttctccctccttggcttctctcctctcctcccaacaaattcaaaatgtcaatgtcattttccggcgggactcacaacgatcgttggggctccgatttagcttccgccggagaattcacccaaagctttccatccttaccagcaacatactcaccctcaccctcctcctcctcctcctccggcgaagagctcctagaagtaacaatcgaattcccaagcggcgtaataataaacatcgactccgttaccggaaccggcaccgatatttcaggtaccgatctagagatcacctcttgctcggattccggttcaggatcaaggtcgcttagcttaggatggagcgcgtcgtcggagagactgacggcggggacga

SEQ ID NO: 20900 - DNA, 470 bp, Arabidopsis thaliana
tcatgttcataagcatagatgatgactaaagttactacactattagtgcagatttattcaaggaagtaaaacataagtgcaggtttgtgttgataaatcagttggcgactataagtttggctcttgcatcatctctgttgatttggaattgatctccgagtccaaaatgagccattaatagccaaacaaagttgataagttcaccgcctttgctaagttgagaagcatgttcttgagagtcacaatgaagtgatgcatagcaaagcaactcaacccacactttgctcactacttcccacatgttttcaccttcattcattagctcttttgcgagcacgcttgcatcgaaaagcacggatttgcttctgtctcctttcacagccattggatcgatttctgtgttgacagagagaatagctcgacatgcttctttcatgaggtttttttttacatatcttgatttgtcgaca

SEQ ID NO: 20901 - DNA, 1033 bp, Arabidopsis thaliana
tgtttctctacaatgaatattgttaacgattgtttagttttgctgttcgaaaaagatgctctggatcgtcacataacagagacgactgtccatgctcgtagtctcggtgaaggtgtcagttggcatagtatcctagagtcttacattttttgttaacaatgaatatctactgttgcctctctggtctccatcaaatagcacaatgaaaccaagtattttaaattgtattttcaaatttgttcaaaaaaattctatacgtgtttaattaaaggactatagactatagtaatagtaaattaagactaattacatatttgaccaaatctacttcaaactgaccaatgtttcactacaaatacgttcacaaaccatcatcatctcttcacccccttccttcaaatatagaaaatatggcaacacaaaacaagattcagaaaaactctctcatcattttcctcttcaccttagtcgtcatcgcccagaccgctacctctcagaactgcctcaccattggttgtcctggcattaacgagtgttgtagccatacgggttactgcggcaccaatgtagagcactgcggcttttggtgcctcagcggcccttgccaactttctaagagttccagctcttacagactcaatgatggcccacgcgggaagatcgaaagcattgttacacctgcattattccacagactcatgcgtaaagtcggaagtaattgcacgggaaaaggtttctacacccgtgaggctttcatcacagcagtcaaatctttcgaaggctacaagggaacggtagctaaacgcgagattgcggccatattggctcagttctcttacgaatctggaagtaagttagttactatactaaccattaatttattttttcttaaatgtataataatgttaagaaattgtgttatcttaattaattaatgtgacacattcgagtagctgagccaatgccattggactaatccatttttttcatgtacagatttttgtacaaagaagaagtaacgagtgagacatat

SEQ ID NO: 20902 - DNA, 1153 bp, Arabidopsis thaliana
tcccctgtttgagttcttgtctgactcgttccatcaaagatctctcgctctcagtgggaactagaggaccaaaccctaacccatctaagcttccatcaaacaaatgagcatcactctctacttgctcatcttcatcctcagacattgttgctcctgtgccttcaccaggagatacccctgtctcattcaacaaaacaagtgttaaattaaaacctcaagaagtaggtactaaatataaaaaacagcattgaaatgagaaataaaataaaagaaccttgtgtcttttacaatactatagtgaaatacaaaagttaccataacagctaaatgacaaattaaagttgataatttagtagaagtcttaaaaactaacctgtaaaactttgaagcgactgttcaatctcccaacaggccataacagcttccattgcatgaacacgaacatgctgttgcagttgttctttgaaagagcaaagcaatagtacataatgcgtctgcacaaaaacatggaaatatctttcagacaacagatacaatcatacaaatacgtccatgaacagtaaaatatgggatatagatacagaaagtgacaaactagtttttgtcagatcactgtatccgtaactgcaatcaatgaaattgctcaatcacttacactcagcaaaaatctatctcaaaataaaccttatgctgtcaaattactactgtgcaaaactaatatccaaatttttaactgacgatttatccaacccactgatcatgtctgtcggtgcaaagtacaagtctagaaagaatttttgattttcttctctaatttacttttataaatttggagataattaacaacaaaatattcaaatttgtcaaaccgttttaaatataaaagatgaaagtaatttttagtgattttattttccaaaagaaaagaaaaggaataaaataatgggaattgagagtggtaagaaggaaagagaagttaagttaccatgaagtggtcaagctccttgtcatcgccggcgaggagtccttgagcggcttctaaagttgagtacttagccacgacgttttgagactgagcaagctgtgcgtctatcctcggaagctgatccaccggcgttgcgatcctgcagcatagtgatttagttgaacagca

SEQ ID NO: 20903 - DNA, 472 bp, Arabidopsis thaliana
tacatatgaacacttgagtaactattcttttcttctaatgactatatcaggagaattacattgtgaggaaatgacacttgaaactgttatagtggccacccaaggtttttcagattcaaataaaatcggtcaaggtggttttggaattgtttataaggtacattagcatatatatacacataaaatgtactagttcagtaaattccgtgtaatttatataatatacatataacagggaaggttacttggcggacaagaaatcgttgtgaaaagactgttgaagatgtcaactcaaggtatcgatgaatttaagaatgagttgagtctgaacgccagtgtccaacacgtaaacctcgtccaactcctgggatactgttttgagggcggtgagatgatttttttttttttttttttttttgaataaaatgttaaattatactcaaaagaaaaaatgtcggttgtacaacgagtg

SEQ ID NO: 20904 - DNA, 578 bp, Arabidopsis thaliana
tggttttggatgtgaaattttcagagttgatatatgtttcatgagtgatgattagagtggtggtgtttttggtagtatcatggtaaaataatgaatagcagatgttgacgcctggtaagctcgttttattgcaggaaggtttcgcgtttgcgcactgcacaacttgcaaggctccatattatctgagagttcacagtgctggagataggaaatggcggacattgaagtttcgcttctttgttactcgagacattttatccatatttcttgctgttcagcttgtaagtattcatttttcatgtgtgcttctgtttcttacagtagtttttctttcatttggtaatatatctaactcatgccttttaaatgacttcatctgctcacaggtgattgctgcattggcctacatggtctatttcatagatagttaccagcaatcatggcttcgtcatatatggggttttgacagtgaggtcacgttttattacatgtgtggtatgatccaaactttaatatctaaataaatcccctctagataagataatattttttagtaagacctctgccaagtgtagttg

SEQ ID NO: 20905 - DNA, 560 bp, Arabidopsis thaliana
  unsure (1)..(560): unsure at all n locations
acggacgatgcctcacgggggaacacgggcttaacttcagccggagggtattgcgggatagtgagggcgtttggtgcgggggatttgcggtcaatattggtagatgctcggcccctttagcggagttgtgggggtgtactatggcttatataccgcttggggaaaacggattacgcggttggagttggaagtggattcggaggtggtggtaggttttctcaaacaagggataggtgagactcataccttgtctttcctggtacggttgtgccatggcttcttatcaaaagactggatagtgcgtatttctcacgtttatcgggaggctaatagtcttgcagacggtttagctaaccatgtgttctctttgcccttgtgctttcatatttttgattcggttctttttgttgttgatacgctgtttatcgaggataataacagggcctgggcgcctgaggcatgtacgtttgtagtttttttttctttagttttttttaatacaattccggggatttatcccgggaaantcacaaaaaaaaaagatattctagaagatttta

SEQ ID NO: 20906 - DNA, 1043 bp, Arabidopsis thaliana
aagagacagccaccattagccatgatgacttgaccgttgatccattcgccagcatcactggctaagaacccaacaacaggtgcgatgtctttggtctcaccgatcctaccaaataagttctgtgacttaactttctcaacaatctcattgctcaatcctgtgtaaaacatttctgtggcgacgggacccggagaaacacagttaactgtgatctctgttcctttgagctcttttgcaagaatcttggccatggcttctacggctgcctttgaagccgtgtatgagccatagtttgtatttaaggtttgaaccagtgatgttgagaggagaattatccggccaccgcctccacgttttagcctattcgcagcttctctagcacaaataaacgcacctcttgtgttcacactgttatatcaaacaacgaatctaattaatatcactatctaattaaattcacgttatagagttgcaaaataactaaatgaaacaatctttataataaatgagtttcttaaaattaacctgataatgcgatcaaaaagttctactgacatgtctgagatagtggaatgattaggatcggctatagccgctgagttaaccaagatatgaaccggcgactcgaagactcgctctgcctcatcgaaaagcgactttacctggctcggctctgagatatcagccttcaccacaatgacacgtggacttttgccggcgacttccgcgtcctttgaacagttggtggtaatcgccgtggcaaccttctcagcctcaacggggctagttgagtaattaacgacgaccctagccccaagctcggcaaggtggatggctatggcacgacctattcctcgagaagatcctgtgactatagctactcgaccggcgaggcaaagcggtggagaagaaactgatgacgctgcagccatactgttaggtagattttactataaatttacttttctatatttagggtagaaatgatgacaacgtgctaaaagagtgtaagcaagcaatttgtagtggtgatggttagattt

SEQ ID NO: 20907 - DNA, 864 bp, Arabidopsis thaliana
tcaccaagaatggagtgtcttatattagaaattacttgtaaattcttaatttgcaatgattcacgtaagacatgggaagataatgtattcttgaacaaagatcaaaagttttgtgtgaatgtggttgaggtctttgtaatattttgagaatctataataggtccctaaaatatattgttaaaatattttaattttttaccgtaaatataggtcacaaatacagttggtaactaacatatgaatatttagtgtatacactcttatgtttaacaaaataattattgtcgagatagaatatctgaataccataaatataggtaccaaaatatgacgatcacagctctctaaaatttctttataccaataaagaacatatacggtctataaacattgtttattttttttggtgaatcaccggggaaaaacccccggaatttattaaaaaactaacagaaaaattacaaacaaactcgtcttaggcgcgcaggcccgtcattatcctcgctcaaaagcataacaagagaaatcgggatctcatcaaaaacatgaagacccaacgacaaagaaaacgcatggttagctaaaccgtctgcaagactattagcttcccgatatacgtgagatatacggactgtccagtcctttgataaaaagttgtggcacaaacgtaccaggaaagacaagggatgagtctcacctatccctgtcttgaggaaacctaccaccacctccgaatccacttcgagctccaagtgtgtaagttgtttagcccaagccatatacaacccataatacacaccccactgttctcctgacggtgatgatctcgtctttgatctttatcttccaatgtcctctagagtg

SEQ ID NO: 20908 - DNA, 563 bp, Arabidopsis thaliana
cgccgatatttctcttctgcatattttaattcgctcatagaccgttccctcattattctgcatatgtttattccaactctgacaaatgacttcttcaaattctggaattcccgtgagtcttgtatcaaattgaaaaggtttgaagccttgttcggttgtgcgtcgaatgcgtatgatagctggcctatgatcagattcgatcatctccaagtattccacttctgaagccggatacgttgcgcgccaataatcatttgccattgctctgtcaagccaacattccactgtgtgagatcttcttttacccatccacgtcatgttatttcctttgaaagggagatctttaactttgcatattttgactgtgtttctgaaatccaacaaactccaattctcccttactcttccccctcttttctcattaggatgtaatatctcattgaagtcgccacataataaccaaggatcgaatcgatttagagcaattcgttgaagtcgtcccaaaggatgtgccttaatttgcgattgggatgccataaacacaagagaagtaaaagacacac

SEQ ID NO: 20909 - DNA, 906 bp, Arabidopsis thaliana
ggatccccaagtggttccaatgaatgtgtcagtacgaagacacgagtttgtaaattaaacataaggtttttaagaaattcaaaagttagatgtcgacgacaacaacaaaaggatgtcgacaaaaaaagaagaagaaatttggatatatttttttggacataggtgagtcacgagtgttttattaagatggttaagacatttattttcaacctcagtgtttattattattattattccaattgaacccaatgttttatttctaacaagttaacccctacatttgcttctcaaggtatcaggaagaggctcctctcaagacgaactcttttatacatatccaccattaacaggaatgatttgaccattgacccattcaccaccgtcaccagccaagaatccaacaagaggcaccacgtctttggcttcgccgaccctcccaaagggagactctgcggctatcttttccaccaactctggggtctttccatcaaagaacatctcagtggcgatgggtcctggagcaacacagtttgcagtgattcctgttcctttgagctcttttgcaagaatcttgaccatagtttccacagctgcctttgatgcggcataggcaccaaaccctggctttaaagatcgagtctgggaagatgtcagaagtatgatccgaccaccacctccttgttttagcctattggcagcttccttgctacacatgaacgctccttttgtgttgacactacactccattttaaaagaaacaaacagaggattattggaaacaagaatgaaggaactttagttggaaattagacatacaaatctcacgaacatggaacattggatgaaacaagaaacataagtcgattaattagccacaagaacacgagacatgttgcatttgactca

SEQ ID NO: 20910 - DNA, 1291 bp, Arabidopsis thaliana
cacccaaatagagaggatgaaaagattcgtgttgaagctgcaggaggttatgtcactgagtgggccggtgtgccacgagtgaatggccagctgactgtctcccgtgcaattggtgaccttacttatagaaggtaggccttccttgttgtatgttagtgtctctctgtgcatctgaacatgattaatgctgaactcgtttacattttgagagataaagtgtgagttttgatatctctttcagttatggtgtcatctctgcacctgaggtgatggactggcagcctctagtggctaatgacagctacttggtagtgtcatctgatggtatctttgagaagttagaggtgcaagatgcatgcgatcgcctgtgggaagtaaagaatcaaactagctttggagcaggagtgccttcatattgctcaatatctttggcagactgcttggttaatactgcctttgagaagggaagtatggataatatggctgcagtcgtggttcctctaaaatccaatctagattgggagagccaaccaaaagagcaatctgtgggtccttcgggattcaagatgaagaatacatatgcactgccatgtgagtttctctcatcacaacccaacttattccgtatgggatgaagagtgatctttcatttctaaatatatctgtttttcaacagatggaacttttaatccattgcaattgaagcagactcaaccactttcaaccatgtttaacgagttattggtatgttcccaccaagacattaccatacaaatgcccaaggaaagtgtacaagtactttataataaaatgagtcaaccttggtattgtaggttgaagaagaaaacagcagctattataaacttaatggtacctttgcatcatatgggtgacttacttactggtagcctcttccgagtcattattctctggtaagtgaagtgactgactagtatcacctcgttgcaatcttgtttaatgttttatctttttctttctggttctgtatactgcactaacattcaatcacaactcataccttgtaggtgcaactaatttttcaacaaggaccaatttttgtgtattctgttttctaccatctaattcgttagtttttggtctagccataattgttttgtttgtaaattgaaaattggaacaaagtataagaacaattataataattcaaagtacaagtgggtgtgtatatgtggacgaaaaatgtgaagaaagttgttgaaatggtttttaattggcacaatcatttgtggcgaaatcgaccaatgatgtg

SEQ ID NO: 20911 - DNA, 997 bp, Arabidopsis thaliana
attaaagtagatgaaacttgctttgctgcgcaatttggtgtggtcttcaaaaccttcaaaagatgacgaggcccatttatatccgggccttagggtgtttggcatgatttgggctaggatttaagaacccatttgttttgcgtacaagatgatttatagatacaaatgaaaatacagagcaagacaataagaagaggaatcaagaacagagtgaaacataccttcatcatcaggttcggacagaccaggaactctcccggcaagaagaccttttttcacgacagccaatctttcccctggaaacactaaagtctaaagccgtggacgagactaaccgatttttgtggctgatacgcatgcctcttaacttcttttgtgatttgtggctaatcattttctagcctcacacgtgtcaatgtcacttactaggagtctacagaacgaataaaattcatattacagattttgccccaaaacaattcatattacatacagatagtagtctcttctgccttaaggttatgtgcatttacgttcaagaatatacaaatctatctttgttgcaggattgtgaagttgtgtattgaaatatgcgatcacatcctgtatctgagtttttgacgtacttcccactaactctgcaatcccatcaagtctaattcctttattcattgtcactttcccaacagttaaagcaagattcacaacaacatgcttagctttttctggtggtataacactcttctgtttatgcttgaaaccacttcgatggccgtgtatcttatagcaggtgtcagcgttgtgtccagtgtagccgcaatgagaacattgaacttttggctttgaattagcaggaaataacctggtcgcattcacggcaaactgatcattatgtgaaccgaaatgttgaatgtggaagcattggttggtactgtgacaatgttgcattgactgtgataaaaaggttgtaaatctctgcaggtccgaatagttgagt

SEQ ID NO: 20912 - DNA, 713 bp, Arabidopsis thaliana columbia
gacaaatgtcagtttcttgctaataccatgtataatcaatcccataagaactttcaaaacattgtagcccggaacaaattgatccaaaacattacagaaactcaaaagtctctcttattgaatgcatatcaaaacgttttgcagcattctgtgactataaacaagttgcagaactacaaataccaccacggtcccatcttcaattagcaaaagacaggaacaaaatgatcgaaaaactcaccgcattgtccaataccaatcgagagtttcctcatggaagggtgacgatcaaatttccacttatcactgcagtatttgaatagctcccaaagagctaagcttcctaacaatcccaccaatgcaagtggcatctgatatctacaaacaccaaaaatcaacacttcaattccaacacaatttcaagattcacactttagtctaaagctttagcctttatctaattaaagagtaatgggtcctcacagtgcacaagcaaagaagacgatgaacaacgtagcgtaattcctagcgaatcgtttgatattctcatgaactctcattctcgcttgctgagaagacgacgggaacgaataagagtcacaattgccaatgaaaccggtggtccacggtgtcgtatcccggaaaaacatcggcggagacttagagaaagggtaatagtagaagagaagagcagtgacgagtgagatagagag

SEQ ID NO: 20913 - DNA, 1416 bp, Arabidopsis thaliana
cagattccggcatattctaccgagttccgataatgtatttcgttttttaattaaattagtaattgactttttaatctttaaagagataaattaatttactctttaaaattttatttctaatgacatacttatgtaattacttacaaaaattaaggttatatttaaaatgtacttcccaaataatatagtaggatgaataatccatttttttccatgtcaacatttcttcacctctcgtgttagttagtagttccgtactattgtagaccacttggatatcatacttcacgtataactaacaataaaaaaaaggcttattgtccactaaaaacgtacttaatccttaaattctttttgcgtcttagttacagcgatgctagtaacggtgactagtctactttatttgctattgcggtttggtgtggatggaagtggcggtgcagcaatgttttcggggataacaggaaatgcagtgatagggtgctttttatcaaggatgtagctgcggaggtttcgttagctaccacgagagaaggaactaaggccgtcgactactcgagttaatatgcagatccgttggatggctcctatagagggttggtacaaaatgaacacagatggcgcctctcgcgggaacccaggtgtagcgtctgcgggtggggtgctacggaatagcgcgggagaatggtgtgggggatttgcggttcatattgggaggtgttcggcgccattagcggagttgtggggtgtgtactatgggttgtatatggcctgggccaaacaacttacgcacttggagttggaagtggattcggaggtggtcgtaagcttcctcaaggcagggataggtgagactcatcccttgtctttcctggtacgtttgtgccaaggctttttattaaaggactggcaagtccgtatttctcacgtatatcgggaagctaacagtctagctgacgggttagctaaccatgcgttctctttgtcgttgggtcttcatgtttttgatgaggttccgatttctgtagtcacgctgtttagcaaggataataacgggcctgcgcgcctaagacaacttcgtttgtaattttttctatttagttcttaataaaatccggggttttcccccgtgattcaccaaaaaaaaaaaaagtaacggtgatgacaattttgatttcaaaatatttgggtttttttttctctcccattttaccactttttcatattcatattacattgtgtagaaattattcatatgagcgtttgctaatattttcaggactggtcgagcgattcactgccaaaattgtgaattttgtgcttacaagatcttcccaactcggaaatgaatctcatatttcaacgattgttgctggtactcctagataccttttgataccgagtaagaattttaaa

SEQ ID NO: 20914 - DNA, 1018 bp, Arabidopsis thaliana
  unsure (1)..(1018): unsure at all n locations
agaggttccctcaaacaaggaccaaccagaagatggatcatccaacggtaataacggtgatgtcaacaacaactcttccccagtcaccaatcaggttattttgccttactttaagcttcctggaatctgtcaagtgctttaagcataaaatggcgtgtgttctttctcctaagatgatcaaagttttaagatttatgatatgattgcaggatggtaacacagccttggccaatggcaatgtgattcgcgagaagctgtaagatctatgctttccttttgctttttcttattagttctttgtccatagagatgttatgtttatagtcttggatctgacgaatgtttcttctgcaggaaaaagtccatgtttcccccgtttgagtctgcggaaactcgtactctcgctgagagtttgagtaggtaagtcattgtggctactgatatatttttgctcttggacatcatgttcttgttttttttgatgaactggtgtgtttcagggatatcatccgtgggaatccaaatatcaagtgggaaagcatcaaaggtttggagaacgctaaaaagttgctcaaagaagctgtggtgatgcctataaaataccccacgtatgttatctacgccattcttgccaatgttgatacctttcagtttattttagtacttgaatctcaacttctgatgtcaggtactttaatggtctactaactccatggaaaggaattcttctttttggtcctcctggtaccggaaaggtgcgatgattctatctcgaatgtgtttttacttttgaactcttactctcttttgcatttcaattcatatgcacaccaaaccattaactaatttcttgagcctagctcaattagatcttgtaaagtttattttcttgatgcataacagtcttattcgtcttgtgcagactatgcttgcaaaggctgttgctacagagtgcaatacaacattcttcaacatctcagcctcatctgntgttagcaaatggagaggtgaatatttt

SEQ ID NO: 20915 - DNA, 507 bp, Arabidopsis thaliana
tgacctcttgcctgtaaggcaacatcatatcgtccctaaacacgcgcgagtttgattcaaccaccccccaaatatgacctccttgacgtgcttccaacgcaatcactatgcacaaaatatgcttaaacgtcccaagacaggtgcagaaaatcaccaacttcccaccaaaattcgctatcttggaccatcattgactgagaataggcaaatgaaaacccatcacaggtctccaaaccgattcattcggataatataccactatcggatgtccaagagaacacgtacgatcaactgtatacaacaactctccaatcacagtaaacgacgacgactggtgccaagatctcgtcaactcacttgcaacaccccatgactgccataaaccttgtactggtttgtacgcaaaacaaccgcaacgatccagagcgaaaatgctcccctgcgatcacacatatgtagaaaatactccattcgcactagcatcgttagggcatcactagacacagt

SEQ ID NO: 20916 - DNA, 872 bp, Arabidopsis thaliana
gtctaaagtacatacaaatgggtggattgattcttaatatagaaagaattgcggatgggatggtccaaattccatctccgcagatcagacctgaagctactgcacccgagtaatcatctgcgtctttcttattcatccgttcccatacgagcattatcacggttcctacgaacatgtcgatggcgaagtaagctcctatgtagaatggaccagccattgccattggaagtggtatcaacttagagatctttggtggtgtcatgtctctaattagatttacaatcagagcagcgatgaagaatccacaacaaagtgccaaacagtgtttgggcagtttggcaaagccttcgaccccgagaatagccatttcgcggtagatgaccgcgtaaggtgctttgtatagaccatcaggatctccaatatcaaaagcagtccaaaacagccagaacgtgagaggagcgattatgcaacccattgctgtacccaaaagctgagttacaaacatggattttgcagatgatagtgtgaggtaacctgttttaaaatcctgcatgagatccgctgcagttgagacgattgacatcataatgccacatgctgctaaaccggcaatgactccaccattatttcctacaattgaagcaacgatgaaaagaccagtctttccgtaggttgaaggcatgctcatatctgtgagcccggctccataagaattgcaaaaagcaagacccggggcaactaagtatgaacagaggacaaagtaccatttcaatggtgggaatacaacgggattatagcggttgaaatagctgcaagacccacataaccagaaaccgcaaactcgaggggtatacggtccttgagaaatatga

SEQ ID NO: 20917 - DNA, 823 bp, Arabidopsis thaliana
gtgttagatcaagaaagagaggatgatgtataaagctcaagaagttgcttagaagatcttatttttgtttgtgcttgcttgcttcagctaatattatggcttgtggaaactgtgatctagcgtgtagaagacaaacgattcccaatttacttgtctatgctttgagccaattactacgcttgcgttgaaagttaaccgtatttttttgttcttttcccccagatcatctgaactatagtctgaattgtgaaaatttcatatcgtttaacaatttaggtttacagttatttgtaaaaccaattcccaaaatgattagtaaaaaaaactcaaaatctctagactctaaataggctaaatatcttaatggatataaaagagcttaatgggcttataggcccattagagacggcaccactctaaataaacccctctttcttcaccgtccgttctaacttctagaaaaatcgccagaagtgacgaaattgaaaatctcagatttctcttaatcggcgacggagtaacgaaacaaggagaagaagaagaagaagaaaatgacgactcgaatcgctcctggtgttggagctaatcttctcggccaacactccgctgagaggaaccaagacgccactgtttacgtcggtggtctcgatgctcaggttttttaacttttaggtttcgtgaaatgattctggattttctcatcttcctctgtgagttggtgaaattgatttaaatttcctgtttgaatctcagctttctgaagaattgctttgggaattgttcgttcaagctggacctgttggtaagttagatgactatgtgc

SEQ ID NO: 20918 - DNA, 1096 bp, Arabidopsis thaliana
tcaatcttatgactcacctatacctccacgtgcccacaaagatctcagtccgtctcactagtagaaaataatggtggagtcattgccggtttagcagcggatctcatgatgtcaatcgtctcaactgcagcggatctcatgcaggattttaaaacactcgttaaagagacaaagagtgtcagttaaaacactggaattgttttagctgatgggagacaaagagtgtcagttaaagagggatcagtgaggcttgggccgaatctgacactaaaatcaaatctacaactatcaaaaacttatggaacaaccttaacgacttcttgttccaaactgcccgcatatctcgctaatatactcgggtgcaattgcttcaggactgatctgcggcgatggaatctggaccatcccatccgctattctttcaatattaagaatcaatctacccatctgtatgtactttggaccatcctagacattgttatcatgttaaaattttgttgcattatagcaaaaaatagagtttatccgtctcactctatctcataacatgacattttaagtagaagaacacagaattataccaataaacatcttcatgtgtgtggcataaagtcaaacagtcaatgttgacctacgaaactttaattgggcttcttctataagctagaattgtcacgagggaggaatgttttcaatattactagcactttgctatcgtttttggctccaaaaggtgtttggcgatgacaaatgcattacattgatgtaatgagattttgttgattgcgcattcgttcccattttgtatgtgacttttttttttttgaatggttaaatctaatgaatcattccgaaaaaaaaaaaacaatcaatcacaaccttatttttctaaaagcaaatgaaaatgtgatatgcaatacaattcttatatccctaaattttaatacaattataatattattaaaacgtaataagtcacaagaaaaaagtattttttcacaatataaacattattacgaatttgtaacgatttgtgaatggttggaatacaatcgtcacaaattttatttgtaagaaaaacatcataaaaattgaa

SEQ ID NO: 20919 - DNA, 605 bp, Arabidopsis thaliana
caaccatatcatggcagcagccacatcaacatcaggagctgtagctgtttcggctatattgggagcacaaccggttggtacggagctagagacggtcgcagaaggaaagatgatgtcttccacgtttgtagatggagtttcacgtgataaagcggtagaggaaaaccctttttgccaagcagtgaacagaggagaacccgaaatcgtttgaaactgtgaataaatgtcggagtagggaaattttctttcatcaaacaaaacatgtcgacagatgtagactttgcccgtaggtggatggagacaccgatatcccttgtatttgttgttatatcccaaaaacacacagaggagagactttggatcaaacttgtttttcgcatagggacgaaggtaggggtagcaagcactcccaaaaacacgcagggctgtgtaaacaggtggtgttccatgcaacatctcatagggactcttattatcagacaaagtagaagaaggcagaagattgctcaaaaagtttgaagtaaagaatgcttcaacccatagcttatgaggaaccttgctatgaaacatcacagaaaggccaagttcagtcaagtaccgatgtc

SEQ ID NO: 20920 - DNA, 571 bp, Arabidopsis thaliana
gtgaacctttacctgttctccatgttggtgatatccacaattggggatctcttcgatgaaccattcgcatgaagactctttggtgaggccaaccaattggaaaggctagtattaacgattatctccttcagtagtggttttgcttgatcatccataatcctctttcaacattctctttcattacccgtttaactttcactggccttgctttaaccgctttccactgagcaagattctccactggattcaaaagaggagccacgtcctgctcattctcttcttcttcttcttcatcttcatcatcagcatcatcttcatagtcgttttcattatcggtgtaatagtcttcatcttccaaatcactctctccataacccatttcatcatcttcatcctcaaaactatccacacagttgtggtatctatagtttgaaggatacacagatctactgcttagatcctctggtttcttatctatagccgaagatcccttgcttcttcctcctttcccctcttcatcatcactgcaagcattctcatatcttgaaggtacaataggtcataggtttgt

SEQ ID NO: 20921 - DNA, 799 bp, Arabidopsis thaliana
aagagaacagctccttcaatctgaacactttcatgtacctgagtttcacaatctatttgcattgtatcaccagctaaaataatagacttcctcagatgatcatttctctcataatcatttcctggactttgagtttcattgacttgctctgttcctacagggtctgttcccgaagtgggtgctgtaccaataccttctatatctgagccaaagccaccctttgcaactttatcagagcttggatactctgcttcttgggtgttttggccttcctgactcatgatttcacaatcatgcttttgggtagcatctgcatcctcacatgacgtatccacaacttcatttctggtagacctttgccctgaagtggacgagcttgccctggcagcaaaattcaaatgggaagttgctcttttatctccctgcgtattagctctgttgggacttctgtttattggattaagatcaatatctagtgaagtattgtcacaattatcctcatcttctagagttctctgcatagtcttgagctgttcctgctgctttgcaaacaaagccgagatctcctcagtcgtagaataaaatgcccgcatctgagtttcactgcatgaagattccgtgtgtcaatagttagaccaatcaaatttgcgtgaaatgaatcttaatagtttaaggcaacattttacttgacggttgaaggtgttaaacagaaagtaggttacccaaccaatcatacacactagaaatagcagcctaacgttattataccatgcatgcaaatgttcttaccggagcatga

SEQ ID NO: 20922 - DNA, 782 bp, Arabidopsis thaliana
gagacaaagagagagaggttcaccggaaccctaccttccggcttcacatttcagtcaggcaagcgcttgctcttctcccagtatagcaatcctacccgggtgattcagttcaagcgtgtgtgaatatcgattcggctctttgggcttttaactaaaggcccattataatctaaaagggctccaccacgtcattttcaattcgttaattgaaaaaacatattcttcacgtgccgctaacaacgacctggagaattggaaatatcgcggaacaagaacgccaacgtgttcttcggctgctttagacttttcttattataaaaagtcaaacctccttctcaaccataaattaaatttccactgtagtgtcaagttacatagaaacaaaatccatggcttcagtgaattctcgaagtggtttctgcaactcaaactcaacattctacagcaaacgaacaccaatcccactcccgccaaatccatcactcgacgtcactactttcatttcttcacaagctcatcgtggccgtatcgccttcatcgacgcttccacaggtcaaaacctcaccttcaccgagctatggcgtgccgtggaatccgtcgccgattgtctctccgagatagggattcgcaaaggccacgtcgtcctcctcctctccccaaactcaattttattccccgtcgtttgtctctccgtcatgtcactaggcgcaatcatcaccaccacgaatccactcaacacttcaaacgagatcgctaaacagattaaggattcaaatccagtc

SEQ ID NO: 20923 - DNA, 1020 bp, Arabidopsis thaliana
gatttaagaacataatagaataaatacaaacttactcttaacaagtccaagatctttaattatccgcaacatataaagtaaacgagtaccttgacagcaacctttgttccatcatgagtgcgagctacatgaacttgagcaagggaagcacttgcaattggaacagggtcagattcagcgaataccagcagatcctctacgatagcctagtgagatgcaatcataactcaagcgtttaaaactctggttatatacatgaagacaggaacgtaaaatagaacatacttggtctggcatctctccaacctctttcttaaaaacctcacatacttgctcatatgaagaaatagggcatttgttcaacatggactccctcatagtacgaacatactcttcaggcacaagatattccttgaaacaagaaaaccgtaaaacccgttggttttcttaacataacataatcattattacaacttgagacattcaatgctacagaaagaagaaaaagctttacatactagttgtcctatatgttggccgagtttgatatagattcctccatttttaaaacagagctcttgaagcttttgagctgaccttaggtggacttcatgtttgaccttagctctctcactgcttccctcagccaaacccaacaacgagtactcataatctaacacaacacaaaccacaaaaatatatattgattcaactatgcaaatcccaattgtcagaaattgaaaacgattaatgtttaattccacaaacttaaagctttccaataagattagtgcaaagccagtctcattaatcaaagcacagaaccaaatcaattgaaaaaggtgcaatttaggcattgaagcgaaacaaatcatgtaaagtattatcctttaatggtttaggttccgtaccgagagcaatagaggcggcggtaacggtattgcggtagagacgaacggggatggaggtgcaaagcttgagggttgttgatgggtcatcggaggaagcaatgaaggcggc

SEQ ID NO: 20924 - DNA, 785 bp, Arabidopsis thaliana
tgtaacagctgtgtaagagagctcaaaaaggtgtgtttttgaaatgcaggaagtgctggtgatgttttggaggatgatccagtgggaaagcttaaggtttatgtatatgagcttccaagcaagtacaacaagaaattactgcaaaaggatcctcgatgtcttacacacatgtttgctgctgagatttttatgcacaggttccttttatctagtcctgttcgaacgcgtaatcctgatgaagctgattggttttacacgccaatttatcctacttgcgacctcactcctaccggcttgccattaccgtttaaatcgccgcgtatgatgagaagttcgatacaactaatctcatcaaattggccttattggaatcggactgaaggagctgatcacttctttgttgtgccccatgactttggagcttgcttccattatcaggtagattatctctgcattcaggaacaaactctattttttatatgcattgaatactttggtggttgctgttcatcaagaataccctgtgatcttacaatgatagatgatcattagcttaaaattagctgttgtatcatcacattagtacttagttacatggaaactgagaatctgtttatgagtttattgtataagattgtggaatattccaatgatttgtgtgggaattgaagatttgattgacattaaacaggaggaaaaagccattgaaagagggatacttcactactccagcgtgccactttggttcagacatttggtcaaaggaaccatgtctgtttggacga

SEQ ID NO: 20925 - DNA, 870 bp, Arabidopsis thaliana
gactgtacagtgagaatcgtcatagttgatggagaaattctacaaaagtttagagcttttccctttcgagaacaaacgacagagaagcaaaaaactcagactttactggcttcagttattgcaacaagccaacaaccaaaacgggtcaaaatcaaaatcaatggttggtaataaacgacagcgttttagtacagagacccgaagagtggaaggttcaaagtttccttctttggtgtctctcatcaaatgagagtgagccgtacgatttctctcctcttcttgttttaaaaacctatcaataatattcttcttcttcctcctctcaaatggcggctactagggttcgttgttgtcatagcaatgcagctttcaccagattgccacttacccgccaccgaaactcgccgacgctaccgatttctctaaatcgtgtcgatttccctacgctgaagaaattatcattacccattggagatggctcctccattagaaaggtttcaggttcaggcagcagaaacattgtgcgagctgtgttggaagagaagaagacagaggcgataacggaggtagatgagaagggtatcacgtgcgtgatgaagtttggtggatcttcggtggcgtcagctgagagaatgaaggaagttgctgatttgattttgacttttccggaagaaagtcccgtcattgttctctctgctatggggaaaactaccaacaatctcttgcttgtaatgctgagattctctcccttttctctgttttctattcaaagttttgaatttttttgattggaattattggttttgttgctagtgaaggcgggagagaaggcggttagttgtggtgtttctaatgcatctgagattgagg

SEQ ID NO: 20926 - DNA, 1261 bp, Arabidopsis thaliana
acatgaatcaaatactatataacttcagtgtattgacatacaacacataaaaacaaatagatgatagtaactttacttacatggtctgcaagttcattgacatcgtgtaatcgcatcggcctagtgctgtgcatcaaagagaaccatcgtgagctgaagtctgcccacattgcttcagctttctgacctgtctcttttgttgttttgaccttctcaacaaactcgagtaatacctcttcgcctgaaaaaaaaatacagagaccaccactcacaggtcaaaatcgtaatagcaaagtgataaccaaatagtttgctccaccaagccttacatcgtttcaagtggatatcagttagcattcccataggtagatcgggcggatccaatccaagctccatcaacgcgtaactgcaaagaaacgcccaagatcagaacacccacacatagagaaggattcttgatagaaatgaagaaggttacaaaaatagtacttgtaaatctcttgaccacacagaactttaatgaagtttgcaacaaacgaatcaagcttgcaatgagcagaagcaatgccaagctgccttagaccaagagccccactccttacttcgattccatcatcctgcagaatcataagaacatcaaaatactcaacaatcacatagcaaatcaagtaacaaaagaagtgacttgaggatcaaggtacaatgattagaccatatcaattgggaaaaacttatgaggcttcttttgaatcttcttctcacgttcccatggctcaaactcattccctgctatctcctcaaaaagccttgcaaactctttgatcgcagcttcttcgtcctcccattcctcgagcctctcttcggcattagggtcatctcctactttccctctcttgaagtacatgttcaggttactatcgggtaccgtgactagctgcataatacaatacctacaaaaaccaacagatcagaaaacccatcctgcctcaaaaaaggagagactatcttaagggttcctcagtatcatactcattacgcccttttcccaaatcgcatatcgagaaggcacagttatacaagagtccatctttctcgaagatctttcctcctctctcctgaagttttgtgtccatgtacactcctcttttcccatacattttgagctgaaaatatcaaaacacaaatcaagattttgaagctaacctatattgaaattagtattactaattgagtaatcaatacctcagcagaaaaggattca

SEQ ID NO: 20927 - DNA, 627 bp, Arabidopsis thaliana
gcttagaaaactgcagctgttagaaaccagttctagtgaattcgatgtgacttgtaactaccttgattggttgaccgtgttgccttggggaaatttcaggtgtgccatttgtttcatgcttatgtcttgaagagagttatatataacagcatttgtaattcatttttttgtgcattgattgacaaatctcatttataatcattttaatttgatttgcagtgatgagaattttaatgtcctacgggcaaaaaagattcttgacgaggatcattacggattatctgatgtaaaagaaagaatattagagtttattgctgtgggaggacttagaggcacttcacaaggtcgtaactttacctttctcattcagctttcattgctaaaactttttgtcatcatcatttataagttctgaaggtgagaatttgtaaaatgtgtcaacagggaagatcatttgtctctctggcccacctggagtaggtaaaactagcattgggcgttcaattgcacgtgctcttgaccgcaagttcttccggttctctgttggaggactatccgatgttgctgagattaaggtatattatatatacatggcaaaactataattcaaatatttataaataatca

SEQ ID NO: 20928 - DNA, 669 bp, Arabidopsis thaliana
agtggtagggcactgtggaccaagttccatgcacaagctgtctattacaggcgccttgtggagttgcaatgatttgttaagaaaccaccaaacgctcttcttgctttcatcatccatgtcatctgtatactcaagtgtccttaccatcgtccaaatcgagagccatcgttttgacagaatcatggtggctactacgtcttttgtcgggagaagatccaatatcactacgagtaaatcttccggtaaaacactgatcctgtcttcacaaccgatctcttcaattttggcttccgccatcgaaagcaaccaaaataatactagggtttaggttttttagtttcaaaacagcattagttattaacttatatagtcagacttattctacgtcgacggccaaccggcccaaccggttccagctaggcctaaagaggaaaaagcatgttggaccaagagcaactaaagccccattcaataggttccggctggagttacgctataaccaaaggcccaaacacagaataatttcacattatgattgtaatcaaaaggtaatctcctgaaccgaaccaattcaaatcagaccaaaccgatcatgtcgagcatttgaaggagagacattgacgcaaaagagaatcttaaatctacacgcttactatttaactgtcgacg

SEQ ID NO: 20929 - DNA, 685 bp, Arabidopsis thaliana
gtcctcctttcccgcctttccatatgcatctatcactgtagtataagtgattgcgttcggcattacacccctttttcgtcatcatctcaatgacaccagcagcttccttgctaaaaccagctctaacataagcagcaacaagctcattatatgtcacagaatctgctgggcagctattttcctccatctctttcaaaacactcaacgcttctgtataaactcctgctttaccaaaaacttgcaacaaagcattgtacgtaacagtaccaggttcatagccgcatgacttaagttcagcgaaaaactccttggcctctcttaacaaaccttctcttgcacaagcagagagcacagtactacaagtaaactcatcaaacttcaatcctttgcttctcatttcatctaaaacccctagaattttccgccaagatcgacccattttcccgaaaacatcgagaatcacattgtaagtcaccaaagtaggtgaaggaccatctctttcatcctctcaaacaaatcgatagccttttcatacttcccagtccgtgaatacgcatgtaagatcgtcgtgtaagccgaacatcgaggagatatcttgtagaggaattttatcgagcaacttagctgcaacagagtactgagattctctacctaaaatcctaacaaagatttcgataacttgatg

SEQ ID NO: 20930 - DNA, 487 bp, Arabidopsis thaliana
cctggtgcatggaaaaagagagtgcgattttacgatactagctagtagaacagaggaagaatagaaaagtagatgaagtagttaaccagttccatttccataagtgttgtccaatattttgagcttcgttctcagctgttggacattgaccattagcaatccgaaaaaccccttaaggtcaccaatctgcaaaattggtcacaagagcacaaatgattgccccaacaattccagaatgcagaagatgaagtcactctttattatactaacgcaccttcatgaatttggcagctccgaagaactcttcctgcttaagacgtgatgtcttaacatatcgagaaacataagtagctttcccatctttgatgcgtaccccatgaatcatcctgcaaagttatggaacatgaaggaagttgagcaaagaggaagactattagaagatgaaatagtaatccaggagatatatttgaagggagacaagaagatg

SEQ ID NO: 20931 - DNA, 525 bp, Arabidopsis thaliana
atggaagaacactttgacccatttggagaccccagcgtaatgcaacctgtgcaggagtcttgccgagcttctcagcaacaccaccaagaatagggttcttcaaaacatcgctcgttagccacgttgttcctggagaacccaaaggagagtacccctaaaaaaatatcaagtcatgtttaatttccgagatcttttgttagttttttcataaaggatatagacatgtttgctctacatactgagagatgaacgcctttagatttgcagaaatccctgagcacgttttgttgccatgaagggtgacactccacctggttaacagcgggaggaacacgagccaccaccaagagatctgcgagtttctttgaggagaaattacttacaccaatagcacgggccttgcctgaatcaaagagtgattccattgctttccatgtgctaggaatatcagttggcaaaatgttctctggtttaaagccagtagatcctttcttgaggctaacaggccagtgaatcttcaaaaga

SEQ ID NO: 20932 - DNA, 1329 bp, Arabidopsis thaliana
cttattgatgtgagaaagtgctcagattttggaaattgagactttcataccaatgctgcttcagaggcaagaagatggtcatgcacgactcaagcgctgtatattgattggtgatcaccaccagctgcctcccgtggtgaagaatatggctttccagaaatatagtcacatggatcagagtttgtttacgaggtttgttcgtcttggtattccttatattgagctcaatgctcaaggaagagccaggccaagtttagccaaactctacaactggagatacagagatttaggagacctttccattgttaaggaagcacccatcttccaaagagcaaatgctggattctcatatgaatatcagttggtgaatgtgcctgattatgaggggagaggagaatcaacaccatctccttggttttatcaaaatcagggagaagctgaatatatcgtcagtgtctatatatacatgagattgttaggatatcctgcgaataagatatcaatattgacaacatataatggtcagaagctcttaatccgtgatgttatcaaccgacgatgtgttccgtatcctttcattggcccgccgagcaaggtaaaatatcctgctcaaagttgtttttgttagttgctgatatggtatggattgtattgagagctacctgtataaataaatttcggtttggtttcgatctaggcatttaggtttcgattttggttttttggtatgcaatacccccctaagaaagttatcacagagttagttttgtgttttgactgttctaattttatttcctcaggtgactacagtggacaagttccaaggacaacagaatgatttcatattgctctctcttgtacggacacgcttcgtaggtcatctacgtgatgtaagaaggttggtagttgcaatgtcacgtgctcggctcggtttgtatgtgttctgccgccgttcgctctttgaacaatgctatgagctgcaaccaacgtttcaacttcttcttcaaagacccgatcggctcggactcaattttaatgagaacacagcatatacagatcgtgtggtggaggaagttgaaaattcttatctcgttcatgatgttgaagagatggcacacatagttgacgacaggatgaacaagttctaccaggtaatgacacaatctgcttgcttggataactgataactaagctttcttgtttagttggaaaatgatttgtttcatgtattggttaggcacaaggagcttatgagcaattccaaaaccacatggcacagatggaagatggtaacacgacatggagagtgatcagtagtagatggtgatg

SEQ ID NO: 20933 - DNA, 490 bp, Arabidopsis thaliana columbia
ggggttagttttcttacactgtctaaagaagcgttgggagtgtgggtttcatgacttgcccacgcaccaatcttagtcaccaggcagacaaaagctccctaaggatgaaggctaaggcatgaaacgaacaacaaatgatcagttatacaaataacaaaagaagtttaatagctgaacactgcagcacacagagactcacaaagaaaactgaagcatttagtaaactgagaattctacatgtatctggtgaaacactcctgtaaatcaatatcaggtctcgctactgaagaaaaacatgaatggttaaaagttgagcctgcaaagagaaaacaagaactaaggtgtaatgtgctatgagcagagcttgatcatgaaaaacataagaaaattgatactctcaagcagaattctcttccttgctcaacgcattcacaactctcttcaagataacttcaataggctggtgagcattttcaaccgctttggagat

SEQ ID NO: 20934 - DNA, 696 bp, Arabidopsis thaliana
gctaaaaatgttgtaccaaccagactattgcaattgatgcatctccggttctcaggaagcttcaataaactccggatagccttttcggttcgctcgtcttccttcattcttggaaaaatgcctctctcatgaagaaaaacaatatctcaaatgagaaatcctatcaaagagcaatgtcatcatttacctgagaagaaattactatcttaagccaaaaacattgaggttattctcgtgcatctttaaatccttaatcttacgttacatgcgagaaacatgggaaattttaagcttcaagcccctgatgctctaaaatgttcaaacaaacaaaaaaaaaaagagaagagaaaaaccttacaaaaagaagaggaaccagtcgaagaagagaatttggggtggaaagaatgatgagaaagaacttctctcaggaggttgtccaagatatgacaaatttaggaaataagtaacagagagatcatgaagccagcaaacgaatgagacatcttccgacaaaactgctaacttcaaagatttcccgccgttggaatttctctcaccaccttttcttctctctcatttttcccaatgttttacaaattataagagaatactaaatttttggaagagtattgacaaatgtgatttgtaactaatttttgtaattatatgactacatggcaagtgttgcaagtttga

SEQ ID NO: 20935 - DNA, 599 bp, Arabidopsis thaliana
ctgttaacgacaaccaaaagggaaaccgacaactgaaaaatgtcgcaatattagattagggatgatgagtaagctaaggtaccttttgtcgcctaacgttaagcccaccttgtcagaaacagactctaaagcttccttccatttcttgatttgttctccactcgaagtcttagccaacctccagaagttgcgaccaaactcagccttttgatatctaacagactctgccttcactttaaagaagataggaaccactcgtagcttgcatttatcggctcttttcttgatccttgcaagctcgtccaggcaccagcttgactctgcgtatcttttggaaaatatggtgagagccatcctcgattgcttgatccttgcaaagagatgtttgaggtctttccctttttgttcgtctttgtctatgaagaagttgattccatgtcttttaaaagcgtcaacgaggtggctcacaaagctgcagcgtagtccgtctcccctggaaattgatgaacacttggatcttcctattactactactccttttcatgttgtttaatttctttagttgtgagcgtgcgaatgaagagaagtggttagctttg

SEQ ID NO: 20936 - DNA, 704 bp, Arabidopsis thaliana columbia
ggattcccctgtcaatggtttgccatgcattgagcagaaccgagccttgtgcgtttcttgtacttcacaagttagtgttcatgaaattgatgaagtcttgatttactcacttatattttcctctacattttccagaaatgttacatacctgtgtcctgccaaacactctcatatctcagaaccacccagaggagcgatcattccggacaaggtatgattcctcaaaggaattcgtcatgaacagtagtccatctctactgcatcaaaataaatagaaacttaggtttttatagcgtttatgagaatctacttgcttgcatctcaaatgtctatgttttcttaccagtctatttatctgctgaatattcattgcaaaacaagtgttcttatgaaagttcaattggcagatcttgacgtcagtagatataaagccatttcctcctttatggcatgaagacaatagcaaccgacgccgacaagcccgagataggtaaggagattttactgcagactgatattttgaagatcatagtgtgaattatgctaaaagaaccatatggtatatctattgtgcaggccgcaagtggttggagctatagcagggccttctctgggagaagcagctcatcgtctgatcaacaacacccttaacatgaaatcctctactggtgcggcttcgggattaattgaccaaacggatacta

SEQ ID NO: 20937 - DNA, 783 bp, Arabidopsis thaliana
tacttgtttggatctagttttctcctcctcgtcatcttcaagtttcgtgtgtgccactaacccgacgcgagtttttctctttttagatcttcaattcttcgcgttgatctcaatgtattgttaataactttttcactcattgggttttatatacttgcatattaacatatgttctataaattacaataagacacgaacctgatcaaaataacagtgttcttaattaacgatgaaaatgttacagcaagacgtttcgacccatcaaagaagtatcaaaccaagtgacacacacaataacacaagagaaactggagatcttcaaatcaatggagaattgggcccaagaaaacttattatcttacctcaaacccgtcgaaacttcatggcaaccacaagactttttgccagaaaccaaagacgaagaccgattctacgaacaagtgaaagagctaagagatcgaacaaaagagatccctgacgattactttgtagttcttgtcggagatatgatcaccgaagaagcattaccgacttatcaaacggttatgaacactctcgacggagccaaagacgagaccggtgttagtctaacaccgtgggcggtttggcttagagcatggacggcggaggaaaatcgacacggtgatttgtaggtggtgtcctttacttatcaggtcgtgttgatacgcgacatgttgaaaagactattcaatatcttatcggatcaggcatggtacgttctttttggtattggcacattgttcacacccataaatataggtg

SEQ ID NO: 20938 - DNA, 1125 bp, Arabidopsis thaliana
ggagcttctaaagtctccggcggtgcgacctctcgggctagtatctggaaatcgccagacgttgtcgattctcgaccatgaatctgtcgctggatcgtaaatttctccgtcagatcggaatcttccttgagattccgttccgtaaccgctcagcacgcaaaaccttagacccataccaacggcgaatccttgacattcgtctcttccttccgtcatcggagtaaccgacgaccactcgtctttctcgacgtcgtacacctccgccgagcgtaaagcgtttttctgatcgtcgtgacctccggcgacgtataccttcgttggacttacggaggcgcaggcgaagaatgatcgtgattccttcattggcgcacctcgtctccacttccttccggcgaattccagaacgtaaacgtctctcgtcggctgtaacgtctccggatcccaaccgccgatgagcagaatcttcccggcgtcctgaagcacgacgcactcgcagaaaagcgggatctgctcctcctctggaaacgcaacgcgatgccacgtggacatcgcagcgttgtaaacgctcaatccaaaacgcggcgtgcagaaaacgcgcgggtgtgactcatcctctgattttttctcgtcaaccattaatgtctcgtcaaccgatttagacgctggaattggcggcgttagcggttgaacgaggcagaggagaagctctgttttgccgcatctccgccgttcttggataaaagaagagtcggagagtaagtacgccaagaacggcaaacggatctcatggcggattggaattggaacggaactctgaccaaacactccaaagctagttcggaaggtaaaccgggaatcaattcgtgacattgctgaaaatctccacctttctttttcgacacttccatagtcatcgaacttaaacaagtttgagaaaaacagaacagagagtgtgtttgattgagcaaagtgtctatgtgtagaagaaaacacacaaaaactgacgaaagttgcgatttaaatttgagtgagtgtgaagctacaaagaggtgcagagcctttaaatagggaaagaggaggatgagtttgcttgcggttgaaataacgcgacggttcgtttaaatt

SEQ ID NO: 20939 - DNA, 827 bp, Arabidopsis thaliana
cacaataagacacgaacctgatatgaaaataacaattttcttacaatgaaaatgttatagcaagacgagtgaagaaacagacaagaaaaagtttcgacccatcaaagaagtaccaaaccaagtgacccacacaataacacaagagaaactggagatcttcaaatcaatggagaattgggcccaagaaaacttattatcttacctcaaacccgtcgaagcttcctggcaaccacaagactttttgccggaaaccaacgacgaagaccgattctacgaacaagtaaaagagctaagagatcgaacaaaagagatccctgacgattactttgtagttcttgtcggagatatgatcaccgaagaagctttaccaacttatcaaactactttgaacactctcgacggcgtaaaagacgagaccggtggtagtctaacgccgtgggcggtttgggttcgagcatggacggcggaggaaaatcgacacggtgatttgttgaataagtatctttacttatcaggtcgtgttgacatgcgacatgttgaaaagactattcaatatcttatcggatccggcatggtacgttgcactcccataaatatatgtacgcttaaaatgtaaattataatttcttgaggatcaaattgatgatgtttataattatatttaaggactccagatttgaggacaatccctataatggcttcatctatacttcttttcaagagagagccactttcatctcccatggcaacacggcgacgtagcctcaaccttcggcgacacaactctcagcatggtctgcggaacaatcgcggcggatgagaagcgg

SEQ ID NO: 20940 - DNA, 618 bp, Arabidopsis thaliana columbia
gtttctctatcatcccgatcagtgtggaaaggaactgtgtgtgaaaggtctcatctctttcggataaaatactatggtagttttgataaacccttgggacggttcttgagagatcatttgttcgatcaggtgagttattttcttttttgttttgttttataagacatctatattacagcttcaataataattagaaacctaaatgcatgctcaaaactttttcagagttacaggtgccggtcatgtgagatgccatcagaagctcatgttcactgttacactcatcgacaaggcagccttacgatatctgtcaagaaacttcaagattatctcttacctggtgaaaaggaggggaagatctggatgtggcatagatgcctgagatgcccgcgacttaacggcttccctccagcgactctacgagtggttatgtctgatgctgcatggggattatcgtttgggaagtttctggagctcagtttctcaaatcacgcagctgctagtagagtagcttgttgtggccattctctgcatagagattgtcttcgcttctatgggtacttttttcttgcgtccactcctccttgggccaaatatgattaattgttaaaaggggat

SEQ ID NO: 20941 - DNA, 650 bp, Arabidopsis thaliana
ctttgttacatcaggagcaaacaagaaaaatacacatgaggaaaaacaaatcagctaaacaaaatgtcgtttacttcaaaaaaaactcttacttaaatctcactctattatctgaacttgtacaacatcaagaagacccacccttcttctcttcaaaaccttcttccattgaaacttggaccatcccagtaacttttttcaacagcgcaaaccaaaccagaaaactcaaatgctatgtatctaacctatgatgtttgttctttacttatctgaagcacgggagcagatcttctccatatgcataggccaatcttctccaagtatctcagtattcaactccataccagcacgaaaatctgacatcgatacatatgaaagccttctgctttgctgtgtatactggtaattcatctctctaacccgatcagtcccacatcgagtattagccaaactcaaacaaggctcaatcagccttctcataaacacatccaatccgctattaagaagactaacagagtccatagttatctttagcccctccatctccaatctcctctccaaccgactcctcagcgttcttgtatcaggtagctcaccgttgttctgacaagtctcgcggttgaaacttctgctacacatagacacattgg

SEQ ID NO: 20942 - DNA, 1177 bp, Arabidopsis thaliana
ttacttcaaaaaaaactcttagcttcaatctcactctattatctgaacttgtagaatgatcagcagcatggtcaagtacaacagcagcaacagaaaatgttgagaaacctagggtcagttaagttggaaccgcagcaaattcaggccatgagaaatttggcccaagtgaaaatggaacctcaacattctgagcagtcattgtttctccaacaacagcagaggcaacaacagcaacaacaacaacaacaatttcttcaaatgccggggcaatctccgcaggctcaaatgaacatatttcagcagcagagacttatgcaacttcaacaacagcaactcttgaaatctatgcctcaacagcgtcctcaattaccacagcagttccaacagcagaatttacctctaaggccacctctgaaaccagtgtatgaacctggcatgggtgctcagcgtcttacacagtatatgtacagacaacaacataggcctgaagtaaagcttcttaccataaatttaacttctttcagcctatgcgttttcttcataattgacatttgtgcttgctattaaatgcaggacaataatatcgagttctggagaaaatttgtagctgagtactttgctcctaatgccaaaaagagatggtgcgtctctatgtatggcagtggcaggcaaacaacaggcgttttccctcaggttggtttactgctcaatgaacttatcttgtttgtaatacaattgtaaaggagcttgtcttttgcacctgagccagttattctggataaattacgtacttgtttcatgttatacctctttacatgagtatttttattccacaaacattgcaggatgtgtggcactgtgagatatgtaaccgaaagcctggacgtggttttggtatgttatttagatgatcagtgcagacaatttcctgtacatcttatcaaatattccttccttactgctttgtctctttcattgtttagaggcaaccgccgaagtccttccgcggctgtttaagattaagtatgagagtgggacgttagaagaactgttatatgtagatatgccaagggagtcccagaattcatctggccaaattgtcctggagtatgcaaaagcaacacaagagagtgtctttgagcatcttcgggttgttcgtgatggccaacttcgaata

SEQ ID NO: 20943 - DNA, 826 bp, Arabidopsis thaliana columbia
tactgtgccggattcatctgcatgcagctgttgattgcccctgtgtttgttatattgttttatgcagctttcttgaccttccaaacctgtcagcgtctatatatagcactgatctctgtaatagacttcgagcatttctcgttgcttgtccgccctcttgcccttcaccaacagttgcagagctcgtgattgcaactgcagactttcaacgtgatctttccagctggaacattaggtaggtcgtttagattatttgatttgttgattgtctgttatttttgactggtatcatatttcaatttacagtcctatccaaggcggtgttgatgcaaaagagttgtttcatctatatatcatgatttggattcaagataaacgcctttcattacttgagtcctgcaaacttgataaggtatgtatactgaaatttccgtgtggttttcttcagatatttttttttctctatattttcccttgctctttgttcttctcagcctatgtcgtatcattaaaactaacttctttgatcattacaaaacctgtcattcaagcaggtaaaatggtctggagtcaggacacagcattcaacaactccattcgttgatgaaatgtacaagaggctgaacgaaaccattcaagactatcaagttatcatttccagatggccagaatatatctttgttctggagagtgtaagtttagctgttccttcataacttttgattttgggattgtgaatatattgcgtatacattccactgcatgttataagcgtacaactttactgtatttatggtgtgaatttggagtgaaaaggctgacactg

SEQ ID NO: 20944 - DNA, 742 bp, Arabidopsis thaliana
attgttaccttcaaagaagaaggagattttctcagcgctctcaaagaagtaattatctgtggtgtgcttctacaataatcaaaacaaccattcttataacaatatgatgatgattttgaatcaaaacctttggtaaagaaataaaaacctgatttttggtggagaagatagaggagacggaacaatcaaactgattaagcaactcatccatcctcttccttaagcctcttatctcatcctcactcgcgaacgattcgattaccaaatacccttttttttttttatatccattccattgaattgaattacaaaatcattcttcattcatagagagttacgaggaatgaaatttcagagaaacaaaccttgagagtggaaaaaatcgagctgatctggcgttagacttccggtgattcccataactctggtggagatttcgccgggaaattgataatacttgaaaccaacaaatttatctgttgttgagtctaaaagagataaacccaaacaaaaaggtcaaacattttacactccaattatatatgagacccttttcttccccacgcgcacacttggtcgtgaaccaaactctgtgtcgtgttggcgaaagaagctagttccacgtggatcgtactttctcacgcgcttaagtagcgcatagaaataaactaggaaggtgattctttttttgatggtttgtatttggtagattagagatatcttcaatattcttctccagctg

SEQ ID NO: 20945 - DNA, 596 bp, Arabidopsis thaliana
tggtctcttgattctaactttctttgttttatgtttttggtttttgttgtcaatgaataggtaaaatgaagatatactctagaacggttgctgtttcactcattgtgtcattcctcctgtgtttctctgcctttgctgagcgcaatgacgggaccttcagagttggactgaaaaaactcaagttggattcgaaaaatcggcttgcagcacgcgtcgaatccaagcaagaaaagcccctgagagcttacagacttggagattctggagatgctgatgttgttgtgcttaagaattatctagatgctcagtactatggtgagatcgccattggtactccacctcagaagttcactgtggtttttgacactgggagctctaacctctgggtgccatcatcaaaatgctatttctcagtaagcaacatttggactattgttgttagctgtggttgagatacttttgagtagaaaactaattgtgttctatctcttttgcagcttgcatgtctcttgcatcccaaatacaagtcgtctcgttcaagcacatatgagaagaatggtttgtctctctcttaacttgaaatttttgcagttgga

SEQ ID NO: 20946 - DNA, 495 bp, Arabidopsis thaliana
gcttgatccttgccggaaccgtctccgcctcgtgtttcatcacgcgccgccgtgattcttcgactacgaggttcatgagttttcctccgtctggctcgatcaaccccgatttaacggagaggccacggcgggaaacttgacgggggagagatacgacggagatggatccaggagcataacgagaagcatgatggttatggattaatggtgaagaacgaaatggagaaccggagacgatggctgctgctgaagaagccattgaaggcagattaatttgcttcgttttggctctcttaatctttaagagaacattgattaatcagttttttttgtaattaagacataattagtggatagatgattaattaggactacatattcattaaaaatactcagttagtggataatgaatggacatcggtctaataccattcttaattgatgtgtcaataagcacctaattcaattatttgactaatctatggtataaaggac

SEQ ID NO: 20947 - DNA, 1271 bp, Arabidopsis thaliana
cccacccacctttctttacccaaaatagactttctaaggaaaactcagtcttgaagacttttccggcgagctttcacaaaggagtccggcgtgggagacgcccctccgtacgtgaaaaaggcctagtgctcctttcttgaagtttggtgggctgtgcttgtgttatggtttctgtattgttttcctcctgctttgaatgctcttccaccagatctggtaaactattgagtagttattacaagaagacaagggctttctctcgtcaaaggtccatttaagaagtagtattttacttacctcaacatttacttcaagagtcgggtaccttcttgtctgaacctttttgagaagtttcctcttttgtttttgccatgtcttgaactgtcttgaaccttctcatattgtaatgatgaactgtggtggttggaaagtgtaacgatttcagatctgaaaattaccgttactttgactaaatctctctttgaactttgttgcaaactatctcaccttttggtaaagaaccttttggaagacttaaagaccacaagcttgtgaagactgattccctcttctggtttgactatggatagacgcataccatatcatcttaagggaaaaggtccttcatccgacttctctccacctcctcagaagagaataagagcccccgaaatagatacttcagatcttatccgttacaatgctctcactgtcatggggagacttaccaacccaaaagttcaacgcctctggtcactcatcccgttcctatcaaacagatggaaccttaagggaaaagctattggttcagacctaggcaatggctgcttccaatttcggtttgattttgaagaggatttgcaaaaagttttagctaatagaccttaccatattgatcaatggatggttatccttcagagatgggaaccagtcatagatgcatccttcccgtctcaaatccccttctggattgaacttcaagggcttcctctacattactggaaacctgaaatggtcattacattggagaagaagtagggatctttcagggacatgaacttactccctcttgagcaaagataagagttattattgatggtctccagcctttagttaaagataccatagtggaatttgcggatggaagtgaggttatggtgtacctagattataagaatttgaagaaccattgtcttcattgccaccgactctctcatgaaaagaaagattgccagggctctacgcttcaaatgataaacagattccagcag

SEQ ID NO: 20948 - DNA, 583 bp, Arabidopsis thaliana
  unsure (1)..(583): unsure at all n locations
cctaatctccggtgaaacaaagaacaaaggattcataagacacaaagcagagaaggagagagagatacgaggcttttcttcatctttatggcttctatgaccgagaaggaagctatggtggatccttttctggtcgaggctcttcaaaatcctcgtcatcgtctcaccagttagtcaattttctctcttgtccacgattcgattttgctttctctctgttgtgtttgatctgattttggtcatttcatttcctggtacttttctagggtttcatagaattgggggacaattatgagtttctctaattctcgatcctgtgtttggttcaattatagttaatgttttggtaattagggtttgattagatccatgactattaccaatcctcttgattgctctatgacccaaatcataatcacttgtctttttagctcaatctgaatcctcatgaacatgttagagtttaattactgtatctgganagattctcttaaaatgtggttgatgggtgcttaaaggttgcttctttttttgttggttggtgtgtgtttcgttagttttgcgaatggagcttgatatacag

SEQ ID NO: 20949 - DNA, 679 bp, Arabidopsis thaliana
ccggtttgcatctctaagtacaatctctctattatacacctttgctatatatttcatcgcgttgtgacaatctccacagacgcgtagattcttaatcacacggattggtgtggatggaggagtgctcaaaagtccgaaagcaactgctagcttctcactgtggtagtacagggcacgctctttctcttcttcttccacatctacaagtgtgaaatctgtctcaggaacatacccttcttgtttgatgtctcttatcatgtcttttactttcctgtatatcaactcggtttgccggtttgacctatcatccacgacaaatatatgtatcttgtttttcacctcgatccaactgaaacccgggtcttttttcactttgtgccctttcatcatcgtccgggcaagtttcatctcatcccatttggaagcagcagcatacatattggataaaagaacataagctgatgagtccagtggctctagctccaaaagcttagttgccactttcttccctgtttctgtgtccccttgaactcggcaagctgcaagcaaagttctgtacatcgatgctgatgcttccatggacattgattcgttcattttttcagcctgttttacaattccagcacgtccaagcgcttcatccttactagagtagtgttctatttcaggtttaatgcca

SEQ ID NO: 20950 - DNA, 991 bp, Arabidopsis thaliana
tctttctcatccttggcctcacgataagcagcgtcaagctttttgttgccattaggtggtgctagcccatacattgtatttgatgcttttgtgaacattgtcttcactgtaagacttgatgatgaacaacttggcgttagtgtagtcggtgacaaagtctgcgttgttggattcctcgtgctcctttgcactgcctttgttatttttcttagaatcagcagcagaatcaagctcctctaagacctgagtcttgggctttgaagcccttggtcctcgattttgctcattgaggatatcaaaagtaccattataagcaccacccaaagatggatcactaacccttccacgccctcgactgttgtcaaccccaatccagccttggtttcccatacccacattagaaattagtctacttccatagttagaaccctggccacgaccaccactatgcatataacctctgttataagagttcgaaccagatccaaaaccgtaaaatgatctctgtcgctgtgacccctgacaaattaaagaacaatctacttttaacatataatccaatatgtaaccatgaatagaagaaagctatccatatgtcggataagagtagataagaaaagtgaaccaaccatgggtatgttctggccatatgatccatatgagccgagtggctgaggagataaagccggagaaatagaagaagaatgcctgtgcatatcagaaggcttggaccaatccgaccatattcccccgtcaaaaccttgctgccattcaggaaaaccaaggtttggctggtttccattaaacggtccaatgggatgaggatggtaggattggcgtggtccgatgttatcaccttgttggtcaacaccgacaaggctggtgagctcgggctgagttggagaagtaatatattgcatgctaggaggaactacctgctggtaatatggtgatgccctgaaaacggaaactgttgtggagaatcaactgt

SEQ ID NO: 20951 - DNA, 598 bp, Arabidopsis thaliana
tactaattataatggtgtgtattggacagacgaaagttacatgtcaaaggagcatctagacacagttatagattggataccatcaatgaagaatcttaggttaaaggacatccctagctatatacgtaccacaaatcctgacaacataatgcttaatttcctcattcgagaagttgagcgatctaaacgcgctagtgctatcattctcaacacgtttgatgaactcgagcatgatgttatccagtctatgcaatctatttaacctccggtttattctattgggccactccatctccttgtgaaggaagaaataaacgaggctagtgaaataggacagatgggattaaatttgtggagagaggagatggaatgtttggattggctcgatacaaaaactccaaacagtgttctttttgttaactttggatgcataacggtgatgagtgcaaaacagcttgaagaatttgcttggggtttggcggcaagtaggaaagagtttttatgggtgatccgtctaatttagtggtgggagaggcgatggtggttcttcacaagagtttttagcggagacgatagaccggagaatgttagctagttg

SEQ ID NO: 20952 - DNA, 811 bp, Arabidopsis thaliana
ctttataataaatgatttttttgctgattaatacatatagagttatgagtagatattttgtaactactattaatttgtcttcaaatgaaaatagacggagtactttgataagaaagaaaaaatacacctctaacaagttacaatgttgtgacacctctcgagtcatttctttagcatcttgtacatatataaacgcctaccgacaatggagtcgtgttaacttccatcattatttttctcttgtggatacgttttttttttaaaatggcatctcctgctgtccatagcaaacaaaaaccacatgttgtttgcgtgcctcacccggctcaaggccacatcaacccgatgctaaaagtggctaaactcctccacgcgagaggcttccatgtcaccttcgtcaacaccgtctataaccacaaccgtctcctccggtcccgtgggccttacgcactggacggacttccttctttccggttcgagtcgatagctgacggtcttccggataccgatggggataagacccaagatatccccgccctttgtgtgtccaccatgaagaactgcctcgctccgttcaaggagcttctccgacggatcaacgatgttgatgatgtcctccggtgagctgtattgtatcggacggtgtgatgagctttactcttgacgcagcagaggaactcaatctcccagaggttattttctggacgaacagtgcttgtggtttcatgacttttctacacttttatctcttcatcgaaaaaggcttatctccgtttaaaggtcaaattatttcattttatatatattgatt

SEQ ID NO: 20953 - DNA, 1451 bp, Arabidopsis thaliana
attattcggcacaagacaagcaaaatagatatgcacatgtgccttggaagatgaagatatacttggaacgtgatcatgatctggtgccacggaaacctatatattttgttgcacgtatccctaaatgattaggtccattcggcatatctggcattgtagattttctgcagtacgctcaacttgtagatgaacattatcttatattaggtttttatgaattttacacataaatggaaatcccgggctcatggcaggttttggatactattcacacgtgacgtaatttgtggacaaccaccaaggccaagaagttattagtttggtctcttttttcttctcttctttcttctcttctttctctataaaatggcttatttcaaaggcaaaccaaaactcacatttgttcattacaaaaagaggaaactgacaactgatttcgcgcaagagaaagaaaaatgggatctcagatcattcataactcacaaaaaccacatgtagtttgtgttccatatccggctcaaggccacatcaaccctatgatgagagtggctaaactcctccacgccagaggcttctacgtcaccttcgtcaacaccgtctacaaccacaatcgtttccttcgttctcgtgggtccaatgccctagatggacttccttcgttccgatttgagtccattgctgacggtctaccagagacagacatggatgccacgcaggacatcacagctctttgcgagtccaccatgaagaactgtctcgctccgttcagagagcttctccagcggatcaacgctggagataatgttcctccggtaagctgtattgtatctgacggttgtatgagctttactcttgatgttgcggaggagcttggagtcccggaggttcttttttggacaaccagtggctgtgcgttcctggcttatctacacttttatctcttcatcgagaagggcttatgtccgctaaaaggtacgtattcttacattgattattgatttaaatgacgttatgatattaaatttaacgtaagaacccttaagacacctcgagcagggtgagtttttaatctgagatatatcgtttgtatattggataaaaaatatccatttagctaccatatttagcgaagccatagactatcctaatcgatccacccgcacgacgagaccggtcaagactcaagatggtcatgttgtaatatatactcaattttatacaattgttacattgtagcctaggtttttgagcattactaaatatatagtatcaagagaaatgtccatattttaatatatacataacgtaatgaatgttttgatatgttttttatttcgatgcgtttgcagttttcttgtaatatatatattacagttttcttagccaaaaaaaaaataaataattagagaagatacattgttgatttattttaaagcattgatatcttttta

SEQ ID NO: 20954 - DNA, 585 bp, Arabidopsis thaliana
acttttactacttctggctaaccacatcgatcaaaagtccaaagaagagtatactaacaaatgaaaattcagcttgtgttcataccatcgcctggaataggtcatctcaggtcaaccgttgagttagcaaagcgactcgtccgcagcgatgaccgcctttggatcaccgtaatcatcatcccttacccttccattagcgacgacgacgttgaaaccacctatatagcatctctcacgaccgcatctcaagatcgtctcaactacgaagccatctccgtcgcaaatcaaccaaccgactatcaagagccaactcaagtctacatcgagaaacaaaagcctcaagttagagatgttgtcgcgagaatcttccattcaacaggagttgactcgccgcgagtagccggattcgtggtggacatgttctgttcatcgatgatcgatgtagttaacgaatttggagttccgtgttatatggtatacacatcaaacgctacgtgtttgggaacacacttcatattcaacgaatgttcgacgagaagaagtatgacgtaagcgagttggaagactcggtcaacgagttggagt

SEQ ID NO: 20955 - DNA, 897 bp, Arabidopsis thaliana
ttttattcaaaataatacaaaatatataacccacgaaaagcatggggcaattttctatagtatataagtatactatacctttactttcactaactccgactattcattcacgaaaagtcagaacccaaaaacagaaaatgaagattgagcttgtgttcatacctttggcgggggattggtcatctcaggccaaccgtgaagctagcgaacgaactcataggcagcgaaaaccgtctttcgatcaccataatcatcatcccttcaagatttgacgccggtgatgcatccgcctgtatcgcatctctcaccacgttgtctcaagatgatcgcctccattacgaatccatatccgtcgcaaaacaaccaccaacctccgacccggatcctgttccggctcaagtgtacatagagaaacaaaagacgaaagtgagagatgcagtcgcggcgagaatcgtcgatccaacaagaaagctcgcgggattcgtggtggacatgttctgttcctcgatgatcgatgtagctaacgagtctggagttccgtgttatatggtatacacatcgaacgctacgtttttaggaaccatgcttcacgttcaacaaatgtacgatcaaaagaagtatgacgtcagcgagttagaaaactcggtcaccgagttggagtttccgtctctgactcgtccttatccagtgaagtgtcttcctcatatcctcacttcaaaggagtggttacctctctctctagctcaagctaggtgtttccggaagatgaagggtattctggtaaatacagttgctgagcttgaacctcacgctttgaaaatgttcaatattaatggtgacgatcttcctcaagtttatcctgttggaccagtgttgcatctcgaacacggcaatgac

SEQ ID NO: 20956 - DNA, 1170 bp, Arabidopsis thaliana
cacttttatctcttcatcgaaaaaggcttatctccgtttaaaggtacaaattattttcattcttatatattattgatttttattcacatacattaaaagagaaaataacccttaataatgcatttgccaatttacactagcaaagtcgtgtaactcgtgttgtatccaatagattactaattaatattgatggtggatttgatagatgaaagttacatgtctaaggagcatctagacacggttatagattggataccatcaatgaagaatcttaggctaaaagacatccctagcttcatacgtaccactaatcctgacgacataatgctcaatttcatcattcaagaggtggagcaatccaaacgcgccagtgatcattctcaatacgttcgatgatcttgatcatgatcttatacaatctatgcaatctattttattacctccggtttatacgattggaccgctccatctcctagcaaaccaggaaattgacgaggttagtgaaataggacggatgggattaaatttgtggaaagaagatacagaatgtttggattggttggacagtaaaacgactccaaacagcgtcgtttttgttaattttggatgcataacggtgatgagtgcaaaacaacttcttgagtttgcttggggtttggcggcaagtgggaaagagtttttatgggtgatccggccggatttagttgccggagagacgacggcgattctctcagagtttttaacggagacggcagaccgcggaatgctggtgagttggtgttctcaagaaaaagttatttcccaccctatggttggagggttcttgacgcattgcgggtggaactcgacactcgaaagtatctctggtggtgttccgataatatgctggccgttttttgccgagcagcaaacgaattgtaagttttgttgtgatgagtggggagttggtgtcgagattggtggagatgttaagagggaggaggtcgagacagtggttagagagctaatggatagagagaagggaaagaaaatgcgagagaaggccgtagagtggcggcgcttggcgaatgaagctacggagcataagcatggttcctcggttgtgaattttgagacggttgtgagaaaggttcttttaagggagtagataatagagagtacaatgaaact

SEQ ID NO: 20957 - DNA, 1137 bp, Arabidopsis thaliana
cgctaaaaatcttcctcgaagcttaggcgtgaaagttgatccaatagaacaatgctgatacgagcatttctctgcactcaaaagtttgagtagaaatcagtatctattaaagacaacaaataaactaatacaaggaatgaaaatccagcaataatgattaatattctaccatttccatcttgcaagattgttagtgcagcagatcgacactgtgagtaattacccccagcttgaaaagaatctgagagtctgctttcttcagctaaaagtccagacaaatgcttttgtgtgtttgcgtcgaggttatacccttttggagcacaagggtctgtaaatattttttcccgtgtaggttccacagcttcaagaaataaaacactgaatgagtggaaaggaaaagaaactttgctattgacttgaaaacgtaatctgaactttagaaaattcccaatcagtaatttgatgatccatcaattatacttatataatcatcaacagcttacctgaattatggtctcttgagagaagtgaaccccataacttatcatgtgcagcattctgaaacggaaaaaaaaattaatagcctcgaggacattgccaaaagatgaaatccttcattctaaagatttcagggagggaaacaaaagatcagaaacaatagttacggagacaattgtttggtcagttggattaagttcccattcaacgattttaaaaaggaataaacttgtttcttgtgtcaagttgtgaaatctattccaaacacatacactgcttaatagaaaatacctgcccaaaatgaaggaagctgtgactgtagagattgtatgtgacatttccaaatgatattgtacgtgagaactcaggaggcattggctcactagacacaaatgtcacctaaaagaacatacaaacactcatcgtctgttgcaggatagcttttgactcaagcataaatctgaaagggaaaaaaaaacaactaaacctgagcagaagcccgccaagttcaacaattccggttgttttaagaggatcactccaagtgaaccgagagcaaagtttgcaacaacccaagcatatacacctcgtcagatcctggcaaatttagtatccaatgattagctagtaacaataaag

SEQ ID NO: 20958 - DNA, 1033 bp, Arabidopsis thaliana
cccctcctctcattgcgtcaagttactgagcgttgggtctccgctctgaagctctcataagcttgtcgctctctctctggtccagttgaccaagattttcaaagcgtgaggctcaagctcagcaactgtatttaccaaaatacctttcatcttccggaaagacctaccttgagctgcaaaaaaaggtaaccaatcttttgaactaaggatatgaggaaggcacttcactggataaggacgagtcaaacaaggaaactccaattcgttgactgactcatccaaatcgctgacgtcatactttttgtcgtcgtacatttcttgaacgtgaagtgtgattcccaaaaacgtagcgtttgatgtgtagatcatataacaaggaactccaaattcgttagctatatcgatcattgaagaacagaacatgtccaccacgaatccggcgagttttcttgttggattgatgattctggagacggtgtctctcacttgtggtttttgtttctcgatgtagacttgagacggctcaagatttgcggttggtggttgtttttcgacggagatgggttcgtagcggaggcgatcttgagactctgcaacgagggatgcgatataggcggttgcatcaccggcgtcgtttctagaagggatgatgattacggtgattgaaaaaatgttcttcgcttccgatgagttgctttgctagcttcacggttggccggagatggccgattcccggcgaaggtatgaacacgagctcaatcttcttcatttctgtttttacgtttttggacttttcgttgattgggtttgtaaagtgaatgtgttaataaagtaaaataaatgtaagttgtttgttgggtcacgaaagctggcccatttagtataattgggccgagaacctaaaatagatatggtagccgccgaccgaagtaaaccctaattgtctgctgtgtctgtgtatttataaggtttcgtctaatgcaaatcataggaactctctttcttttcatgtctgaatgatatgttaggtgat

SEQ ID NO: 20959 - DNA, 2685 bp, Arabidopsis thaliana
catccaatctctgtccagcctcattgtagcttgcccatactcatctctcagaactccttttgcatcagctcgaatgattctgtcagccattgctaatctttgggtttttcggttggtgcgttcaagttttcccaagtccaaaacagaaaagttgatcagctccttctgttgtttgctccttgtttgcctagacatacacctgaaacacagaaaagaagaaaacaagaaacgcgtgagtaacaaaataaaagtaaaaactagatgaaatttctaaactaaactcaattgtgattcccaagaactttggcaacggcgcgaaatttgatacggttcaaattaccctaagaactactctctcaaataagagatcaattgcagtatttaaggatcgatttccacaaagttcttttgttcaaacaatgagttgaatgtcgagattatatagagagctaggaacagggaattctcaggaaactattggttagtagatctaatgaaagctaagttgttatcgaaccattcttacactcaaactctaattatggaataaccggtggtattctgcaaaactctctatgtttatagctaagaataaccggagaaaccgagaaatgttgaacctaaacatgcattctaaacgagttcaattgttcacattagtagataggccgattcttattacacacctataaatcaggctcatcaaataatagatccaactacagatatctatggtgggcatatctattgtctggattcaagatctagttaattacttaagatctagcgttaagaataatcaaagatgaagaattctacagataacctaataggggtgatctactaaaccatatgaatccctaatgagaaaccctatttctaacaagaagactactcagacatattgaatgaaacaaataacctaattgggatataaagcataaacacaacaataaagtgaagattcagagttcaatcaatcagctgatggcgatcagaacgttgatggatttcagtaagctgcatcgagtcccatcacacgcttgaggtgcagacatggatgcaagagtagacgtggcgaactgaggcggatgatgtagagagccaagggtggaagccgacttggcgtggtgtcaaagacaagaatcaccgagaagatatggaagatattatctcgaagattaaggaaggaataagcttggagaaaataagaaagatttcttaaaaacgagattctcggagatcctaggtttagggttccgaagagtaggtattagtattctagagcttagtgtgaggcgctttgagcactctagaatactgtcatacgattgtaaacttcagagcattgcaaaagcttgaaggtgagtgtgtagttctcttcgtcttcacgtaagagtgataagaaacagagaagagaattaggcttaggtattcttagtcgggtttgatcttttgggtagaatagatcaagtaatctccgagataacatttgtaatcagtttgttatcaataaaaatatagtcagagtggtatctcttcaacaggtgagatcttgcgacagggtcatggagaattcacaacagtatgttacgatacaacagccattgaagctgacagttaagcattatggctactggaaggtgtctatcaagcaggctatccaaagcgatgaaatggatgcgtggttcgtagtggaagaaggatggacagctccggtggtcatggatgctaaggggttagaaataccaaagtccaagaaggattagatcactgaagagaagacagccgctaagaacaattcgacggccttgtcaatcatcttcagatccctgccaatgagtcaattcactcgtgtgtaggggtgcacatcagcgaaggaagcttgggacatttaggagacaacctttgaaggaaccagtaacgtgaagtggactagattggatatcctagcatctaaatttgaaaacttgaagatggagattgaagagtccattgaggagttcaacagtcggctaagttcaatttctcaggaggctgttttcttgggaaaaaggtacaaggacaagaagctggtcaagaagtttctcaaaagtctgcctgataagtttcaatctcacaagtcagaaatagatgtatcacttagattctgatactctaaagtttgagcaagtggtgggaatgatgcaagcgtatgaattgcaaatgaagaagaaggaacgctcatcatgaaagagtttgactctcaaggctgctgaatctcaactaagtgtaagtgaggatcaggttggtttgattgttaagaggttattcaggaaaaaggaacgaggacaacgcaagggtaattcatcagacagacgacctgatatgagtagagattcgaagagttcagaaaaaacagtgtgctgaatgtgagggatttggtcactacaagtttgagtcgtccacactgaagaaaaaaaggatattgtgctatgggtgcaaaggttatggtcataccaaggctgaatgtgttggaaatgaagaaacaaagcagaagtcatacatcacttggagcgaaagtgatacggatgacagtgcaggaggagaaggagagattctcaatagtctggtagctcaacttggtgtgattgaacaggcactgaagaaccagttgagaatggtacctggaggatgttaccagga

SEQ ID NO: 20960 - DNA, 1094 bp, Arabidopsis thaliana
cggcatcatctttatcctttggatgatgtttagctcctccccatttgattgcacttgcagtattggacctgaaccaaagtaagtaatcttttgaagaaattcctgcggcaccacaccacaaacggcatctccaagtgagatggcaccagggtatcccgcatccaccaaactatcagtggttaaacccgtcgaatcatcaccgtgattctccaccagccaattcaccaagtctttaacttgtgactcattaggagtaacaccaaccaaccaacatttccccttgtaatataacgcagctccatcacatttcacaaggtccataatacccggagattgtgtaacaatagcggaaacagtatcacggagaagcatatcgcacaacaaggtctgcgtccgcatagccttcttctcggctaactgtgatgctaactgaagttccatttgaagctgaagcccaaatgcttgcatcagaaactcacaagcataccgcaacgggaatggaacgtatctaggagaacaatgatgaccaacaactaatccccaaagcttgctcgaatctttgccttttactacaattgcgagtgcaagagaagctacagagcccatattcgccatatactgcgtatggcagccatgaggagctcttagagtagaattaactaaacaaagtggtctcttgagttcctcactctgaacaaccttaaccggagttgcattgcagtcacaaatcattcggacacggttctgtttgaacaagaaccgagcagcctgaggaatatctgttgccggataatgtaaacccaaataaggctccaaatcagaccttctaatctcagaaccaacttcaccatgatcatcttcatgaaactgatagaccataacacggtcataaccggtaagtctctgaacatcttccacaacagtatcacacaaggcaccaatatctcctccgggaagtgactgcagcctagaaatggccctaacggctagcttctgagactgaactgcgcctgcaagggtcaaagccggatcacctgatttagcaggctccaaatccatgacaatccctgcatcaatcctgtgaagaatagcat

SEQ ID NO: 20961 - DNA, 1796 bp, Arabidopsis thaliana
tgaattttcaggaagttgatgatgaggaaccaatgcagtctcaggggatggaagaagactctgaagaagaggaaaaagaaggagaagaagaagaatctgaggtatatacaaatttctgtaaattgtgtttgaatattgaaagtagtgtatagggacaactagaaaacaatgagtacaacttaatagtattggtttgtatgattggtgcatgcatggatttatatgtgatcaatcatacattgatttgtattagaaaattggattctgacgaaaactttataacgttggtctgagataacgcgaaatattaattttatggttgtgtatgaattttcaagaaattgatgatgaggaaccaatgcagtctcaggggatggaagaaaaccatgaagtaaaggaaaaagaaggggaagaagaaaaatctgagataacattaatttctgaaaattttgtttgaatattgaaagtagtgtatagggacaactagaaaacacttaggacaacttaatagtatagtttcaacttatgtggtgcatggatttatacgttaacgtgatcatacattggtttgtttgattggtgcatgaatttatacgttaacgtgatcaatcatacattggtttgcattagaaaaatttaattctgagaaaagttgataatgttggtctttgataactagtacaagtagtacaacaaaatattaattgtatgtttgtgtataaaatttcaggaacttgatgatgaggaacaatcaatgcagccagagaggatgttctttggtccaagcgaatacgtgaagacgtgtaagatagggacgagatgcactgtgcggcagacagtgaagtatttggaggagtgtaaagaagatttgccatggttcaaggcgcatccacagtttaggcatgtatttcacatgcctgaggagaaaaaccacatgacccaaggcatgtggatgcttttgcttcgcacagcacggacagagatggatagggagtgctggtttgtggttaatggagtgcctattaggtactccattaaagagcatgtgctcttatgtggtttcgattgtcatgattacccgaagagtttcgattggatgcagaattgaagtttgccaaaaagatcttttaaaaggtatttgggattaagatcattgatgttgagaaaaagctggatgaaatgaagaattgtggagaaaagaagaagacggataggaagaagttggttatctttttttttttgtgcaaggtgatcgcgaccaagtcaaaggctgatggaaacattgacaaattctttctaaagattgttgatgatgtgcgtgcatgtgagacatccccatggggtcgtttcacatttgatggatgtatggaaggtattaagtcggtaatgaaatccatgaaagggaaagcaaaactgcagacttgtttctccggatttattcttccattagaggtaacaatttagagtattatatatagtgagatgcattagtagacttaaaaataatactaatgtgacttttactttgaatgtgtagatttaccttttgaggctattccacatttgggacaaaagtttagagaccctgtaaggttcgagaatgagtgtccgagaatgtgtaaggccaaattctctagtagtgtcatgaaagggttctcgttggaagagataaacgaggagcttgaaagtgtaaaggtaagagttgtcccagttatctctagcgttgtcatagttatttctagagttgtcccagttatctatgagctagaatatgattaatttttatgtttgaattt

SEQ ID NO: 20962 - DNA, 2133 bp, Arabidopsis thaliana
cagccttttcaaccattgtacagacacgcagctacaacacaagagataataaaacccatcagtatgtttaactcagccatcacttaatataactcagtcgtcacgtaagctaactcagccattacagaacatatctcagtcgtcacttaatataactcagccattatagaacataactcggtcgtcacataacatatttgccaaaaaaaaaaagaacataactcagccttcacagagaaaaataaaacattaactcagccgtaacataaatatttgataaaaaacagaacataatagagccgaaaccgtacctcaccaccattcgctttgatatcttcagcaatgaccgattctatagttgcacgggtacggttgccaccccatctaagcaacagaatctcatccgcgttaacagcgttcccaaaacgctcggcgatggtgatgattgactcatacgcccaagcctgcaacacgaaaaccagaccactgacggtgtacgtcttgccaataggcctcagcaactttatagagacgacaagggcttcatatgctgcccgaccccatggataagtcttcatggctttgtcgtcgaaaactcttttggcactctcaaatggtatcctagagttagtatgcaagccaaaaagtccaatggatagaagagtcaataacccaaaccatctacgcttttcaggaggccaagctctgcacgttactaagccctgcctaagttcatctagattatgaccttcaccggttggcacacgcaattcactgaagaacgctttgtagtcagcttcaggctcaaacttttctgtaggcagttgatctatatttaaacccgtgatatgatgaaattcgttcaatccaaaccggatgggtttaccagccacgatacaccaaagctccttcttcagtattctcagctgtctgcatagtagataatgtacggtcttaccagaccatagaaaatgactatcaacaagcttagcaattaatccaagctctgtctctttcagttctgcccatatttcttttcctattgattctctaattgcagggaactctcccaactttatattatgattaatgcctttaccctttagattagaatccccctcttggtaaagtcttggagggtactcccttgcttggtcttcagacatctgtataaccataaatcagccgtaagcattccataactcagtgataacataaaacaaactcatccacagataccataactcaggcaaaacataaatctaactcagccatagataacataactacgtcataacataaacctatctcagccacacataacataactcagccataagataaatctaactcagccatattttaacagaaactcagtcaaaccataacataacaacagctcagttaaaacataaaccagactcagctatatcaaaacagaaactcagccataacataaacaaactcagccgtcatataacagaaactcagacatcgatgtaaggttaaaccataactcagtcacagcataaaaaaaactcagacacggatgaattgataaatcataaatcagtcggcaaacaaacagtaactcagccgtcaaatcaaatagatctaagaaatcggccaccatatgtcaatcaacgtcgacgttaaaacccagctttaaaaaccatcgttacgcatcggaaaacgatttcagtgacgggaatcacttgagattgaacttagatgtcagagtcttacttcattgaaagatactcaccggaacttagatgtcgaatgtgacttcgcgcttacgtaaatgcgactccggcgtctgaatttcggccggaacagacgagaaaagagcaaaacggcgaaagaaatcgattttgttccgtcgagagagaaagaggaagaaagcgacagttttttttttttttgggagatgatgaacagtaaagccaagaaataaaaaacccaaacgttatgcggtttggagatgattaatgacgtggattatcgtaatgacatggaatgatgacatgtataatcactgttttttaatttaatttttagttaaaaacgaattaaataataataattaattaaaactagttagggttgttaattgtaattacacaagaactg

SEQ ID NO: 20963 - DNA, 1509 bp, Arabidopsis thaliana
tcacagtccaactcatcagaggtcataccttggtagagctctacttgcagcgtggagaggaattgtattgtctcatcttcatacgctacatacggataagccatcagagtgtccagatgacaactttggtacaggtgctgaacatcttccaacaatccgagttgtgcaagtgaggtcgagcaaggatacctcgtgctacagaactcattcagcttgaaaagcctaacatattcctcagtaggcaatacgtcgggcttgtgcagaagtttggtagctctgcgagtctgttcaggcatgtattcgtcttccagatcttcgtctataagctcgtacctctctgtcatcgctctctttcctcgggctatctcagctttccttctgaagctttcatattctctctgttctctctctggccttgaagatgacgactctgtctcatccatgttgtagtcaggatcaacagaagaactgccactgtaattgctcatgattctcctgtagagatttagaactcaaaactcaaatgtcaataggttagtctcaaagatagcaatgaaaccaaaattattgtcaataggcaatgaaatagattgaattggtcgagtacaattctgtactcgagtaacctgagctgttcctgagcttagacgaattggatcgagtatcttctcagaggtcgagttggaatgctacagcaggtcgagtgaatcgtggaggtggagtgaatcgtgaaacctagaggtcgagtaacttctctgaagttagaaggctctgctgaattcacgaacaagaagccgagtagatttttgcaggggtcgagtgctttctcgaggtcgagtgaagtggtttggtcgggtgacggaggggatgagctggtgacggcggcgcgggggtcgagtgaaattcgcaggatcgagtagctctttggatggcgatttgtggtgtagagagattagagtgtcggcggtgaaattaaaaaagagggaggtcgagtggatttggagaagtcgagtgacgcttcaaaatgagtggtctaggttgagttttagattctctctccagcttatcctcagcgcgtggtccacactctgttgacttagaaattttttgcagaaaacctactgtaaactgtaggaaatttctgcaagtctctgtagcttctgttggtcgagtaaaatgatgatttaaaagtttttgggttttaaacatcacagatactcgaccaatgtactcgagtgcaaggtctccaggtgcaacaaaagattttcaaaattttctactccaaacgggctgtacactcgatctccaggtcttctgtagagtaacagttttgaatttttactctatctccgcgttgttctcttgtctctgaaaaccacaaacacaactaaaacaaatcaaaaataacaagaaagtaaaaattatttacaaggatagtcatgggacttcctcccaagtgagcttgtttaaagtcattagcttgactcctttactccgggatgatcgacc

SEQ ID NO: 20964 - DNA, 2428 bp, Arabidopsis thaliana
actcttctgttatttgttcgctatccacctcattcatatcggaaactttactgtgagacaagttcgagtccagtgctaagcacgtgttttgaaagtgtccccatttcttgcaacaattacatcttggtggcagccaaggatataaatacttgatcaccacatctaactctccttcttcctcaccactaaaagagtattcagtcagtaagtcttttgtaagatttgcctccactaaaatttgtgcttcatcgaaactcgaacatgtttctgtttttggatgaagtttgacaggtttgccaacgaaattctaaccctttatccgtaaacatagaaggctggacatccttcagtgttacccataagttgattgatttcattttaggttgcacttcttcctcataaggagaccatttcgaaaccacctttggaagagccataatattccacattcccctattcagaatccttcttctcattacttcatttctaactcacaattgaatcgttgttgcatttacttcataaacatcgatcattgttgatttatctcccaatctccaaattttattcataatcatgtgaattttcccaacatgaggagctttattgttgagaaatttccccaccacaaaatcttcccagagaggtttagctacaacaaaaacctctcttggaacaaccattctgccttggccatcaactacatccactacgaattattgttttgtaaatccatgcttatgagcaacacttgcgtaggatttcctaggcaatgaagcttggtccgatgctgaagaaacctcagggtttgagtcacccatcggctctgtttcctgctcaaaatcatcttctttctgtctaccatcaacctccatcttgctattaaaatagtcttccaactctttacctctcaactccgcatcatctttgcatcctccttgtaccagaacatcatcggcagggactggaggtgctgccggcgcgaacagacgtgctcgagaatccaaaaaccctaaaatcgccgtttctgtcgccctagccacgtcagctttttactttttgaaaattctccagttactcttcgctataggtataggaagtttcgtgaaacaccactggtctgttacaaaattagagttttagtttaagaatggttcgataacaacctagctattattaaatctactaaccaatagtaacctgagaataccttaagcctgacgtttttactttcttgtcttacaacctcacaatctgttattgctttcttctattcttttaattttcattactattttacttagcttaattcaataccttggtctattgtgtgatccgagagctttgtggaatttgacccttaagtgctataatcgatctcttatttgagagagtaggtttaaggcaatttgaaccttatcaaatttggcgctgttgtcgaagttctctacgattcaccattagattaggattagaattttgtctaagcttttatttttctttttttttattttatttacttagtctttctcctttatttttttctgtgtttcaggtatttgtctaatcacagaaccaggaacaagcgagaaacatgaacaagagtaagattgctgggatcatggctaagcttaacgcggtcgacaatcaacttgtggaggatgtcgcttatgttcgtagcagagattttccaaatcagagatttgatcaccaacaaggctacaaaggttcctatgggaatggtcaaactagctactctcagaattctcagttccagcaaccgcttcagaataacaatagttttagcttcacaaggaactttgatcttgcttcttaccaagtaccccctccacctgcacctagacgcatgatagaatcaatgcttgaatagattctggaaggtaactagaggatcttacagcacctatccctagatggaatgagagcagcctcactacttcttggcatgctgcttcgatggaaagtggatatgagttcatgaaggatgatgagagtgacgaatttgacgttgcaaaggtagtatcgaccgacacatcccttggtgtcgatcgacaccagtgcatatatatgagccattaggctgtgacgaagcaaaatcgagcaggctcgacactgatctctagagtcgctcgacacacattgatagtgttgaccgacaccacctgggtgtcgatccacaacaataccaacctgaggaagtgtcgacgtttgacggagcagaatcgaccgagattgacagagcaggattgataccagactcccgatttgaatgccactaaggacagtgacgtttaagtctgggagaggcagttactaactacgtttttctttttgagtcttattcttactcttatttttcttattttttagtcgttttattgagtcaacattttgttaggaattatga

SEQ ID NO: 20965 - DNA, 2124 bp, Arabidopsis thaliana
  unsure (1)..(2124): unsure at all n locations
tattatcgtctaatcctagtattctcctgtatgctcggtattattgtcaaatcctagtatttccctgtattcacagtattatcgttatacttgtatttgtaatgaccgcgtccctcgttcataaagaggccggtttgttttaggagaaaatgagatcatggtcgaggaacggactanaatacttagtcggaagaacgagaaagatcaagctgaaccagctaggtgagttggacaagctggatgaattagctagctaagctaggtgagctaaaccagctggaagactagctagctcagctaggtgagctgaccgacagctcaactgagctcggtgagctgatcgagtactgacccagctgggtggtccggtcagctgacactcgagctggtggactatggtagctcacgggtgaagaggtgtctcggccaaaaggtgtaaggtcgagcaggtaccaatgaacggttgcatcgcccaaaggatgcaatgaacggatgtgacctttcggaaggatgcaaggaacggatgtgacctttcggaagggtgcaaggaccggatgtgatgcttcgggaagcatccattcgccccctatataagggaggacgcccaaggcctttgggatcatctcacaacgtccagacaccataaaacattcttaaaagtgtcccaacacatctcaaagttgttggtcggaaagggggtgcggctcggcgagtataactcgaccgaactgatgcgcatgctacctcccggcccaacggttcgatggagtgtagaggatggagagggtagaccgttcgtcttagagacgaatcggatctggtagaccgctcgtcggatcggatcagccagaccgatcgtgggacggatcggatcggccagacggattggatcggacagaccgatcgtcggacgggtcggatgggacaggccgatcgtctgacggaacgggtcgaacagaccgatcgtcggatgggatggatcaagaaaagtgtttgaggaagcacaaggataagtgcatccgaacacacccaagggtcgcccatggatgcaatcttaccggtaaagggagaaagcaccaagaatgggtaaggaacgtgattcaccatatgggatcaatatcgcggctgccttcatgtatctatctcctcagccatgatgaaaccgatcgaagatcgtggagaccaaagggtgactcgacggataaccaacgggaaagtccacggtgggaaccgatggacaaaacggatgttggacccacgagcaaacctaaggccgacggaggaaagatttcatgggctagcctacgatgatccggtggttgaatcacggacccttgggtgtgataaggatatcgttcggaccgcatggatggatcattaagccgaaagctttatcgaccaccatggaccggacgggtaaacggttagtaaaccgtgggcggtcgtagtgttaaacgaccggaacgaaacatggatggttcgataagccgagggtcaatcgtccaccatgtagccggagggcgtacgtttggagaacgaatggaccaataagccaagagcttgatttggccatcgtgaaccaagggaatcgtacgatctccaatctctatcgttgtacttagaccagtggggttggttggttgtatggctaagtaacgatagggattggttcatcaattcacgactgatgacgagtcgttgaacgaatggagtaaggcgacaaacgggttaaggaatcaaatccgcatattggccaaggtatgtaacgatctagcttattagttaagatagacgtttggtaattgaccgtgaaagtaggataaaggaatatgcgattgtttggcttagaatgattagcgaacatatgcatgtcttgaccgagtaaaggatccatctaagtctaagggacaaagacgatgaaaccggtacaagagttggttagaattaaacctaggttagaaagacttccgctgtgtaataagagagcgattatagaatttagcctcgtaaaggcaattctatgttgaatagcgaaaaactaagaggttcggccggggagaggcgcgaacttgagtacaacgtcgccggacgccgagacgtccgggacggggtctcacaagttgg

SEQ ID NO: 20966 - DNA, 1561 bp, Arabidopsis thaliana
tgactgtttgttagaagtatgtttcctgctgaaggccagcttttcttcttccatttcgatatagcgcgttgccttgtggagggcgtcttctagatacactggccgatttaacaattaatcatcgcaaaaacgcgactcgtgcgacacagcgttgcgtaatgccgagatggccgcctcatccgggacggcgatgcgagagacgactgccttaaacctgtcaataaaggtgcgaagcggttccttcgggccttgggccatagtccaaaagtctgcgtgtgtcgtgccgcgttcaatgtacatggaatagtgcttcaggaaggcgattgaaagttccaagaaactccctattgaattagcaggtaggtcagaaaactaattcaaggccgcacccataagatgttcggaaaataactgacacttgccggcctcacgttcgctcggatggaaatgggccctttgcgtggcgacgctgaaagccgataaaaattgttgtggatccgtgttaccttcgtaactttttaactttatcttgttatcatgccgaactgagacgttgctgatgtgtgcggcaaaaggtgtcttttaggttttttccaggatctgctctaactcaggagcggaactggtcgcctgatgaactttctgggacattgcttggatcgtacttctcagctcctggatttcctcgttctgagatcgctcttgatattcacgtccaacggcattcagaccgctcggccttgtgttatttgctcggcgcatggcgcttgcgaatccttccgaatgttgagctgttggttgacctcgaaggtccgtgtatgcgttagtgagaacgtcgaaccgttcggcattcttttgatcctgagcttgaatttgcgccaaaatgctacgcatcaaagctcctgggtcatctggccgtgcttgtggagttcgggttggacgtccttcccttccttgtactcccggctctaaccctacggtcggtgttggtgtgttgagtactggttcgttctccacaggattgacttcgatcgggttcgtcgcatcttttccacgttcacctcctattggagctatgacgacctgctgaatcctgtctggggtgtcttcgacgaactccccacggtcgctttcatgttcgcttcccggcatccttccttctcgtagatcttcctcggctttctcttctccttttcttgtggtagacccctacttggcgcgccaattgttggagtataaaaccaaacttccaaaccgaagaatgaaatgccgagccttaaggaagatctttattaatatccttgaagttcggctgtttacaaaatgtttccacagccgagcttaaacttatttaatacagacttcacaagtcaaaactagacttaatattaattagaagtttaattagaagtctctattgcttgtctctcccacttgttcctctaccagattctgacattcctttgtcagtattcatagtactgaaaggacagtctatcgttcaggtttcttctcgatgtgggactttctcttgaccaacagcttccttgaggcgggcctc

SEQ ID NO: 20967 - DNA, 600 bp, Arabidopsis thaliana
gttctcatacctttggtgacatattgttgctgcacaccgacgttttttttaggtgttgctgcgctaatacgcataggccttgttgagcaatacaaaccattcatttcagccatagcccgattcctttcactttcctctgcaaattttacaaatccataaccctttgatcgtccagtacttggatcagtaacaaccttggcacctctaacagaagaataatgaacacggaatgtctcttgaagaagataatctgtaacatcaggtgctaaatctccaacaaagatagaatgatcaggtccagcatcaactttctgtcctgaaccaaaagaagcccaatttaaccgaaaagttaactcagttccaggcatctgtgtcccattgtacgtctgcagagttctctctgctgctgcatgagatataaactctataaaaccatacccctctggctgtcccgtgatcttgttacgtattaccttgacagaaacgagctgcacaaatgtgtatataaccattacaatcttgacacacttgaagatcatataggaccagaacttaataaattaagcacatacaaagatataaattagagagttagagaag

SEQ ID NO: 20968 - DNA, 2190 bp, Arabidopsis thaliana columbia
tcacttagttctgctagaaactcaaaagctgttattgcttggcttgactctgtgaaatctgattgcatcttgattactagcatcacacccatttggattgacaacctttagtactacaacgacataatagtgctttaggattaattgaacttaaaaacatattatcaagtcccaatccctcgttgggcacttgggtgtcacgaatggcagctttgtcaacgcgagaggaacaacgactcgaccgacgaagaggaaagaatctgtcaaaatcatcgtctccatcggagatgggtagaggattagtttggggctcaggaacttgtaaccctttcctattcacagcacaaacttctttgccattgtcaatagagccatctttctgattctcagcagatatcaaagtgtttgcataaaaccaatcagtcacacctttcatgatctttttgtactaagcagccaatttagcatctaacgacgggataacgcggtcatgtcaaccgaaacaacagtttcctcctcatttgtcaatgattgatgggtccttcgaatcccagttagattttttaggattctgccttgcttagaagattttctgccacgaccactgtaatgccccgtacgtggactatggacgggaaagcttaaaaccgaggtaaacgataattcatctattccacgagtcatgttcaagggcaaatcaagtgacttagactttgtgggtaaggaaaccttaggattagcttaggatggttagggcgaagaatacctagaggtgggcgagaattttaagttaggccgttgcgagaaaccggattaaggaccttttctgtggcgtgactaaggacaaagtgtgggcaacccgtggtggcgtgagttcgtccaaggcggacgtgtgctcgaccatggccggcgtgtgcgacaaaggtgcgggtgagagttggccacgtcatcgaccagcttgtagcggctagtaggtgggtaagttgctccggttttctatggttgaaaatcggccatgtcggccgccaaagttgagtggtccttgaccggccacagaggagcttaaggagggccgacttaatgtgtggtcgaggacgttttgccgacagctgggcgttgactcacggccgggtgtcactcccaaaaagtgtccagtccgggtgtcgcccatcgagcgtggcttggtggcgacggccgtgacaattgtcccccagcacctcacctaactcactcgcccgaaaacctataaatagccctcatttccgacccttagaacttacacctagaatagaaaccacttagaaatgttttgggaatactgagaaccatcggagaagttcacggcccaaaaccttccgccgagctttgtgagtaaccgagccgtgtgaagtagcacacggattgggtttatttattatgtttaaattatgcatgaggttgctagtttatacttagtattacttcataatcatatatgcttggttgagtgattgattggttatgaagttaggcttaacgattgtgtaaccgttatgctgcctgtttgttagcgtaaccgttatgctgtcggatagcataggaatagggttatgcgtgttgttgtatagcaatagggggttaactattgttacgcgaaccatgatagtccatccgtctactgtgcgttgcgtgaaactctgtaacgttatggcttacgaaggtttggagcgggtcatgcccgaccaagtgctacatgacgatttagtagtgaggaatgcgatctcttttagactgttgtatctaggagtgtgtggggcattgccttgggggatatcatgaattcgtagaggcttgttaagatgtctagactggggattggtagtgattgtttattttattattaatgaatcttttgttattgattctctatgattgggggttcggttaggttaatataactgttaggatccggtctccctgagtaatcttagattattcatgacgctatttgttttgcaggtaaccaatagtgggttaaactttaggggaggcttggacgctaggaataccagtgtaggtttactagccttgatgtaaaataactttgtagtaagaaggttgtatgttttggagtctgagctcccagcaggcaaaacttatatatcttggtaatgtttttatgtaataaaacatatatgtgttaaaaagatg

SEQ ID NO: 20969 - DNA, 596 bp, Arabidopsis thaliana
cctgcttcagcaaagagatccttatacatatacaagcagttaggcaaccagttctcaatgtccaaaagacctctcaatgaggcaaggactgccaatctgatactggatgagactggaactgattctaagacaacagagagaatctgaaataaataagccatgattagtacatagacacagagaggctgctgtaagaaagagaaaaacagtataatgagataatttgagccactgccacgcatttttctattcacctttagctcatggcagatttcaattattcggagcatgctgtctgctttgagatgttgggcatctataatcccccacagaacgagttctgcattttgatgccagagattatggataaaaccactatcctggggactcgttattatcactggcagaatagcagaaaccacttcacgctgtatgaggttataggcagtctgcaataagaggattgacatacttagccaaacaaaaagaagcaagattacaagcatatatcgccaaagaccagtcgaggagaaatactttgatgtgtgtcattcaagaagcaaggttctaggacactgtgtgagtggatctggagt

SEQ ID NO: 20970 - DNA, 790 bp, Arabidopsis thaliana
tgccttgcagtatgtagttgttgctccagtgcaaaatttgatagcatcaaaccgtcccattcctaaaaaatgcaaagcagctaaacttctcacgcaattacttcgaataattcatcccaaaaaaatgaacaatttatgttgattagcactcagaaaaggagcaggtgatccgcgtaataatgttactaaagagaagaggccaatgtgttcagttaaacgaatcttgtatacatttaagaaacaaccttggaaaatttattttaagtcaatcaaccaaactctacatgaccaataacataaaacattgtgacatttcttagtgaacttcccattaagaaaacaagcataaatccaagagaaaaggtaggaacaaatttgcaaaagaacaattaaagcttacattctggaacgttccgagcaatccagggatactagctgtatgcaatgttttcggctttatgatctacacaattgacaattacattaaaaaatctcaaacaaatatcgtcaacagtactttgcatcaaatagttaaagagattacactacctccccagttttgatgggaacaatgtcatcaatggtaagtggttcgccagtaaccgggcacttcccataatcctacagaggaaaataatttagaagaaatcattcatttccaagtggcgtgataatctaaaagagctctcactggagatcggatctcattggtgcccaaaagaatttctcgataatttcacagtgctacaagaatcatccgaagtaaaccaaacaacatcactcaaattac

SEQ ID NO: 20971 - DNA, 580 bp, Arabidopsis thaliana
cctagtttggaggattcttacaggtatataaccaaaaaaaggtaaaaacaaaagatacctagaagaaaaaaagaaccattcaaaaccggttcttgattacaaacttacttccaccttcttctgtctctcaaaaggctatctacctgatgatgttcttgactgaactgaatttgtttgctctctagacaaggccgatatcagcttctctttcgttaattcttcagatttgactacaaacgtatgcaacactgtgtcctgagaaacttccaggttcgagtttatcacttctactttactctcttcaaacgcatggaagattctggaagccggatgagactccaacggacagtttatcctcactgtgacatcttcacctgaggtttgaacatttatatctgaatccaagctgataggtggatttgagctataccctaacctctctctctctgcttccatgacctttagcttcgcgtgaagctcgtttatataagaaaccgcgtctcccaacaaggacgctttgtccatcttggatatgttgggaacaacggatctcagagcgtaaaacctctggttaagcttc

SEQ ID NO: 20972 - DNA, 1310 bp, Arabidopsis thaliana
taaaccaactctctgagctaccaaaccaagacaaatcggtgggctaccttactagagccattaacagagaacaatctaccagaacagcaactagaagaaccatccctggaaggccccctctttcaaaaccaatcaacaaaagccccattcatctctcaggggccaaatctagcaaaagaaacaaagttctgattcaaaattcaccaagaagaagagtgattgtagcaagcgctgctctacagaatattacaaagagaaaaccagctaagcaaagacttacattgatagaataggaggctggtccgtccaatagcagagcaccaaaccaggctgttattattcctgcaatagtgaagaatagagtggattttcagaatccacagtcttctcttccttaaaagcggtaagctggaactgttggggtcttgggaaccccatgacagttcggcggctggtggagatacaaaagactatctccctgatttactgttcctcatggagacaaaaaactctgatgactttgtacttcagaagctccatgatctgcaattcacatcccacaaactggtgtcaccacaaggtcgaggaggaggtctagctttactgtggaagcagaatgtggatcttgaggtgctccaggataatctaaactttatagatacccgcataacggcagaaggccacagtttctttgcaacctttatctatggataaccggaaagagcaaaaagaaaagaagtttggaatcaactttcaacaataggccaaaatagatcagacccttggtggctaactggggacttcaatgatattgtagactcttctgaaaagcaaggatgcataattagaccggaaggtaccgtttgtagacctgagaactttaatgtcagaatgtgacctctatgatctccaacatgctggtaattttctctcttggaggggcaaacgtcatgatcacctagtcttctgccgcctagatagatcgatgtcaaacagcagctggggtgaagaatacccctctggaagaagtgaatacctcctgtttgaagcttcagatcataggccacttgttacttattttgacctgcaaaagaaaagaaagaaaggacttttcaggtacgatagaaggtataagaagaataaagagataacacaattaattgtgcaaaactggagaggtaatgtgtatgaggaggtggatattaaaatcagtaaatgcagaagggctattattgaatggagtaaagagaaacagattaatagctagaaaagagtaagggattaccaagagcagctggaatcaacaatga

SEQ ID NO: 20973 - DNA, 835 bp, Arabidopsis thaliana
caaaaatcagatcttggaactcaaaattccttatttgcagcttgagttattaaaagtctttgtctttctgggttatactataagttgattaactttgacatctaatgtgtatttgctggtaacagggcgtgtcctgtgtaatcgtttagtggatgtgcaatgcaaaggtcgtgtagaactagaagaagagtttctgtgaacaagtttaatggaaggaacagcttttacaaagtctctttgtctcttgtttttctcctttgggttcttctcttcttttccaccttgttgattagtcatggagatggtgccaaaggtaaccttcaagttcttttctttggtggacatcattgtcgttttattaccttaaagcatgttaagaaccaactcttgtgtacttgtagatgagcctttgaacgactctatgggaatggctgatccggatgatggtcagtcagatgagaaagttgtgccctttgatggaccattatccttagcgtctgcttctgttgatgttacgtctgatttgagtcggaatgatgatgtaaacctgtctgaagaaagtgaagacaaagaacaggaagcagagatcagtagcacagtttcagggaatgatattgaaagcaaggacacttaccttttgaagcaaagtgagataaataagaaagatacagggattgatgcaggaagcaaatatgatgactttcccaagaaaagtgagattaacaatacaggtacgtggaatgatacagaaggcaaagacgataataactttttgaagcaaagtcaattgaacaagacaggcacagggaatgatacagaaagcagtgacaatgag

SEQ ID NO: 20974 - DNA, 1336 bp, Arabidopsis thaliana
atgcctcccagtcaaatgagcgtactcaataagagcaacatcttctgcaccactgcaaacacacaagagccaaaacaaagatcagcaatctttcttcaaaagctatcaaaaagcaaacttatatcaaatctcatgatcgatatatacctaaatgcaatggcgatatcgttcccgtatttctcaagagctttgtccataatctcaagaggtgaagcattctctaacttcttagcaagctcttcaaaatcctcaatctcaaccacttcaacttcctctgcaatttctgctaccattgttgccgcaagaggaatcattgaatcctttgtctttggttcagcgtttaaaggtttaacagatgatgatcgcttcccagatagattcagagacacaggagcaacatgaacacgatccaataacctcaacgaaccaatttgcgaaactgtaagaaacaaaaaaaaatcgaaacttttaacaattcatacccaaattaatcaaatttcttgtgtgataatcaaaacccacattgacccatcaaacaatttctcagatttcggacgaacaaattgaaatttctcagaattgaaagtaaattataccttttggctccaatgaaacaccgaaacgagagtttatgatcccagaagacgaagaagaagaaacatttacagacattgccatcttcacagcaaaaattggatttttgttttctctaagatttgttttgattcttcgttttttattttcaattcaagatgatttgtgagaagcgtggcattatataacaaaaatacgaagaaccaggtgattccagattcattgaacctggacacattggtttgtttttggtgactgcgaatattctggtccaagttgatgatgtggcaagtttaattggatgaatttatttttaaaatcatctctgatttgaaggtagtcaattttggcagaaccaatcaatttttttaattatctgtttccttttttccacatgttggaatcaattcactaaataattttttgttcaaattttttaaaatttataattaaatttaatccatataattattttaatattggattaccaataaaacatttattattaacacaatattctctctgttctttttaattgattttttagaaaaaaaattgtttcaaaaagattgatttttagattttctatgcactaattattagttattaatgataaatctctaaagttcaacacaaataattaaatatcattgatttagaattatagaacaatataaatcacaaaaatcgatacatttataatcagttttcatatgttttcttaatatgtgtgtcttgttag

SEQ ID NO: 20975 - DNA, 1147 bp, Arabidopsis thaliana
  unsure (1)..(1147): unsure at all n locations
tacctcttcaaaaccatcctcttctttgaggcggttcgcgtgtagtttcggcatccgatccgagtcaacttcttcttcgctcctcttatatcaatcctcttcttggcacttggaatcccacactctatcatctcacatcttccctctacactttggtacttccttatggctcccatcttgtttcttgagatgaagatttacggacagtggatgtctggtggacaaagacgcctctccaaagtcgccaaccctacaaaccacctttccattgtcggtaactttgcaggagcacttctaggagcatccatggggttgaaagaaggaccaatattcttctttgccatagggttggcttattatttggttttatttgtgactctctatcagagacttcccacgaatgaaaccttacctaaagagcttcaccctgttttcttcctctttgtggctgcaccagccgtcgcttccatggcctggaccaagatctctgcctctttcgatctcggttcgcgtctagcatacttcatctccttgttcttgtacttctctctggtagtttttgttttcattaacagagttctagtgagctagtgctgagtttcttgtggtacaagaaatgtaacagctttacttcttgtgattcttgtttcaggtttgtcggattaaccttttccggggattcaagtaagctgtttcttgaactgcaaggatctaatttaccaaaccaaataacatacatgttatctgacataattattcaaaaaatatcagattctcgctagcttggtgggcttacacgtttccaatgacagcagtggccagtgcgacgatcaaatattcagacgaagtcacgggagtggcaacgaagatactatcggttgtgatgtcgggncagcaactctgcgtgatagctgtgcttggttgacggtgatgcatgcttttgtccaacgtgatctcttcccaatgcgttgtcattgccataagtgcagaacaaccgaagcagaagagatggttcaaacatctcacaaaagaaagttatggaaataatgagagatgtcccaagattttggatccggaagataatcaaatagatttagaatctcctcctttagtaaatgtagatagttccacggttcagaatattacg

SEQ ID NO: 20976 - DNA, 969 bp, Arabidopsis thaliana
gcacaatgagaaacaatcatgccgatacgcgaaaccacggatccggcggttcgtgatcgcttgtgaccattgcttggtggtaactcaggcgaaccatttggctcgttcggactgtgatcacttgaccaatggttaggtgaattattggtgtttggtagctcaggtggtttggaaccattgggtgagtttagtggctgtgctgatgtttgaccgtgtgtccaagggatggaactaacggccatggaagtcaggtcgaggcctccatcagtaccttgaacagattcgatgactcgtttcagctttgtgattgaacgattcactttcttgatcttcctcgatggccaccgcgagattccgtgttgcctgcaaattcgcttcattgtcgtcgggaaactgtgacaagaacaatatagagttcagatgaaatatctctagccagtaactaaccaaaacatgaaaagtaaatggatagacctcctaggctctttgcagcgtctttgagacttccagtgaaatactgctgaagtacatctagactgattgttttctcagtcttcccacgctttttctctgttttcttgttctccttagccacaccgttaacagtggccacgttgattttctcatttactggatcagaagactgaaccacaggctgaggaatcaacatcgtctctgttgcatttgacttaaaaccagaaaagggaactcgaatggattctatttttgaatgaaccttcttgtccggtaatgcttggatgatctcgaaagacaatttgtcgtcatcttcaccaaagtcaaccccagatgcaaccctcagactctgaaaatgttctttcattgtcaccaaaatagaacccaacagcaaatcttgctcttggtcgtctgttatactcgaaggaagaaaaaattcaagaatgtaactgtcgtcgcccgtgtaagagctctggagagatattgcggggatcc

SEQ ID NO: 20977 - DNA, 683 bp, Arabidopsis thaliana
attttttaatatgttttcttaacatgtgttttttttcttaaatcaaatattaaggaacatagaaagtattgtacatggatcaatcgttgataataatgtgacacttttacccactgtaaaacaacaactttattttattatgaacaatatttatcttgtatcaagtgacttaaaacacataaaaattgtatgaccctggagttttctttttttatgtaagataccaaacctgaagaaagcatattataatacaagaataacaagttggtctcttattactgtatgttgttccccatatgacaaaaaaaaaactaaggaaagttagagaaagaatgtgatcgatcaacaagctcaatcagttctcttctcaacgtcatgctcatcttcctcgagcataaacctcttccagtaccaatgtagcttccacacactatctctcatgtcatcaatggagactcctttcgtttccggcacgaagaacaaagcgaaaagtcccatcacaacgatccaaccactgaagaagaagaatatccctgacttcatcgcgcaaagcatcgataggaaggcctgagcgatcacgaacgtgaagaacatgttgcaagacacggccaatgcgaacccttccgttcgagtctccaaggggaaggtctcactagggattagcatcctagagggcccatgac

SEQ ID NO: 20978 - DNA, 738 bp, Arabidopsis thaliana
ttttggtttaacgtcaattcaattttccactaaaaatccgcatcgaaacaaaatagctagggaacatatatacattcgagaaaagtaagaaccgaaatcgaagaacacaaacaatttaaacatgaatataaaagttaatgaaaatagtaactttttacgtctcaccactatcgattttctgaatccattaagttttttaagaaaaattatagaagaaattaactcaacctaccaatcaaaaactacaaaaagagtaaaactttcaaccacacatttagattgatcaaagatgaaagatgtggtcagcttgttgaaaaaaaacacagaaaaagatgtggtcggattttggatcgattgtttttgttccgttctatcgaattggatcggattgatcggattaacgctactttaaccaaataaactctcgttctaaccctagctatatatataataagattcgctcaaaggttaaaacactttcaaaaatatgctttataaaaaaaaaacatattctaaaacggtcgttttcagccaggttatctatcaccggttcacctattttatcttttgtagaaagaagatagtgattcttaccggcttccctggaacttggtaaacgtgaatcactacacaattcaaataactttttaggcacagtaaatttagacttacacttgtgaataataatgcatggccattattgtgtttgctaattaaagaaaccaatttgcacataat

SEQ ID NO: 20979 - DNA, 1409 bp, Arabidopsis thaliana columbia
ctttgaatcaacagtcacaacaacatgtggcttaaacttaaccgcagcatcaatagtctccttcaacttcacctagtatctcaaaaactagactagtcaatcaaaagaatctagagtagctttatatcaaaccattcaaaaggttactcacacggaatttatacaaatgtggcaaaagctcccatacacccattacagccaaatcctccattggaaacaacgaattcaatcctttcttgcacatcaaggatctatcaatttgtaagaagcaaagatacaaatgttccaactttatgaaattttcaattgagaatcaaaacttttcataagaaacttctaaattgggggaaacccaagtgcttaccctccaactccattgaaacggatgggtaaaggagagagctttttaagcgaggacataagacgagaaccgatgttatcgccggaaacttcgccggagacgatgaaaactctgagctccccatcgattgcagccttgtcaatcaccgatttagcagcttgaaatgatgagtatctcttagtgaatgttgagagagggaacgaagtttgctctttgtaatctgaaacatcatttcggagaagagagagaatcaaaaactctgaaagagtgaaagtgacgttgttaaacaatgaactgcgatgaaagcaagatttctcatggggactttaatgggcctcttaagcccacttcttatcagcatgttattgaggcccatcagtcatagtgatacttgtttaggagacagtgatagttatagacttacagtgagtgattgtagatgttgaatggcctatgtttattgtttttggatctaaaacttatcaagtaagagtttttttcttctgttaaattagtactccatctgttcttttttgtttgattgtttagaaaaaaaaattgtttaaaaaagattgattttttaggttttcaatgcaatagttattagttataattgataaattgtaaacttcaatacaaattattgaatatcattaatttacagttattgaaaattgtaaattacaaagaacaatacatttaaaaaagtaacatttaatatgttttcttaatatttgtgtttttcttaaaaaatcaaaccaaaaggaacatatcgagtatgtcttggtgaaccaagttttatggaatcttttgtaaacattattttttcacattgaatttttgttacgttttttcgtactaatatattaatgttgttttgatacaaattcgaaaaagactcgcaaaggattgtataaaacaaaaagttttcagatcatgaatccaaggtgaaagtgaatacaactacacaagcatcttatgaactaaaagaaagacgtttcaaaacaaaacaaacataaaacaggatggctagagcctagaccagcga

SEQ ID NO: 20980 - DNA, 1720 bp, Arabidopsis thaliana
ggtatactttgtgataagggttgtgttagttgtgggtgcttcagaggaatcaattaatcatactctttttcaatgccaccctgcaaggcagatttgggcactatcacaaattcctacggccccagggatttttccctcgaattcaatttttacgaatttggatcatttgttttggagaattccttcaggcgtcgattcggctccttaacccatggataatttggtatatatggaaagccagacatgaaaaagtttttgacaatgtggattacagacccaagggaaatattgcccttagcggtacaccaggctcaatcgtggcaggaagctcaattcgagctccatagtgaaaaacatggttccttgtctatagatagtcgaattcgggtgagggatgtatcacaagatacaactttttctggctttcggtgttttattgatggatcttggaaagcaagtgaccagttctcaggaacaggatggttctgtctatcatctcttggagagtcgccaaccatgggagccgccaacgttcgtagaagtctatctcctctacataccgaaatggaagctcttctttgggcgatgaagtgcatgattggagcagataatcagaacgtagctttctttacagactgttcagacttggtgaagatggtgtcttctccaaccgaatggccggcgttttcagtgtatttggaggagttgcaaagtgatagggaagaattcacaaatttctctttatctttaatttctcgtagtgcaaatgtaaaagcggataagttggcacgaaagattcgtaccgtaccgcatcatgtcacgtatgtaaacaatatccctcgggattggctcttttgagttctaatttatatcggttgacaaaaaaaaaaaaaaaaaaaaaaactaaaatataaaccaaagggtaaagatattttgtgggagaacatttttcttattcatgaaccaaagatgacgataaagcaatgtatgtatgttatatgagtaaatatatatgattgtgacaaatgatgataaccaaacttgccgcgtgtttaccattccaaaactgacctacgccgtcgcatataagatataaccttttgaattgtcttcactcttcagcgtcacaaactcacaatttacaatcttttttggctcacacaatttacccaacttacactttcttttctgtgcaacaacttaacttactttattaaatacattaatacaccattaatttttgtgataactagaaacgttaggtataaccgtataaataacacaaattagttttcatagcaactaaagacatttccatccatagtattcacacattttttttaaaaaaaaggtaagtttctagaatagtagagtttttagtacaaaaggttcataattgagaatctatatatgagaaccctatatatgtaaaactctcaaaacaaaaaataaataaatatattagtagtattttatttgagaaactttctataagtatttcatcaataaagatgctcaaattgcgataatcgttttacaaaaaattctcatcaagtgatcgctcactctgcatatgcgtatatagcatgcatgtctattcttgtttttattttcccccatttttgcaatttaatattcactttgtatgctctctttagattatttctggacctggtaatctggtatatagcatgcatgtctataaatatttaattttttt

SEQ ID NO: 20981 - DNA, 2335 bp, Arabidopsis thaliana
gaaactcttctagtcttcacatcacctctatcaataatctcacgaatgaggtaatatcgcctttgtatgtgtttggatttctggtgtgatctaggttcttttgcttgcgccatggcaccattgttatcacagtaaagatcaatggggtcagaaatactaggaaccacaccaagttcagtaatgaacttcctaatccaagcagcctccttagccgcttcagaagcagctatatactcagcttcaattgtagagtctgccacaatgctctgtttggaactcttccgactctcttccgactcactgctccttcgttgggacaaaagacaaatcctgattaagatcggaaatcatctttgtctgtctgaaagctggcatcagtataaccactcacaacaagttcctcactaccttcatagaccaaaaacttatccttagttcttctcaagtacttaaggatgttcttgactactatctagtgaccttcacctggatcagattggtatctgctcgtcatgctcaaagcacatgcaatatctgggcgagtgcagagcatagcatacatgatagatcctatagcagaagcatatggaatcttactcatccgctctcgctcatcatgcgtcgaaggacattgagtcttgctaagagttatgcattgagacattggtataaagcctttcttagaatcatccatattgaacctgtgcaagaccttatcaatataagtatcctgacttagtccaattattttgtttaatctatctctatagattcttattccaagaatataggcagcttcacgcatgtctttcatcgagaaacaaattccaagccaagtcttaacagactgaagcaaaggaatgtcatttccaaggagcagtatgtcatctaaatacaataccagaaatgcgactgcgctcccactagtcttcttgtaaacacaaggttcttcttcgtttctaatgaaatcaaactctttgattgcctcattaaaacaaagattccaactccgagatgcttgcttcaatccataaatggaacgatgaagcttgcataccttcctagcagcctcaagaacagtgaaaccttcaggctgtgtcatgtacacatccccttcgagatttccattaaggaaagctgttttcacatccatttgccaaatctcataatcataatgagcagcagttgctaggagaatccgaatggacttaagcattgcgactgtagaataggtttcatcatagtcaataccatgaacttgattgtaacctttcgcaaccagtctagctttgtatatctgtatattaccatccttgtcaattttcttcttgaatatccatttacactctatggcttttacaccatcaggtaaatcaaccaaagtccatactttgttttgtgacatggattccatttcggatttcgcggcctctaaccacttatcggaatcagggcccatcaacgcttcttcgtatgacgtaggttcatcactctctatcataaatagagcatgatcgtccatcacccaatctccgaatctatcgggttcgtgacggctcctttcggacctacgtacctcaggttccacatgtataggttctacgactcttcgtagatccaatctatgttcttcctgagaagttggaacatcaccatgtggttctcgaacttcttcgagtaataatttactcccactagttccttttgaaagaaactctctttccaaaaaggcaccatttcggtcaacaaacactttgttgtcagtagggtggtaaaagtaataacctttggtctctttcggataacctacgaagtagcacttatcagatttgggtctaagcttatcagtaatcaatcgtttgacataagcttcacaaccccaaatttttagaaaagacaaattaggaacctttcctgtccatatctcatatggtgtcttctcaactgattttgatggacatctgttgagcataaacgcagacgtttctagagcatatccccaaaaggatggtggaagatctgtgtgactcatcattgatcgaaccatatccaataaagttcgatcctcctttcagatacaccattccactgtggtgttcccggaggagtgagctgtgaaacaattccacactctctgagatgatcactaaaaacttggctcaaatattctcctccacgatctgatcgcagagctttgatcgatttgccaagttgattttgtacttcattctggaactccttgaacttttcaaaggattccgatttatgttttattagataattataaccatatctactgaacaacggacaggctgaggccacgatctcgggggat

SEQ ID NO: 20982 - DNA, 1992 bp, Arabidopsis thaliana
cccatgttttgccaaacaaagtcaacgatgcaagccatgtgctgaaattatgtgactgagcacttagtttaaatggagttgttgtttgttaagaaattaaaatgtaattggtaagaaaaagaaagaatattgcggcttacacaagtcagcaaagaaagaagaagggtatggctggccattgatagtgaattccctacatatggaattgcaatagtaagaaaaagtaatgttaagcagttaaaaatagaaaacccaaagaaagttgcattggcacatcaaacttgttctgatgtttacagagtttatccctaaacatgtcaaccacatcattgttaggcgtagcaaatgtaatgagaatattgttcgcattgcttgaggattctggtttgagacaaggttttgtgtgcgcagattatttgcggggccaacaaactctgattgttgtggaggagacggatgacggcgcgtagaccggcgtgttttaactgaagtcacaggaattaacttgcaatttgatggatggcgtttaggcatagacgatgaagcgatggcaggcgggggaacaacaacgggagtatcaacagttgtaggttgagtaacaagtaagggctccaaactaaaaggaggcacatgggtaggcaactgagactgtgaaccagaagtctggcttctgtatttgtcagcctcaaccagcaaagaggaacaacaagtttttttctgctgtacatttacaaacgttatggggaacgaaagagtacaagtgtagaatgtgcacaacacaagtattaactgatattaaaatcaaacctgagtcagtggaaccggactgattgacgggaaaggaaaaagaggaggagcatggctaccagttactgaaggagaggatgcctacaaaagtgaagataataaaacgatggcagagggaaaaaggcaaacaatttgcaggcaaaatctggctttacctgaggaggcgtaacattagtgtcaaaaagcttagtacctgagaatgtacacttcagaggagacacagtgtagtgttttcctttaacaagggagttgacagtgtgcagggaatctagcgcaggatcagagacagctgattgtttaccattaaaggctgagcatctcttgttgtttgctgaacgcgcagagtacgactccgtagacagtccagcacctgcagaacgtgtcacccgacaaggaataactgaacttggaggagaaactgcaagaagggtattcacaaatgcgtggacaccaactgtattctgattattctgctgaaggagttgccgaacctcgtcaaatattgatgccttgaaacttttttgtcgtttatcaatattggtgccaacattagaaggagtgttgactgaagaaacgtgagaaggtcggttattagtttgcatcatgtgttgaggaccagaaatggaagttgaggagttagtagatcgagatttacgcttccgagaagagttgagagacggtagagaagcatcacctacaggccaaaaagattttgtgaatcgaaaagatgacccaataagactctctaaatgcttaacctttgggtcgcacgatgcggataccccaagtgcagtctaccgtggttgtggaaggaaaacttgtatctggaagatataaagaatatcagttggtggagacagatgaatgaaacacatgtaagagataatgaagtaggggaaacagacagcaactctatgttcaagagccaagatgtttgaattgtggtatgtcttgcacttagggagactatgaatggtttgatctaggaaggtgtactgctggtcaccattacggaggtatgtaagcagcgcatggatggtcttaaatgcaaacaactgtatagctagggggaaaccatggacagcaatagaggattgtttcacttgttacaagggatgatgtgcttcaatatatggttcactttgccatgcgacagccggtggaagaatgcgacccatggtatgt

SEQ ID NO: 20983 - DNA, 2134 bp, Arabidopsis thaliana
  unsure (1)..(2134): unsure at all n locations
tctctcaaaaatgattgagctttaatagaatgttaaaggtaagtcccaagttatgcatacagagataagatcccatctacccagaatataacaaataaagctctaatggtaatctcatctccaatcccaatataagaacttaactcttccctttgcattctttaatcttttaaaccctttttcagatcattcttttcttttctcttaactctaggagaagctttctcaactttgatacttctaggggatttgggtttctttaacaactaaagttcctgatatatcccagttttcactgattttatctatgttntaggtataggatcttgagtctttatattatttctcgagtctttttagtgtcttttcaagtattctatgcactgagacaataatagagataaggagacattttggagcaagagctaaggaaaaggaagctaaggacgattttggatccaggaattagggaggagtgttgattgacacactcttggtgtcgatcgacaacagtttcggcccagtaaaagtcctagatgctttcgagtttacagaagaggaaatttgccctagaagacttccctattttgttactcacgcgtttcttgttttcttcctttttgtgtttcaggtgtatgcctaggcaaacaaagagcacaaaacagaagaagcttatcaacttgtctgtactggacttgggaaaacttgaacgcaccaaccgaaaaactcagagattagcaatgactaatagagtcatcagagctgatgtagaaggagttttgagagataaggatgggcaagcctacaataaggctggtcagagattgaatgatcatggactcatcctacttgaggacgtcgatgagaatcaggcgcgcctcaacgcgcaaatagctgtcagagacacagtagggctcgctgtcgattgatacaaaagaggtgtcgatcaacaccatagggagcagaatgacgatgtagttggtgtcgaacgacacaacagaggtgtcgatcgacaccaacaccagattcctgtagctattcctccagttgcggaaccacgtcgtactcttggggatttcaacaggcctgacctgttctatgctaatcgatcagcgattgtaccccaaccattccagaggaacgactatgagctgaagctactttgctttagttggccagcatcctttccatggcttatctcatgaacagccaatggatcatatcgagcgatttgaagaccttgttctgagcatcaaagctaatggagtctcagaggactacctactgtgcaaactcttcccttattcacttgttggggaagcagcttcttggctgaagcaacttaacgcaggttccctcaagacttggagaagcatcaagatagccttcttaaacaatttctacgatgatgctaagtctgaggagttgagaaacaagttgtctaccttcacacaaggtccagctgaagctttcaaggctgattaggttcgtttcaaggagtaccaacgagactgcccacatcatggtttcagtgaggtacaacttctaggtaccttcttcagaggagttgattggagataccagatggctctagatgcagtgagcaatggtaacttcaatacacgttacccagctgttgctacagcccttatagagaaccttgcttgcagcaacaataccaagaatgctgattttgagaggaagaagattgcaggagcttttcaggaaatcagatggcagaggtgaatgctaagctggattcagttcataacttgctcacacggaagaagcatgtacactttgcagctgaagaagagactattgagcctgagcctgagtcagaggaaggagttttctatatagatggtcagggatacaggaagtttgggcagccacagggcaacttcagtggcaacaggtttacagggaaccagggttcctccaactacattccaaagcgtgctttcccgaagacctttcctcaaagcagctttcaaaggaactatggtaattcaacttaccaagccccccccccccctccaccctcagcagagacaagaatgaaatcgatgcttgagcagattcaggagagcgaacaagcttgttgtggagtcaatggcaagttttatgatgc

SEQ ID NO: 20984 - DNA, 1626 bp, Arabidopsis thaliana
tgtgaaaaatcccaagcaggcagcccccgcgcgaacgtcgaaggacccaagagagtcagaggcaatcgcgagacaggtgacgacgagccagaagctgctcggggaaggatcttcacaattttaggagattcagctttctgtcaagtcacaacggcgtcaatcaaagcttatcagaggaaggccgactcaaatcgtaactggacgcgaccgtttaacgaaccagatgacgaagtgactttttacgagagcgatactaacggcttggaccgtccgtacaatgatcccttggtcattacactaatcattggtgatttcaacgttgaacgagttttagtcgacatggggagcacactggacatcatttttctcacgaccctacgagaaatgaaggtcgatatgacgcaaattgtacaaacttcgcgacatgtgctcgggttctctggggaaaccaccatgactctcggcaccatcaagttaccagtccaagccaaggggataacgaaaatcatcaatttctccgttacttaccagccgaccgtttataatgcaattattggcacgtcatggttgaatcaattccgagacgtcgcctcgacatatcatctttgcatgaagtttcccacgagcaacggcgtgaacaccatctggggaaatcagaaaaatgcccgaatttgtttcatggcagcacacaagctcagaaaccccgtcaccgagtcgacagccgacgcgaaacataagaaggctaaactgggccgagccgaagagaaagccatctccgagcagtgatagcaactaaagatcaaggaggctcgagaatcaacaagaccagtccccgacccggtaatctttgtctggtccccagaagacttgcccggagtaagcgtcgaaatcgtagcacacgagctcaacgtcgacccaacttttaaacccgtcaagcaaaagaggagaaaattgggtcgggagcgagcggaagctgtgaaagccgaggtagagaaactgttaaggatcggctccatcaccgaggcaaagtaccccaattggctcgcaaatcccgttgtggtaaagaagaaaaatggcaaatggagagtcagcgtagacttcactgatctgatcatagcctgcccaaaggatagtttcccattgccgccaatcgatcgcctcgtggaatcaacctctggaaacaagttgctgtcattcattgaagctttcgctggctacaaccaaatcatgatgaaccccgaggatcaagagaaaaccgctttctataaagcaaaaggaatttttttgctaccgagtgatgccattcagactcaagaatgcgggggcaacttatcaacgcttcgtcaacaagatcttcgcattatagatcaggaaaacgatggaagtatatatcgacgacatgttggtaaaatccatggaagaggaagaacacatatcccatttgcgcatatgtttccaacagcttaacctctacaacttcaagctcaacccaaccaagtgtcgcttcagggtaagatccggtgaattccatggatatctagtcacgcatcgcggcatcgaggtgaatccgaagcagatcgaggcgttattagggatggcatcgcacaaaacaagcgggaagtcagc

SEQ ID NO: 20985 - DNA, 1798 bp, Arabidopsis thaliana
taccttaggaatagattaccctaacctttatgaccttatgggtttcggcgcaggtacgaatgggttctaactattctttgtgtggtgtggttgatgcttgctttatgtagaataaatatttctagcatatgttgttggtagattgctcgctttaagttttattattgcttgcattggttgagtttgcatcatttagaataatattgcttgcattagtttcttaagcgcaactaggcatgtggaatggtaaacccatgcttgtattgttgccttaagtattttgagtatgtgttggtagaaaagtagggttggtttctagtatttttaggagccttaagaaccgtaaatagtggaacttaggattttagatgaaccctagaagtttaggtgggaacactttacccggttgatcttgtggtgttttatgggcgtgttggggaaaaagcaagggttggtgtgtcaggtaagtaagatgttatgtgatagggaatcacatacgtaagaatgaaactttagttgtgccgtgtgaaatctgacccctagatcagcaagcttgtcaaggcatcatgtgagatagaaaatcacattttagaagaggaataagataaccactgtaaagaagagagagccactgccaaacctactatgggaacagccctagtgtggttgatattgccaatagccatgaaggaagtacccttcaccgtgatgatcaaagaaaatggaaagagccgatagtagatagtcgtaaagggaatgaagggaaagagagagagagagtgtcgtagttattttaatcatgagtagacgccaagagagagtgtgcagactattctcgtaaggacgaaggggatcaacacaaagttagaaaggtcatgtcgaccaaacggagaagcaatggacttctggcggtaccgagcagactttcaggtgatggtgtaatcaaagaagaagatgttggttgacccaaaccgtaagatttaagaagacttgtgtggtaatgaagtaaggaagaagcaaagacaacaagatgacatagaaattgcagtttcagagaatgtgaagcccaagacaaagaggattgtattaactcgaaggacggagttagtatttccagggtgtagaagcaggaagtttgttggaagagctagaaggacactagctcaagatcaagtcataattccaaggaagtaagaaatgaccattgtcatttccagagaatcaaagagaagaagagggatgaagctcaagacaaagccctagttatccgatggaaaggataattagaagaagagagtaaggcattcaatcatgataagtgtgtattttgcatgttttcagcatccatttgtcatcactttagcatcatatcatcattgttttataccatttctcattatttgtcatcactttacatgtttaggatagatttgcatgcatgttacatatttgcgttgatttcaggtgatttggagctgttgacgagctatctgtaagaagcgaacctgatcatgacaaaaccactcgacccagaggtcgagtaggagcttcaagatctcaagagaccactcgacccccaggtcgagtagaagacatcacaacttcacctcacctactcgaccacgaggtcgagcgtcttcatctccatcacctgaccatcactcgatcaacaccactcgaccccgtggtcgagtgtcttcaccttcattgccagaccactactcgatctcaccactctaccttaaagtcgattatcaccatcaccaccactctactacatacctgatggcaaccttca

SEQ ID NO: 20986 - DNA, 1831 bp, Arabidopsis thaliana
tagatcttgtgttgcttaatttattatgattgataataggtttttagtcaattatcctaaaacaccaatcatgtcattgtagtattttaggttgtcaatccaaatgggtgtgatgttagcaatcaagatgcaatcagagttcacagagtcaagccaaacaataacaggtttggggtgttctaggagtcctaagtgaacatgcaggaaacagaaattcaaggagtaaaaacactcgaccaacccaacttgttgccaagcactgggtgtggtcgagtaacagacaaaagatgtaacagggttactcgaaagcacagtatgttgccaaataaccgagtggtcgagtatcaggtcgagtaacatgagagaaatgcaaaaactaagcaataggtaacaagatgaagtaatcaacagcagagtaaacaaaaaaatcaatcagataaagaattcatgcggatggggtaattgagtagtttcgtttcctcagtttacaggtgattgacatactcaataaattatcgatagaaaacaagttcgataaccaaatctaagtgccaccgcaacagagaccctcaagttaaaccagtcctagactcaataaccattgacgagagctaacttaacaggcattaacgaatcaacaagttaaagccaaaacgttccatgtaaccaataccttggtaaagagccacgaatctctggaattagtgattcagacatctcatcgaacacctttcgggtgcggatttgtctggggttaaattccagttgatcaaaaaagcaataggcattaagaataactaatctagagaagggaactatcaaacaaacttaaccacctagcatactgagaattctacactactctaacccatcctcagaaacctattcactactcaaacatcattgcagagaacataaacgttgaatagaatgaaaacatgataacaacagagtaatagcaaggtgataacaggatgaacaacagtaaacgaaatcaagaacaaaatactgaatattgaatactatatcgattaagagaaaaatccggattacaaaagatcaagaacacaatgtctacgaaaaataaaacttagattcgaaaatgtaaaatacatgctacttatagagaaatattccgaaaccctaatactcaaaacgacgcagtattgggacggattaagaacgatactcaactcaggtggtcgagtgaatggtcgagtgataagctggagtcttcttctcttccttgtgctcgattgtctggttgagtgcggaatggagaagactctgaagctggcagtcgagtaaggacgtcgagtgaatgatgataagggactcgaccatgtggtagagtgattggtcgagtggatggtggctgtagtactcgacttggtggtagagtgattggtcgagtgaatgatgatggtgatactcggccatattggtagagtgattgctcgagtcaatgatgatggtgatactctgccatgttggtagagtgataggtcgagtgaatgatgatggtgaaggcagctactcgaccaaggggtcgagtggtgttgtgaagtggggaagtcgtctactcgaccttgtggtcgagtggtggatagaatgtcgtggtcgagtgatttgctgtagaggttgtggtcaagtacttcaggaacttcaggatgactgttaatacaactctcttgtttatgacataactcagcacctctatttatatgaaaactctagtcctaatcctactaggaaaacatatattaagataactcctaaagagatttgagattatcacttcctaaaccataactcggttaggatctaaacc

SEQ ID NO: 20987 - DNA, 2598 bp, Arabidopsis thaliana
acaatataaatattcacttatatagagatgagattaatctaatttcctaatctaagagaaacttaaatgcaaataatatattatatgctatgactcatatttcttctgtggttctcaaacttcttcgagtaatactttacttccaatattctctttggaaagaaactctcttttcaaaaaagtaccatcactacaagaaaacagtcgttttgcgaggaacaattgcgagggaacgaatccctcgcaaatttgcgagggaattgcaagtactttactacaccacggacgaacgttgctaatccctcgcaaatattgcgagagactgcttcctcgcaaatttgcgaggaatatacgagtactttgcaattaacaatatcaaccctcgcaaaccactcgcaaaaatctcgcaaatctttaccctaaaccctaaaatacatagaagtgatttgggatctttgatttttatttataaatgtaaatctaaatgactgtataatcatacaagttgattatatggtgatgcacaaaaacatattgtatatgtttcaatatcaacatttcataatgaagatgttaaacacttattattcatattattaaaaacacataagttcatcattgatgtatttgggaaaaatgcacatttgaattttttgagatgaaattagattctaatgtagatatttaacttcctaatgattcagaataactaatccgaataattttaattagtgttttcttgtattttttcaaattgactcaacattgcgaggtctttgcgagggatttgcaagtctgtcgtagcagttccctcgcaaatatttaccataaaccttaaattatttaaaatatttactcatgtttttatttgctaagagtcttattcgaaataggagaatctaaatcagatctgattcaaacattgaatcaaaatggtgagttaattggttgaaggattgcgagggaattgctagacgcactcgcacttccctcgcaaatattaccctaaaccctaaattattaaaaatcataagttgcgagggacttgcgaggagttttcgctattccctcgcaatatgtagtgcggtttaattggtttaaaaatcttcctcgcaatttcaaagcaaactacgcgagggttttgcgaggaaataaattcctatatatactcgaagacctagtttgagctccgctcaaaccagccgcatcaaaccctaaccctaaaaattttcttcgattctcttcttcttctctgatctcttcggcgccggatctcttcttctccgatctaattccgtcgccgcctctcttcttcttcttctctaatctgttatactcatcgccgcctctcttcttctccgatataattacggcgcagactctcttcgccgcctctcttcttctttgatctgtgctccagaaccgccgcgtctcttcttctccgactcgatatgttttgcctcaaaggtaacctctgtttctccgatctaagttcttctctcaaatctaacttattcttcttctccgatcttacttctttttcccagatctaactcttgatttgttttttgtgcaagatgccgtcggataatacttatgtacggtttagacaacagcagcgtgacccgttgcatgtcaattctctttttagtggagggaatatctcaggggttcaaggttcaggttcaggttcaaccgttccaccatcgcctccaacgccaacgactcagccttctgttaatcattctgatgttcaagctgaccgtctcaacaatctgacactggaagagctcctcgatagtcctggtcgtgctagcttgaaaaggctagacccaaagcgtcctccgggaactctctggtaaggttaagcttatagtctctggaattaggtcttgtaagttggttagttctgccttagaagtttggttctgccttagaagtctctggatttaggttggttctgccttagaattttggtcctgccttagaagtctctggatttaggttggttgtacttagcattgtagtttcttagaagtataaagacatagagatccttatgtgttttgttgctgttgttgtaggtttgacgatgactctacagttgcagcaacagtccgcagcatatttgaaagagatttcaaagaacctcatgccaattggtcacagacatcaaaggctacaatcgatcgatggtatgaaacgtttgcggtaagttttgtgctcttttgatgtttatgcttgttttgtttgctttgtctgttttgtttgctttgctttgtctgttttgtagtctgatgtttgatgtttgctttgtctgttttgtagcaagtatataactgggaccgttcaattaacaaaagagtaagggttgagtttgaagcaaagctaaagtctaggatgtctgatcaagtgtcaaggtggaagggaaattggaaggagaagggtgatgaagccaagccaaaatggattgatcctgatgtgtggaaaggtctagtacagttttggcaagatccaaagtcagagaaaaaaagtaacaacagcagaaatgctagatatcatgatccggatggcaaaggcatctataaacaccgttca

SEQ ID NO: 20988 - DNA, 586 bp, Arabidopsis thaliana
cacactaaaaaagatgtaaaacaaaccaaagccagagacttgagtacactagtcaaagaacatggcataaaccgatctttctctttcgcttcttagtctttgaaggaggatgtaaaactactttgatcgcttcatcaaacacggcttttacgttctgcaaatttagcatcatcataagtctttctttatcagattgaggtccaaaatatttggtctaattgtaaaatgtaactcaagcattaatggttactttaccatttgtgcttttgagctgcactctatgtatgctaatgctcctatttcctttcttagttcttgaccctataaaagaagcaatctttgagttataaaagagtttgattcttaacatggttcttgatcatatacattgaagaagaatctttaaaaaaacatacctgttctgggaagattgtgcaagcacctggataattctttgggaactgcatgttgtctcttagatctgcaatatcaagaaattcatcttatatactacataacatcacttacacattgatgttagatcctaacattcaagcataacagagtggtcattacttcacctgat

SEQ ID NO: 20989 - DNA, 1494 bp, Arabidopsis thaliana
tcagctcttttatttcgccatcgggtgtattaggcgctagaattatgggccatagtgattgcaaaaatagtctgagccattcgagcctctttcctgatggttttatgttccacccctctaagcccagtggcttaatacccatcaaccttacttcatctccggcccaatgaaactgcagcgtttgttccttccaattacaaagtgttgggcccaaagtggtgagccattggactcccatgaccaaatccaagcccactaacgctaaagcatagagcgtgacagggaacaccacaccgcccatcaccactggaatcgcctcatacctactccgacaaaccaacgacgttctgttcgccactctcacggtaaatggttttgttgttgtggctttgagattcattcctcgaacaactttctctccgatgaaattgtgagtagagccgctatcgatcaaggcaattagacgatttctatggattgtggctcgaactcgtatggtgctcgcattgtcaaccattcgagcgcgtacaacgtgatttctggtttcccttctgcctttatattctcctcctcaaccgcttcgtcatcattctccccttccatgaagaatagttgaggttgtttacatttgtgtccggcgtatacctctcatcacagctgaaacataaacccaaactccttttttccgtaattcttcccagctgagtttctttagcgcatgttcctctgtctctttgcgcaccaccaaacggttagggacaaaactgcgtggagatggtgagtagctcgttcccttcttttgtctttagatttgcccttccatcaaacgcgcatagttgattacttctcttagagatcgaggctggaacatacgaatcccattagagatggagtaatgcaatccattcatgaacgttcccaccaacgcctcttgagtccatccgtaaaccttgttctgtggcctttcgaattcctgttgatactcattgagcgacccggtctgccggatttgcatcaacggttcatgaaagttctcttcgtcgttgggaccaaatctagcccacaactcagcttcaaacacctcccatgtgattagcaccctatcgtgtcggagcgccttcgatgtagcctgccaccaccgttagccaccccgtcaagatgaaaagtggtgaatcgaacggcttgttccactggcacctcgtggtattcaaaatattgctttgccttgctcagccattccgtcgtgtctcctccatggaagcgtggaaaatcaagttttgatggtctggcgatggcgttgttgttgttagacgtcaccgcaacgaataggttatctagttctccacggttccctgtcgattggcactggttcccttcggtccgtcgacttcctcttgaagtcgctgaccctccactgtctctctgcgtcactgcctctgtcaaacgtgcgagagctcctccaacctcctatggcggtctcgttttctccttgag

SEQ ID NO: 20990 - DNA, 1890 bp, Arabidopsis thaliana
cgacaccctcctgtgtcgatcgacaccataggggatgctcttctcagagacgactaaatacgacggtgtcaatcgatacccctctagtgtcgatcgacaccataggggatgctcttctcagagacgactaaatacgacggtgtcaatcgatacccctctagtgtcgatcgactactagatccggatcacaccttgtgaggtgcaagtacctatgcagcctgagccagtctacactcctgctgtcccctatccggggaggcgtcgttctaagtacgaaattcacgctgctaagtgcacagccataatggagaagatcctccatactcttcctaaggatgcttcagagacatcttccacctcactcaacaggtatgtcaagcgacttgttgacaatggaaaaagttcagatgaagctaagctgcttactagacacatcagtgcaatcatgctgcctaaggccaaaaaggagaaggcatagagagtagacatagctgagtacatccgcaccattactcctggtcagaccactgcgaagcttccggatccaggtagctttgtccttgattgctctatctccacaagcagattcagccgctctttgtgtgatctgggatcaagcatcaacctcatgcccaagtctgttgctaagagactaggcatgactcactacagacctactcgcatcactctccttttcgcggatcgttccaagcgaatccctgaaggtatccttgaagatgtttttgttaaggttggtaacaggaacatgttggttaggatttgatcagacttgttaggcatatggacttagtttgaatgatcatggcaataggctacagaatgtttggagttcttttgttttcaaaacctcttccacgggttcggcttttgtgttttgctagagggcaagcaaaacctatgtctggggagttgatataacccgattttcaccgattttatctatgttttaggtatacgattttgagtctttatgttacttctcgagtctttttagtgtcttttcaggtattttatgcaatgggacaacaatggagataaggagacattttggagcaaaagctaaggaaaaggaagctaaggacgattttggttcaggaatcagcgaggagtgtcgatcgacacactcttggtgtcgatcgacaccagtttcggcccaacaaaaaccatagacgctttcaagtttacagaagctcaagtttgccccaaaagacttccctatttgcattattagtccctggacgtttgtagggtctatatatattgtttttagacctaagtttcttttatcaagtcttttagcaagttctttgcaaaccctattgtaagagacataaagctattcatccattgttattcagagtttcattcagatctatatacagtgaagagatcccttctttccgcttctctatttactgtgtttatgctttttatctcaaatatgttgtttgcttcatccaatatgtctgagtaatctgcttgttaggaataggatttctcattaggtattcatatggtttagtagattaaccccttgctaggttatctatagaattcttcatctttaattgtgcttaatgctagatctagagtaattaactagatcatgaatccaaacaatagatatgcccgccataggtatttgtagttggatctattatttgatgagtctggtttataggtgtgtaataagaatcggcctagctactaagattaacaattgaactcgttaagaatgcatatttaggttgatagtctctcggcttctccggtcactattgtggatgtcggattcgcacactcaagtatttatttgttttgtgggagagattattcttgaggacaaatatacttgaaaatagatagatg

SEQ ID NO: 20991 - DNA, 2173 bp, Arabidopsis thaliana
caaaaataaaagaaaataaaagaaagggaagagaaaaatcaaaccagtgggttgcctcccactaagcacttattttgagtcaatagcttgagtttgcggagttcaggatgtgggtggaatggtggaggattgcttcctccacgccctccaaggcggtgtgtaagctgaaccggtctagacagctgtaggtgtcgatcgacactcagcggtgtgtcgatcaatactcttctcgttacctgcaaaaacaacatgagaaacaagctttcgaagaactctaggcttgttatcttgtgaagcagacttcgaagaatcgaaagaattagtcgaagggaaaacaggagaagaaatacaagagaacctatcacctaaagctgaaataggtgttggctgaagagattgtgcagaatcagctgtctgtgaaacccgagagtgtcgatcgacaggagtggtggtgtcgatcgacaccgttgctcttcaactctcaatggcgagctgagctgacgggagcgttgtgtgtggctctgtctggggattctgagcaatctgaggaggtgtgttagtgctggaacaatgctattgatagtcttagtaagctcttaaccatccatgctaaactccctctacaaatcacacaccttgagagagattctccctctcttcacatcaaacctagcaccagctgtagataggaatgctcttccgaggataagaggatcctagggttccttctcatagtccaggactacgaaatcagcagggattatggagttaccaaccttaacaagaacattttcgagaattccttcagggaatcgtttgaacgatccgtgaagaggagagtgatgcgttcggcatgtagtgagtcatgcctagtctctcagcaacagacttagggatgaggttgatacttgatccgagatcacacaaagagaggctgaacctactggtggaaatagcgcaatcaagaacaaagctacctggatctggaagctttcagtggtctgatcaggagtgatggtgcaaatgtactctgcaatgtcttctctataagccttctctttcttgaccttaggcagcatgattacactgatgtcccgtgtcagcaccttagcttcatctgagctaataccattatcaacaagttgcttgacatacctgttgagtggagcagaagatgtctcagatgcatccttagggagagaagtgagaatcttctccatgattgctatgcacttagcagcatgaatctcttgcttcctgcttagaacgacgcttcctcagataagggacaggaggagtgtaaacagactcgggctgcattgggatttgcacctcacaaggtgcagttcggatccactgtggatcgacactagaggggtatcgatcgacaccttcgtactggctcgtctcagagaagagcgtcccgtagggtgtcagatcgacagtggaaggtgtcgatcgacaccatctctgcaactgtgaggtccagctcgtcttcagtgtccaattcttcccacacatcatctccttctatgatcaagatggcattacagctcttccttgggttagcatcaggattaccaggaagaaaaccctcttgtaacttgattgattgtgcagtttgagcgacctgtacttccagcttcttcaagtgagagcttagattgtcaatcttcccattaagatctgtataggcaacatcaaacttgccattaaactccacaacgagttttgtttggctatctagaatctgctcaagcatagaatccatgcttatctctaatgagggtggaggggggcttggtaggctgaattaccataggtcctctgaaaggtgttctgaggaaaggtctcctgataagcatgctttggagtgtagttggaggaaccctggttccctgtaaacctattgtcagtgatgttgccttgtggctgcccaaacttgttgtagccctgaccatctatgtacttcctgactcaggctcaggctcaataatttcctcctcagctgcaaagtggacatgcttcttccctgtaagcaagttatgaactgaatccaccttagcattcacctctgctatctgattgcctgaaatggctccatcaatcttcttactctaaaagtcagcattcttggtactgtttgataagtgtgtattttacatgttttgag

SEQ ID NO: 20992 - DNA, 1000 bp, Arabidopsis thaliana
cccgatcatagttaagagttcgaagtcatcagcacccattttatgcctttggagtctcatgtactctgtttctttcttctcaagaaacttcataagattggtttggtcttcttcacatacatctgcatccgctagcttcttctctaacgttgttcgtctgccaaatttaaataactaaataaataaacccatcaagaatatatctaaaatatttgtacctctctttcctctcgttgaggttcttcatctgttccttataatgattctcaatgtactgtttggctgcagcaactttctgttttgttgaatttgagagtgcttctccgtcaccgcctagtggtggaagtttcgttgccgtttctgtatcatttcctccgtcggggacggtggtttctgtcacgccaccgccgtaagtgcttccggagaacatatcctttttccgaggcttatctcgtggttgaaacttgtgaaaccaacttcttgcagaatccattttttttaattattctaaaatatgaactcttcttaatctaaaaaaggaaataaaaacgaaactaaaacgaattacaaaaataatggataatctaaaagagatataatcgaaccctagattccagaaatttggtagcaaagaagattgtttggagaaaaagattgaacgaacctgagttcatcaaatctgaaaatctgatagaagcggaaagatcggagattaagatacggttgcctaattaattttatcggaaaaggaaaaaaaagaaatcttttattgaggaaaatcagaaaatgtcgggttaccgtagaagtttgaaagcgattttatcatatatatatatagagcgtggaattgttaatatttttattttcagaatatattaatgaaatataacgcacactcagttttatagggaattgtttacaaatttaacaatacttgtgatgttgacgacgaacaattaatttagtggttatctccactctctacgcactagtttttcat

SEQ ID NO: 20993 - DNA, 524 bp, Arabidopsis thaliana
ttgatcaaaagcaaaaggagcttccttgcaatgcttgtcaaaaaaccataagagattatatgctttgttgtgctgattgtgacttcaatttgtgtttatggtgcgctagtctgccaaaaaagataaggcatagcaacgatgagcacattctcacgctatgttgtggtgaagaagcaaatggaaaatattggtgtgatatctgtgaggcagagttggatccaagtaaatggttctatacatgctttggttgtggaggcacattgcatgtggaatgcgtactaggagatttctcacgtctcatgccaggatgcaccattgactaccgggtatataccgtggaggtggttttcaataatcacaacacgcgaccaatgtgcagccggtgtcactctcgatgcaaggtttctgtaatccttaagtttcgtgagggtaacattgtatattttttttgttcacgttcatgttttctgatgcatttctcatattatctgtgaggcattgctacgatttttcatgtgagagga

SEQ ID NO: 20994 - DNA, 687 bp, Arabidopsis thaliana
ccaaccttctgttttactagagaaatactaaatcaacgagttcgttgaacactggtagtccacctttgcagcatacggaaataacctgaaacacacacaatgaatgatgtcctgttcttaaccaaaacatgagatgattgtccatacacacaagtactgacctcgacagtagaagaagttaagtgaagggtcttgacattatgtagcccactgatgagatctgtcacatctgctctcttgtcatcttcgaagaaatgaaggtccaatgtagctttggcaagtgaatccaagtgacattgtggagattcacgacgaagataatcagagtagttgaaatcaacaacattcggtgtgtcaaatgaaatatttctaggaacagtaccataataacgacagttcaaacaggtaaccgagagtttcttaatggttttgttggatatgacgtacatgaagctcggagacaccatgttccaatgcgttacatatccaacggtgaacgtcatgttgattatctttttcattatgaaaaagtctaagtgagaacttctttatattgttaccgccttgcaaagcgaatgttctatccacaaaatcaatgaaactcttttgaatgtcgatcctacagtactctttataacgacatttagggcgcaaaaggatggagttgtcaaagtcaagagtatgact

SEQ ID NO: 20995 - DNA, 1817 bp, Arabidopsis thaliana
tccaagccaattggtgtcccttgttcgtcgacgtccatcggacgtaccactgaaatctctgaaacctacgggagatccaacttgcttagagtaaagtctgatacctgcttcgatttgcaccgcgcctccaggttatccagctctacttgcagccgaggtttctccacggtcagatcgatagcagccttggtgatctggtcgatcaaagccaagttcgactccacctcggccgcttgaccctccagaaccgtgtactcctttttggcgacccccttctccttgatcccagctagcagcttcgaatacgcagcagccagctcaaccttagcatcgttaaccgccttcttcgccccttgtgcagtcgaagtcaggtccattacctttttggagatctcttccctcttctgctccaagcgatgaatctggctcctcgtggtctgcttgtcggcttgcaaccccctgatctccatctccatgaacccgatcttctcagcaaaacctttctcgaggtcttttgaagtggacagctccattttcagcctctcgatctccgcctgaaataacaatcaggtcagaatcatcaaatcatcgacgaattatttataaacaagtcaaaaccgaggtgtacctggaacgagactttgcgatcttgaccagccttcacacttgacgtcagctcccggatgagggcctttccttcttcaagctcattcgccgaggggacctggcttagacgctgctcatagagagcaaccagcttgtttgtggcagctatcgcctaccaaaagcaaaacagaaagtcacaactagcgaaaaaatataaattagaaggagacagttatcgataattacctggccctccttcgccatcatgtcagcataggccgccgcctcggctatgtttttcactccaggaacctgacagttcctccctatgatgtggcgaacaggttcgctaacccagcctcgtcctcaacgatcgggtgatcacggtcgtgattgtaagaccagtggaaaggcctgcttcccgcggatcctccgccggagttggatgtctgcctcacttcctgagaccggtttgaagaccggcccccacctctggagcctcgtcctccgccatgggacctgcccgaggatcgcctagccgcagacgcagctgcctccggagtagcagccgcaggttccatcctctcctctctaggagaggcgaccctctggtcgtcacgaccaactcagccgccggattcacctccggctgggtccgagccctcttcggagaggacggtgcaccatcaggacgaacaacttcagatggcctagatacatgagcgacctgattgttatccggttgacctgctgcagctgaggtcccgatgttgacctcaggaagcgagggatgagatgctaaggcagatgcgctggaaacagctagagtgtttccgatcgcggtcaccgcggcagacagatcaccagcacgagcaggagccccggcgttggctccttgaacacgaaggcttgggcgcctcattcttctgacgagcgggagttctgaagtggagttggaatcaggaggaactgaacaaatagagcacgacatttgttagttagcaattcgagttgcacagttgtctcgataactcgttcatttttaaaaaccaaagaaaatataacggaactcgtacctataggcagatcagcctcgggaacaggttcaatacgcgggacctctttgatcagatctagcggtgctgctggaggaacgattgcgggaactgctggagctacaggaactgctggagctacgacaagagcagcta

SEQ ID NO: 20996 - DNA, 1635 bp, Arabidopsis thaliana
gccagtgtgctttaaagactgaggacataagtgtcacttttattcttcataagataaagccaagtaccacgagagtaatcgtcaacaattgtcaagaaatatcgtgctccagaagaagaaggttcacagtaaggaccccaaatatcacaatgaatcatctcaaaaatctcagtagtcttattattgcttatcggaaaagaagaactagtttgcttagcgcggatacaaacgtcacacgccttattcgaaaaatccttatgactagaaaaaacaaaatccggtaaagactcgactactttcaaagacggatgccctaagcgttgatgccacaactccaaagattgttttggaacacccttcaccgcaacagcaacctccgtgcttcgaaaatagaccaaccctccagagggcttacctactccaatcagcgtcctcgtagtgcggtcctgaagaacacaaaatggaacactcaactgcattacacaatcattctcctccatcaactgagtaacagagatcaaatcaaaacccaaatcttcaatataaaacacattgtgtaacttcaagtgtttattcaatgtcacagaaccaaccatgtcacccatcacaatccgattatcagcaagaataattggagtcgaagtcgattttctaacattttcaagtatatcacggcggcatgtcaaatgatttgtcgcacctgtatccaaaatccacgaagtagaggaagacttaccagagagttgctcatcggagtttcctttagttgcatttatggcccgtttgacacttatccactgttcgtcggtgagattgagcacagccgcacgatcggcatctgtgatagcaacattggcatgaacaacttctgatgacgatgctccctgagcaacattatctcgtgcaacaactccaccgccacgtccagatccattggatttagtaccacaaccacgtccgttttgattacgaggcctatctccccaccattctggaaacccaagaatctgaaaacagctttctgccatgtgaccagttctcccacagttggtacacacggttgtcgaagaagatctttccccgggtcgtacacgagacgcgtgttgtgctgcaaacaccatcccgtcgggtcgagagtcactgacttgcttgtgagagcgagaatcctcatcttgagtcaccttaaggtatacatactcaagacttggtaaaggttcttgaatcaaaagagacgagcggacagtccataggctgattcatcaagtcccatgagaaaatcatgaaccttgtcgtgttcccttagcgtctccaacacggcaagacaatcacatatgcactttccacaagtacacacaatacgtggtcgacaagcatccatgttgtcccacaactttgttagtttgccgtagtatgtctcaatcgagagaccatcctgacgacaattcgataactccttgcgtagttgttgtacacgaggaccgttcgaaacgcaaaaatgtttcttgatatgttcccacaagtcacgcgcaacaggtttgtgtgagatgttggagcgcagattcggttcgattgtcatcttgatccatgagaccaagagggcgttgattgatttccaatcatcaaagtcggaagagt

SEQ ID NO: 20997 - DNA, 580 bp, Arabidopsis thaliana
ttggttgttctatattatggatgagctgatatctgaaaatactattcagtttctagactaatttctagccacaggtaatatgttaattaaatgataccacaggagcaaataccatcgaagtaatgaagcattatactcaccaagggacttaataattccatctgcgcattcccttggtgtacttcttctccttcattggacaccggatagcaaagtcagtcacatagtcccaccagacccacggcttaccggtatcattcatcactctgtagacacaagcctgacgtagattctgaacaacaacatcctttccatcataccctttcgtaaaatcctgctcaggatcaggcgcacaataccttccatggttgatgcactgagacttacactgtttactcaacgtaaacgcttcaggacagtaccaagtaatataatgtggcgtgaactgagtatgccacctttctcaagaatctgagcagctcctttaaaattcttgagaaactcaatctgagtatcacacttcttccacactcgtcattgctattagtcccagttcatctctcacgctcacaggatgtgg

SEQ ID NO: 20998 - DNA, 1947 bp, Arabidopsis thaliana
cttgaatggtttttggtccaaaatattcttaatgggatcaaccaaaccccacagcagttagttttgatttagtttctatggttcagtttttaaaaaaaaaaaaaactgaaacgaagaaaccgaagaagaagaaaaagaggaagagaaagagatggagagatttgaaagagaagtagaaagaagttcaaacttcattatccacttcttcatatttcgcacctctccattgaactccaaaattgaggaagaaatttcttgttttcagagatgaacaaaaattgaaaaaacaaatctcagagattcaaacaatttagctttttaaactaaagatattctaggtttacaagatttatatataaatagtaattaaaacgtataaaaaatgagattttgagaaaactagtaaagatggccgcaaaattaggtttgcagaaaaggatacacaggttgaagatgactggaaaattataattatacccttcattaaatttcttctgtgtacgtatattcaatttacagtgtacgtacacaaaattatttagtcgaacgtatatggtacgatttctaataagtcaagctattttattacgtattcttatatctcaataatctccatacatacataataattaaatagatatagatggtgaaataatatttgttcctcatattgaaaattatgtacgtatatgtgtaataatgtacgtatatttttgttggtaaattaatgtatgtacatgtgtaataatatacgtacatctttgtttgtaaattaaattattaagaaaattttattggtacaatattaaaccaatattggcagtgggcgagatatattctaagacgttcatacgatgtgattttgaaatattctgaattcttgacgacttgagcagtcaaatgtcatggacaagtatcatcaacgcataccatcaccaatcttgtaggatatgacctaggttgcttgtagcaaaaagattgtttgattgcgagataagacattgtttgttgtatgacttttctgttcttaaaaacactctccaatctatagtgtacgtacattggtacaaaccatgttgacacatacttcttggagtcacagctggtgtacggtcacccgggtgagaaatgttatctccgccaggtacacgctgacttgtgtacgtacactctgccaacagaagactgaattcccttggatgttgaacagtcagctgtgtgagaatgacgttctcctcaacattccctattccatattcttctacaatttcatcgttccacttgttgtaatcataatcttcgccactactttcactaccatcaatagtaggatcgatggtacttcccccatagatccatcgtcaccctgataatcatcatacccatcaccatcttcgttgtccccccatcttcatcctcatctgttttatcgtcttcaatctcgtcttactaatctatggcctcattattttcatcaacatttaaaacactatcacacacacggtcactttcagcatcgtcaccatgagtcctagagacattattcccgagtgtcttgacggttgtaatgagagagacaaacaagttgagagatggatacccaccacgaataaaaggaatcgtatcccaccctcacttgactgtcaatgtagacaggagggcgtttagtatctatcatcactaacatctctcccgtatccagtaactaattatgggattgatctatggacttcaaactgaaagtctcgcttagtgtacatacaaattccgtgtacgtcatgttttccttaacacgtacacagcgaccaaacatgttttcctctggttcaaatttccatttttcttctttgtatctccactcaccgaccatagtaaatacgagattatccattacccaactgcttcataaattcaggagaaaccccaataaatgcaactgaaaacatg

SEQ ID NO: 20999 - DNA, 2372 bp, Arabidopsis thaliana
ggggattctcctggatattcggcaggtcatttccgcaatatcaggtcggctccgcgaacatttcttcatcagttcccaaattgttattcgcatatctcccttcagcagatgattaggcccataaggcccaacatacctagttcacatgtgggcttcagagttgcgcatgtcctctacgtgatgggcttgctgggcttattgggttggactggtattttcgcaggtggattcctggaggaaatcctgctccaacatttgccccccagcccattgagtgagtaggcgaactcgatgagcggagatctaattcaggtgatattgcgaaaatatcgttgataaggtggtatcatgataagatcaatcagttttgaggataaactcattaaaatcggtttaggttcggattacctgaatcaaaagatatcgagccgatacgcgaggtagattgctgccgacttggacagtcgagatgacgcgtcccttcgttgcctcgcatccaacggctcagattcaacacggggaagagatctctgcaatctcgaaaatcatggtgatgatggccctttaaataacttctcacgtctccactcggtttcacatcaactcacacaacttccaaggtaacttctttcttctcctaatatttactgcgtttaatttctttgttgagatagaaaattttcatctttcctctattatctccatcgtgtttctctgctaatcctctttttccgatctgcttttctcttctttccttcacctccatcactttttcttcttcgaaactaaaagatgagcgacttggaggattctcagaaccagagcaaccacagctacgatgacaacgagatacgttggagtcaaagtcggcatcgtcgcggcaagaaccagacgacgccggaaccctaggcgggccgagccgagtccgaaagccttcgttgaaggcgaatcaacccaaaaagaagagccttcccaagaagaagaaaggagatgcgccgatgagaccaaacgacctagtcgatctccggagagatgccaagtcccactagaggtaaacatgattctccagaggtcaccgctcactcccgagaacgttccggagggacggtgctgtgcatacgctaacttcttcgagaagtgcaggctgttcttcctgattccggcgtgtatccttgagatgctctattgcctcggactcgcctctcccagatgtgcccaaattttgttcgccacgtgttagcgttgttcacctgagcccgggaattgaacagagagttcggctgccacgaattgctgcagtactgtcaggtcaaaaccaacgcttcaagcgacctggggacctactacatcagcgctcgtcccggatctctaattataggttgcttgaaggcgtgtcgagatactcactagcgagccaaatatttcttctttaaagtggaccgtcactccgtcggcgagttcgaccaaacgaggaggataaggacctggaccagcaccattggtcagaaggagatccgatacctttatttcctgtttagtatatataagttgtttgctctttgtactaattgtgccgttaataatgttgttccttttttggttgtttgcagcaaaaaccaaagaagtgactctctcagaattggagctcgagctgctaaccctgttctaccgtggccaaactgactggtcgactttcaccagggatcccatcagaactgctctgtccacagctccactgtaacgctcgcgttccgagttcataaagaggccggtttgttttaggggaaaactagatcatgttcgaggaacagaccaaaatacttagtcggaagaatgagaaagttcaagctgaatcagctaggtgagctaacaagctggatgaactagctagctaagctaggtgagctaaaccagctggaagagtagctagctcaggtaggtgagctgaccaacagctcgactgagctcggtgagctgatcgagtactgacccagctgagtggttcggtcagctgacactcaagctggtggactgtggtagctcacgggtgaagaggtgtctcgaccaaaaggtgtgaggtcgagcaggtaccaacgaacggttgcatcgcccaaagggtggataaaggcgagcagttacgtatggaaagatgcaactcttcggaaggatgaaaggaacggatgtgaccttacggaagggtgcaaggaatggatgtgatgcttcgggaagcatccatttgccccttatataagggaggacgcccaaggactttgaaatcattccacatcgatcatccacaccatcacaacacaccacaaatagtccaaacacaccacgaagttgttggtcggaaagggggtgcggcacggcga

SEQ ID NO: 21000 - DNA, 529 bp, Arabidopsis thaliana
tcctggtcgacgaattatacagagatcaaagtctacatataacatattcatatttttataaccgaaagaagcatgtctaattctctaactacagtcagtctctatatttgaaattactttatatatgcaccatcctaaatgatctgcaaggtgtgaaaaagggacaaaagggagacacataccgctaacttggttgtgtctttcatttgtttgatcaagagaggaactgttgatgatcggatcaaaatggttgctacaacaatggatgcccacctgtaaatagccagaaagaatataaggatatagtaatatcttggtccagatgaggttttcagactttttaactcataaatatccgaatcttatctcaacagtactcagctaacatgtgatgtatacttaagatcaactccagcagactgattaaagtgaaacatgacacaacaaacaatattaaagtttcttaccactcaaagcctgtgaatgtatgcccatatcaatgcactgctgaagggctgcgatagggaag

SEQ ID NO: 21001 - DNA, 998 bp, Arabidopsis thaliana
agcccatatattaaccgacgtcggtttatagccccgataaacacaaacaatatagataagatagtttcttctacttcaaaaaatggatgctttcagaaatttccagaaattacgggtccaattgagaaaaacgcgtatcgtcgtcttcttcatcaaaagcgaacaatttcgaaaacaaacctaacgaacaaaaatcaaatcttctctctgttaaaatctcaccgactagagaaaagctttgttttttccaattaaagttacattttttgtttgaacaaatcactttctgtgatctacatttgtgtggtcgtgaaatcaatgacggaaccagaaagattaggaggaatctccatgagttttcaggtgaatgaagaagatacggtaacgacaacatcaccaaagactcttccacggaggctccgtcgtcgtcttctcgaaccgaagagtcctgtctccgccgcagagatcgattccaaactcagagaagctgatctccgtcgtcaggtaaaatcttaaagtttgaaactttgggttaaaacagaaccgaatttgaaaaaaagatgaatttttgcagcaatattatgaatcactatcgagtaaggcacgacctaagatgagaagtccgagatcaggaagtatagaggagcttagtcagagacttgaatcaaagcttaatgctgctgaacaaaagaggtaagaagaaaagaaagagattagttttgtgtaataaggaggaatttgtgaagaggatttaatcaaagttgttgataggttaagtattttggagaaggagctggctcgtttggctaagatggatgaagctagacaagctgcgaagaatggacttgagcaacgagttgagaaagagcgtgatgagttagagagtaaggttgaagaaagggttttgaaggctgagaagaataggatgcttttgtttaaagctatggctcaacgaagagcggcgaagaggcagcgtgctcggcagagtttgatgaaga

SEQ ID NO: 21002 - DNA, 2402 bp, Arabidopsis thaliana
tgaacccatggagagcgaagaagaatactccaaccctcatgtttcttgtgatatggttacgacctatcaagaaccccatgacctagaagaaggagagattgacaaaagggatgaagaccctccaagaagaacaagcgtttacaaccggctcaaccttctagaagaacgatggcacccacgcatgataagcttaagacgactcagagattttaaccaagctattgctaagctaccacgaggtacacccttttctaaagcttgttcagcttaccatattgaccgtttctttcttgagagttgtgaaacaagaagagaaattaaggagctatatgaggaagcctacaccacctgaaaccgttcaacactctttgaaagatagagtccgggaagattcgttctgacatgttctatacgaggtgttgaattcaaagatgccctatgcgatttcggatcaagcatcaatattatgacaaaggagacatcgaagaagcttcgaatcaaagagctataacctttgaatttacggatcgggcttgcggattcatctttcacggttcctgaaggaatagtccgcaatgtttatgttcgaatcaaaaggtgcaatgtaccgaccgatttccatgtcacaaaggtcgagaaaggaagaccctcccagctcatactaggaggagcgttcctagccacaggcggcgccataatggattggcctaatcaaaaggtatcctaccccaacattgatgacaaagtatttcacgagatggtaccatttatcccgctacaaaaaggagaacgaagtcaaggggcaagaactctggagaaccatcagaagagttccaatccaagagaactcgcttagggaggaacaacccgtcttactatggctagtaagacccaaatatcgaaccaacgacgttaaacaagcgcgctgagtgggaggtaacccactaggtagctacttttccttaggatttagactttaagcttttgatcttttcagtatttgtttcaggtttttataaaaacacaacaataaaaatagaaaaagagaaaagagaaaaaaagaaaccaaaaagaaaagaaagaaagagggtcacctgaacccgtcacttggcaccgtgacacacggcctgactactcatccgagtaattggcgccgtgaagaagccggcccggcgtcccaatctttggttggagcccgcccatgcgcgccaacttttggtcaaagtccgcccggctgtgcacactttggccggagctgccctacctggcagctgagcaagcccgacggcccgggcaacatactatcacgcccgccggttcagctgacccaaaactcagccaaccaagactcgaccaatgatggccaacacgtcaattgataagggaagttgcaccgccacgaccgataggcccgccaatggattcgtttgacctacgaccattctgcgcatcccaatggctggcgaccccatccaaaaccgagccgcttattgcccacccactccaccctttcggccaagcacaacaactgcccagccatccattcacaccatccgtcaccacgaatttgattttattcgtggccatattgacaaaaacaagatcaattctatcttacgtattttttttttatgttaaagctattggtggttttaggtttttgtttcgaagaagatgcaaatggagattaaattgaatttgaccatactaagccgagtacggctgatgttaagcaaggagagagatcatccggttagttaccacaaccaaggtgacaatgtttttaacctatctttctcatgaattcatccctattcttattttcacactgggacggagtgaagtaagtatgggggggggggggttaatgaatccgttactactaatgctactctctattttgttaacttgaaacctttttccactttttacaccaatatgttctaacaaagcaaaaagtttttctttattatcgagtaatgttttcttgagtcaaaaccagtagggaactgtgatcatgttatatgatgattattgaccattatgtgttgagaattgtttcttgaggaacacttatagggttgcaaggaacaaccaatcttgaacactacactcagactgtcccctgaaagtttaaccccgtggaaatttctgttagatccaacgtcaactctaccctatattggacgattaaccggaacttaattctttctcatgtagaggtgttagatcggagaaacgagcatgtacattcaggacttcgtatccctttttaccactctctgttgatcctgaatggccactcactttcagtgattcctacccgtaaactctatcctctttttaagcctcatgcattctcttttcctttttcatttagcagatatgtgcaaaaacgtcgg

SEQ ID NO: 21003 - DNA, 1913 bp, Arabidopsis thaliana
  unsure (1)..(1913): unsure at all n locations
ggttcggacatttcatcgaacaccttttgggcgcggagatgtctgggctcaaattccagttgatcagaaagcaataggcattaaaaacaactaatctagaagggatctatcaatcaatactcaatcacctagcatactgagaattctacactactctaacccatcctcagaaacctattcactactcagacatcatagcagaaagtataaacgttgaacaagatgaaaacatgataacgacagtgtaacagcaggatgataacggaatgaacaacaataaacgaaaatcaagaacaaatactgaatactggatagataaagagaaatccggattacaaaggtctagaacatagtgtctgcggaaataaactagataaaaacttgtttgcgaaaatgtgaagtacatcctacttatagccaaatattctgaaaccctaatacttaaaacgacaaagtattaggacggattaagaactgtacctgacccatgtggttgagtgaatagctggagtcttcttttcttccttgtgctcgagtgtctggttgagtgcggaatgaagaagactctgaagctcgcaatcgagtatgtagtcgagtggtggttatggtgatattcgacttcaaggtagagtggtgagatcgagtagtggtctggtaatggaggtgaagacactcgaccttggggtcgagtgatgtgatcgagtgatggtcatgtgatggggatgaagacactcgacctcgcggtcgagtggtgcaggtgaagtggtgatgtcctctagtcgaccagggggtcgagtggtctgctgaggttgtgaagcttctactcgaccagggggtcgagtgngttttgcatgatcaagtccgcttcttccaattagctcgtcaacagctctgaatcacctgaaaacaacacaaatatgcaacatgcatgcaaaactatcctaaacatgcaaagtgatgacaaatgatgagaaatggtataaaacaacgatgatatgatgctaaagtgatgacaaatggatgctcaaaacatgcaaaatacacacttatcattttctatggctttgtgttatcacagttgtggttgcttatgtaatgtttggtcaagggaaccaaaagaatctttcgattggttattgagtatatgcaatcttatttatattttgtaatgttttatggattataacgaatcgtgtaacgttatttgaactcaaaagtaatgaaaatgcaacattgaaacatgtcttgatacattcagaattaacaatgtcttaataccaaacatgacaagacaaaacaaaacatcatctgatgagttatctggttcagaaacaagccgaaaagcaaacaaaaaacaaaagctgcattaacacattgtttatcgggaacattcaaaccatgatctctatccgtgatatgtttgtgaatttccacttactctctgtgttctacctctctccatccgctctgtgcatctcctcttcctcttcttctctgtgttccacctctctgtgatagttgggaagcttgggatggcactacatatggagcttgagaagttgctccctgagaagcttgagatggttctacttgtgaagttgctccaagagatgtttgagatggtgcaggtgctccttgtgacggatctcctcgggaagcttgagatggttctcgttgcaatggttttccttgaccaaaaaatatattcctcgactcgtgcatccacaacataatttttcatcatcaaccaccttatgcacatgagaattttaaagatgatatgaaataaacctgatcttttcttggtcgacccctagatctttttgttggaggtgaacagtctcattcttacaccttgtttgttgtgccttcttgctggaaattagacaggtcatgctcgatacatcgtgata

SEQ ID NO: 21004 - DNA, 1577 bp, Arabidopsis thaliana
ggaagtcttcaagtacatcaggtggctctttggttaggttaagtttgtcaactagttcggtcctttgcctcttcggaggtggatgcaattgtagaggtgcattggttggtgtgacaacacgtcctcgaatagcagcagtggtctgaacttgcaaagcaactttagtagatagttctggttcagcccatttggggtgtcgatcgacacaggtaatggtgtcgatctacaccatctctacagatcgattttcagcaacgaatccggagcttgcttcatgtggacatttgttgttgctgagtaccttgtcatgaacaataactgtgtctatagaggtctctacagagtatgcctgaccatcgatggggggtggcttcactgtaatcctacatgggactatgtcactgacctattctaagacaacccctgtctttgtgttgtcatcctgcttctctggagcatcatctcgtagcatatcactctgaagagggggtgacaacttctctatatcaaccggaggcaactgaagtagagtctcatccatgatacccatgcaatgcatctcaggagtctcctgcttagacagtcgaggcagaagacaaggaacttgtggtgtgaagacttgtctagtaacaggtggagatgcaagacatataggaggagtttgagtccagtgtagatcgacactaggtgagtgtcgaatgacaccactgtctagaatcaagcctgctctgtcaaatgtcaacattgtattgtctgtttggtgctggtgtcgatcgacatgaggtgggtgtcgttcgacaccatcagggtcgactctggtcgatctggctttgtcacagcttggcttctctctggagaattgttggtgtcgatcgacgcagataatggtgtcgttcgacaccatcgggaataagttcctcctcctctgtgaaagtattgattccactcgacaaagtcaaaacaagagtcgtcaagattaataggtgtcgatcgacaccctgatatatcgttcgacactgagacgtttcctgcaactggacgagatgaagtttgagctgaacattcgcgacgaaggattgggtttagttgctttccactgggtagtgtgactgcattgatagaggctgatggaggtgagagttcggatatatgagagcgtagattgtcaatcttgctatttagattcgtgtagagagaatcatgtttgctttcgagctttgtttggcctgcaagaagcagcgcaagcatagactccattctggtctctgatgagggtggaggggaagataggagcagaaattgctgaaacaggagtcgctttatttgcggtggctatctcagctgaaattcttcgttcagtgtcaaattcatgtgtcgaacgactagttaaagcattggtaatgaggagtaatgcttcactagtagttcttgtcatgaagttacagtagctcgctgcatcaagttgagcctggtatggcatggctatccctctttagaagatattgatgagttggctctcttggaaaccatgttggggacattctctctgataggatttgaatctgatccaagctgca

SEQ ID NO: 21005 - DNA, 881 bp, Arabidopsis thaliana columbia
tgaacattattcgatagatcaactatgttcgtgtcgactaccgagtaatggcgcccgaaaattcccttaaattcttcgcactaaatgatcgccggttcaaatattggcgtctagtggcgtttatgtatttaaagatgggcattctataaatatgagacacatgtgtgacacacatttagtcgtcctcccttaccaagatcacattctcattcggatcatggccatccacactctcctcttcgtatcacttctcatattctcactcatcgagtcgagtagtggaggaaagaaagatagactcttcaccgatctccaaaactcaattgaggtcaccgctaaacccgttaaagatagcggaggtttgtgaaccgtcttaccttctttataattcaaagattttgtaccttatctattatcttttcaaatccgcgactaaagtgtgtattcataagtagtgaagttgcccactaggctctaactgtaggttaagtataaagatatattacctattttaatacggaaaaaatagttattttcgtttatacatctctagactctttttttggaatatacatgatttatgattcatctccatacttgtattattattatttttataaatctatatactcaaatttgcacatggatgatctttagttttagaggctggaaaagatatggtgacaattacatggaagctaaagtcgtcgtcagccaaggtcgacacggatactgccttcaagacaatccaagtcaagctttgttatgcaccgatcagccaagttgatagaccgtggcgtaagactgataacaagctcttcaaggacagaagttgcctcatgagattgtgtcaaggcatcgacaagacccccaatcactcg

SEQ ID NO: 21006 - DNA, 442 bp, Arabidopsis thaliana
aaaagttttgttttcggaattgttaaggtttggattttgattagtgtttgtgtttttgtagagcttatgatcgagctgctattaaatttagaggtgttgatgctgatatcaactttactcttggtgattatgaggaagatatgaaacaggtttttggatataagtcttttgttttggttatatgattgttttgagtagttttttctttaactgtgttatcttcttgtttaggtacaaaacttgagtaaggaagagtttgtgcatatactgcgtagacagagcacggggttttcgcgggggagttcgaagtatcgaggggttacgttacacaaatgtggtagatgggaagctaggatggggcagtttcttggtaaaaagtgagcaattttgttcttaaatatgaactttttgattttagaaagggtatgaaactaggaatggt

SEQ ID NO: 21007 - DNA, 497 bp, Arabidopsis thaliana
tgggcgaagacgttgtttagctttggcagatacttggagtgttccaaataattttttatttccttaaaaaccagataacgttttgtcaattcaagtatttcatataattggaaatgattttgaggattatgaaagaaaagagttttagtttaccataggttttttgacataaccacttggagcagtatgatcctgcagagtcattataggtattaatcatggtttaaggttttaaatcatgactagaggaataagagaagactagaaggtttacttgagcaaaatcgctgtaaatcactgcaaaaaacgccttcatgagtatgcaaaatgctgactgtaaacagagaatcccattgttgttgttgttgtgattgtggttgacaccaaaagacagataaatagaaatggaagagaactcacatcacacccctctggggattgcagcgacgccagcatgaggtcctcctaaggagacatagttgatgactggtggagca

SEQ ID NO: 21008 - DNA, 543 bp, Arabidopsis thaliana
cataaaattaagtcttaacagagaaaatcgaacaaaaaaatcttagaagacataccgcattcattgctgaaacagggagccagcctccattctgctgttgtgcaagatctaggagaggaataactgcggactgcttgtaattggatggatagtaagagagaatctccttaacctacacattttggacataacaattcagtaagtctggatgcatgcggaaatcgatttcaccgttaatgcaagattactgtagccagaaatgaaagatacagtaaactggaactaaatgcacaagaaagtattaggatttaaactacaatgaaaccggtttactaatttctggacagtctttctgccacactagcagattcaaatctgttggccatttgggtcgttcactctaagtctctcccttaaatcagttccagaatagccgattctaaatatgtaacaacaaataagcaatcaaaaatatcagaaaatcccagtctttgtcttttaatatcctttggtagaatgctaactcagagacccataattcat

SEQ ID NO: 21009 - DNA, 592 bp, Arabidopsis thaliana
  unsure (1)..(592): unsure at all n locations
tgttcctttcttttggtaatattgacaatggatcttggtattattggttaggcactaaattcttgtatcaacttagagcgcatcatacaagttatactgtatatgatcaatatatttatattctacatattatggccctggtccctcttgtttgtttaactgatgatgtgctagcctcagctcacagtattgttgctttcttgtttcttctcctttacactaccagcctcttgatgatccaaaacaaacaatggacattatactggaaacattgaaagatacagaacagagagggatagttgatcgaggttggggtggccttggaaaccgtaagcagcttctgtaccttctattttgagtctgtgtactgaaatggttttcttcttgcttttatactgattcctgacacatttttaccaactaacattttgcagttgctactgaagttcctgaaaatgtattcttagtggaggactgtcctcacgattggttgtttctcaatngtcagctgtggtaaccctctttagatttcaatatatactacatcacatcttgaagagtatctctaattgagctgttcttggtgtgtgat

SEQ ID NO: 21010 - DNA, 2344 bp, Arabidopsis thaliana
caagggagaaagaaaaatcaaaccagtgggttgccttcaactaagcgcttgttttgagtcaatagcttgacttggcggagttcaagatgtggtgtagtggtggaggattgttgctgcctcctggccttctcaggcggtctgtagacagatctggtcggagcagctgcaggtgtcgatcgacactcagtggtgtgtcgatcgacactcttctcgtcacctgcaagaacaacaggagaaacaagctttcaaagaactctaggcttgttatcttgtgaagcagacttcgaagaatctaaagaattagtcgaaggtaaagcaggagaagagatagatgagaacttatcacaaagggcctgaagtggtgtgggctgaagaggttgtgcagaaccctctgtctgtgaatcccgagggtgtcgatcgacatgagtggtggtgtcgatcgaccctgttgcattacaactctcattggcgagctgagctgattggagcgttgtgtgtggctctgttgtgggattctgagcagtcttagaaggtgtgtatgtgctagagtcaatactactgatagtcttcgtaagctctgaaccatccatgccaaatttcatctccaaatcataaacctttagagagatccgacctctcttcacatcaaacctagcatcagctgtagctaggaacgctctttcaaggataagaggatcctttggttccttctcatagtcgaggaccacaaaatcagcagggataacagagttaccaaccttaacaggaacatcttcaaaaattccttcagggattcttttggaacgatccgcgaagaggagagtgattctagtcggcatgtagttagtcatgcctagtctctcagcaacagactaaggcatgaggttgatacttgatcccagatcacacaaagagcgactgaacttgcttgtggaaattgagcaatcaagaacgaagctacctggatctggaagcttctcagtggtctaatcaggagtgatggtgcagatgtactcaacaatgtccactctctgtgccttaggcagcatgattgcaccaatgtcccgtgtcagcagtgaggcttcatctaagctaataccattgtcaacaagtcgcttgacatacatgttgagtggagcagaagatgtctcagatgcatccttaggaagagaatggaggatcttctccattatggatgtgcacttagcagcatgaatctccttcttagaacgacgcttcctcggataagggacacgaggagtgtaaatagactaaggctgcattggtattcgcacctcacaaggtgcagtccggatccagtgtcgatcgacattagaggggtatcaatcgacaccttcataaggaatcgtctcagagaagagcgttccagggtgtcaatcgaaactggaaggtgtcggtcgacaccaactctacagctgcgagcttgatatgtcctggtttttattaatttctaacatagttttaaaattgtttttagggtatttctagtctttttcgtatgttttgagtcatttcaggtacatttacacatctgggagctatggagcataataaggaattttggaagcttttcagcaatgaagattatcaaagacgtttttcgcgtgatggtgtcgatcgacaccacacctatgtcgatcgacacccccccccccactctctcgcgagcagaggaacatcatgattgcattaactagaacaaggttcacgaaccaattggactgatacaaagaatgcattcatgaatcacttattcgatgaatccgtgaaagaggcacttcgtttgcaaatctcttcattcactcaggctccagccgagtcccttagagcagcttggctccgcttcaggtcttattagcgagaatatccccaacatggcttccaagataggcacctcatcaatctattctacaaaggaatagccaagccataccagagtcaactcgatgcagcaagctattgtaacttcatgacaagaaccactagtgaagcattactcctcatcaccaatgctttaactagtctttcgacacaggaagttgacagagaacgaagaatttcagctgagattgccaccgcaagcaaagagactcttgtttcagcaaattctgctcctatccaagcccccctccaccctccttagacaatagactcgattccatgcttgcccagattctggtgggccaaccaaaactcgaagataagtttgatagcaaatatgattctctctacacagatctaaatagcaagattgacaatctccgctctcatatattcgagccctcacctacatcagcctctatcaatgcagtcacactacgca

SEQ ID NO: 21011 - DNA, 2722 bp, Arabidopsis thaliana
tcaataacacaactatctaagttagaatgacacaactgactcataagaaaagaacagatgaagttagtaactcacttccccatacttaaataacattgtccctagagttattaagctagaggaatccaaagaaatatagtcaatagttaaaagttagagaaacgtgagttgccacctgagagtggtgtcgatcgataccagggtggtgtcggtcgacaccctggtcgtttgtgcatagctttgcgaattcagctcattgttgtagagcttgggttagtgttttcacatggatcctccagttagactgttaaatcactaaaacacacatcaataggttcaacaaagcttaagatgataggtgcaacaagtttcaaaacaaataacaaatagtctgaaacaaagcaaaaccaaaggttcctataaaaccaaaaatccgaagttaaactcaaatgaatgaaagaatgaaaaagaagaatacttactagtgggttgcctctcactaagcgcttgtttatattcaatagcttgactctgcagttgcttaattaacaggtgtgtcctgaagatccaaaggcttttctagtggaatctcggcttcagcccagtagtgtttgactctctgtccattcacagcaaatgatcttccattgttgtctgtaagaacgatagttccatatggcctaaccgaatggactgtgtagggacctgaccaacgagaagactttttccaggaaataatctcaatctagaatcataaagaagtacctggtcatcaggctcaaaggttcgagtgaggatcttcttgtcatggtaagcctttgtgcgttccttgtagagctttgagttgtcataggcctgaatccgtatctcatcaagctcattcaactgaataactctcctttctccagctgatttgatgtgaaattcatcatcttaactgtccaagctgctttgtgctctaattccactagaagatgacaagctttaccatatagaagattaaaaggtgtggtcccaagcggagttttgaaagctgtcctgtaaacccacaatgcatcatctaacttgtaagaccactcctttttcgctttacccactgttttctcaagaatctctttgatttgtctgttggaaacttcaacttgaccgctcgtttgtggatggaaaggagtagcaactcgatgttgaactccatactgtaaaaccaattttgcaagaatcttgttaatgaaatgcttacctccatcactaatgactatgcatggcactcgaaaatgatagagttgaagagtttcatgacaaccgttgaatcgttcttcggactagctatagctttctacccatttggagacataatccacagctactaggatgtagagattcttgttggaaggtgggaatggtcccatgaaatctataccccaacaatcgaatacttcgacttcgagtataaatttctgaggcatctcattacgcttggtgatctttccccttctctgacaagggtcctattgtgaccagagtatcccgaaacattgtaggccaccaaaagcctgcttgaagaactttggatactgttttgaaagttgcaaaatgaccaccatagctagagctgtgacaatacgatagtatatcagggacctctgttgcagcaatgcatctcctgtaaattccatcagaacaatgcttatatagataaggctcatcccaatgatatcgcctaatctctcgtaggaatctcttcttgttgtaatctgtaaaattatcaggttccacatctgcagctaggtaattaacaatattagcataccaggggtaatctttctcgaccgctgtgacggcgctattctcagttggtgaccaatttcttttcgattcagaagggtgtcgatcgacaagtgcaatggtgttgatcgacaccatcgcacaactttgactgtctacttcctctgaaatgtgagtgtcgatcgacataatgggagtgtcgatcgacactgaagctcgattctgcaacctatcaactttggcgctatttttgggtagaacgatctaccaacacaagagtgataaaggtaggctcaagattggaatacccaagacgcatagcaactgaacgaggcatcagattcacactagaacagagatcatataaagctcttgggaaggagtcatgattaatggtgacactaagtacaaaagttccaggatcaggtagctttcttgggatttgttcctgaatgatgttgctgccctgctctgaaatcatcataacactgcattcttttgtcaaattcttagtgaccattgtcttaacataccttctgattttgaaagatagatgaatagcttcaactagaggcatctcaacaatcagcttatcaatcatagtcttgcatctaacatcatctaaggcttgtcttgactttttaggactcttggggaagggaattcgccgatttgctgacttggttgcagctggaatttgcacattgtctaaacgaactgggtgtcgatcgacaggagctgggtgtcgatcgacaccatcgggaatagtttcctcctcctccacgaaattgtctattccactcgacaaagggaaaacagagtcgtcaacagtatttggatacaccagggtgtcgatcgacactgattcgttttctgcaattaggaaagatgaaggctatggttaattaagctagcttagtttctcgattgaagggga

SEQ ID NO: 21012 - DNA, 2020 bp, Arabidopsis thaliana
ggttggacggttacttgacttggttctcggatagtttcgtcgacgtcgtgaggcgtttctgcgactccgattgtgcgacgttatctccatgttgtggttcccccactacgtgatgcaactgccacgatttctgaaatgcggcgtcgcaacaccgtttccttctcatgggtcatcccgtgatgcccaggagacagaatctgagatcaatcatcacatcgatgccgcgtgtttggggactgtccggactagttcatgggcgcatcgttggtggcaatcaattccaattcatcttcccgagtgaagaatcgttggagttggtggtgagacggggtccttgggctttcaatgacaggatgctcattctccagcattggaacccgaacccgcttgaaaatcaaccgatcattaatttcattcccttttggattcagatttgtggcattccatttcactacctcaatcgagaagtcatttctcacattggtcggtctcttggaaacctcttggacgtggattacgatgcagaggttgtagcccgtgttgaatttgtgagagttcgtgttgactgggacatccaacttcccctgcgatttcagagacatttccagttcaaggccggtgaaaataccctgctcaggttccgttacgagcgtcttcgaggcttctgcgaggtgtgtggcttgctgactcatgacactggagcatgtgtcctgcagaatggtggcgaagagcagcactttgatgatgataataatgaagacatgcctcctcctgcagaacatcacaacccaggcgtagtcattcgtgaaatcaatgatgatgaaccaaatggagtcctggagctagaaagacacaatgaagatgaggaacaggaagatatggatgatcatcatgatgctctcgcagaatttcaagacatggaagcgatgcgctattccatgtttaatggtgagatggagacaagtgaattgtttaaccatattcctccttttgaaaacgctacaagagacatcccagggagctctgcccatccaactgctgagtcagtgttgcagtcggatctggacttgttcaatggagtggatttggcgaacgctcccctggttccagctattgataggggaaaacgaaagagggaggattcgctggatgaaggtgaggatagcgagccaaacaaggtggtgatgtgagataggtgaaagcagtgactgttccggcgcaacggttcaattgattgacgtgaggagaggcccggtggcgcagaaacacctcttcatccatgaggacaacgcttggaactgtagaggactgggcaatgacctcgcagttcgacgtctgaaggagatgaagaagaagttctctccggacatcattgtccttatggaaactaagcaaagagatgacatccgtcagagatgtgtgtagtgatgtagggtatgatagggttgtaacggttccaccagatggtttaagtggtggaattgctttaatgtggaaaaattgtgtttctgtttcagttctttatcaatccccaaaccttgtagatacctttgttaatattattggatttgggttctatttatcttgtgtttatggtcacccaaatccaatctatagacacttggtttgggaaagattataacgtacagcaactcaaagaaccgaaccttggatggcaattggtgacttcaacgaaatcagaggcaaccatgagaaaaaggtggaaatcctaggctagagagctcgttcacagattttagaagaatgatgcaaatttgtgatttcaaagatctcaaacacataggagacccgttttcctgggttggtaaacgccactcccatgacgttgcttgctgcttggatcgctcaatggttaacaatgaatggttgacacagttcccagcatctcacatggagtttctagagctaattgaattagaccatcaacctgtgattactataatcaccagtgacttgtaacaaaagtacaatcagttatgctttgatagaagattggttg

SEQ ID NO: 21013 - DNA, 2311 bp, Arabidopsis thaliana columbia
ctttgaaggaacgcatttagactgctgggttggtttatgatgaggtggctcggtacttgacagatggtcgagtccaaaatctgcagaacattcccatgaataagttttcagagaactggaagaatctgttcaagatatcttgttgaaattggtctcccacaacaaaggaagggtatgtgagcattgacagaggaaggcttgtctatcgcatagctcacaaaatggcgattgattttggagaagtggtgtatgatcatgtttttcaacttgctctgaagcctgtctccaacttctttctgtcgtttcctagcctcatttattgcttgattcagactcaacatcctgacatccagatactcaagcgcacatcggccagggtttcacaaggtcagtcagctggcaagaaggtagcatcttcaacagcaccagccacgcctttgggtctacgggcagctgtgcaacaggctgtcaccattctgcaggctgccttagatgcaggtaagtgatgtgcctctatcctttgctcttctgttataataatacctattgaaatttttgactaagttgtgcactcaagcagggggagatgatgcgagaactgcggatgagtatgggaactttgatctatgactaagggggcacatgatttgagggggagtatttgtttttagttggttttgtttgttcttatcgtttgggtctagggttatttagaccagaacaatgctttgctcgggtgattgtatcatcacgatgtgtaataagatgtttaaaaacagggtttttaaaactaattgcaatatgttgattatgctagtttatggctctagattctgtctactggctgtgtgttgtgtttcctgattgcattttaggttatatcaatggaggaatgcttgagtatcaaactcagtaaaaaagggggagattgaagatgtagagtttgatcaatcagctgatggcgatcagaacgttgatggatttcaggaagctgcatcgagttgcatcagacgcttgagttgctgacatgaatgcaagagcagacgtggcaagttgtggcggatgatgtggagagccaagaatggaagctggcttggcgtggtatcaaagacaagattcatcgagaagatataaaagatatcatctcgaagaataaggaaaggaatgggcttggaaacaaggaagattccatatcaagagaatctcggagatcctaggtttagggttctggagaataggtataagtattctaggataaagagggagccgccttgagcactctagaatatttgatacattacttcaaagcattgtaagagcttgaaggtgagtgtgtagttctcttggtcttcacgggttagtgataagaaacagaggagagaattaaggcttagttattcttagtcgggtttgattttttaggtagattagatcaagtaagaaccgagataatacttgtaaaagagtttattattaataagaataaattttaagcatttcaacatcttgtgacgtctctataccttttaatgtcatccaagcattttgctctatgtgttttattgatggcttttattttttccttaaaatttagatgataacgcttcagatctcactcttcatttcatgactgtactctttgttgtatgttatgttaggcaagcaaccttgaatcaaacttcttggtggactcctacaattgaggagagagacaatgtcgagatgtaacacaaattttattgaaaatctttatcggctgatccgtgtttgtatggaagagaataaatctatttgtggtgagattaagaggttcaaagaatataaccatagttgatgcaaaattagatgacgctactcccggccggcccataccttaaagtgtaaaacatctaatattttgaaatagaggggtgtcatatttacattatatttttgaaatataatatattaagagaaaatagaataatatgagttgtctataaataattataaattttaaataatattaatatcattttcacattataattatccaaaaataataattttattaattaaatgaaacctaagtaacggacatggtgaattattaacttatgttgtcgctaatgtactgtaggtaggaattaaacgaatatacaattttcaaatgtttgaaacattatgttaattttgcaatatgtataatacattgtcaacttcatccatgatataaataagatgttgtatggactgtataaaaataataataaaagaatcataccattcacatacagtagaaaatacttatttttacttttaataaataata

SEQ ID NO: 21014 - DNA, 825 bp, Arabidopsis thaliana
tcctaatcaaggggtatgtggccaagacaacaagagtgagacgccagttgagtataaaagaaatgatgaaagcagtcacaacaagacctaaattctcaagtagaattgtcgatctatcgaccacgatggttctaagcaaagtcgcatcactttcaagccgcgatgccaacatcgaactagtgttatcaaccttatcaaaccacccgatttcattcctcaagatcgctaaacaaagaagagaacaatcacatatttaaatcaaccaatgtatagacaactagtcgtaggatttagctagactgcggttttgtgtttgtgcgtacctgaaaacatcttttgtcggactcggagagtgagacgctcacccataataccaaaggtggtatgctcaatggtatgtacgatgacagtgatgacggagccacaacagaagaggatagagattcttttgacctcgttttgagttgtctcccagtccatgtaataagatactaaagcctgtgcgataccaagcgcgaaaagcggcatttgagatcccgcaataaaggaacctaacgtcccacataatccgtatttccaatccggacggatcatagagtaaagacgtcccaccgttactttggcctgtttggtcgtatctggttggtttactgattgatgaatggacgaggtcgtctccgtgattggtagttccggcaagggttttgtactgcagaaattaaagataaagaaccttcatgagaataactataacataagtgataaacgggattgggcatcataaatattgagtataaatacctgactggtaagcttggagtgtgg

SEQ ID NO: 21015 - DNA, 1741 bp, Arabidopsis thaliana
ctctctgtggcaaggaagctgggtttcgttcactacaagccttgtgcctaaccttgattcttgctgataggagttcaaggagaccttttggcaagttagaggatgtgtcagtaatgattaatggagtagaggtccctactgattttgttgtgcttgagatggatgaagaatctaaggatcctctgatcttaggaagacctttcttggcttcaactggagcagtcatagatgttaagcaaggaaaaattaatcttaatatgggggaggatttcaaaatgaactatgaaatcagggacactatgaagaagccaacaatagaaggacaaaccttcttagttgaagaaatgggtcagctagctaatgaactgctagaggagcttactaacaaagatcaccttcaaactcctgtgatcaaaagtagtgaagctggatttctctccagtgagaccttgagctatgagatgtcattagactcacacaacaaagtaccaggatcagagatctttaaaggtgtcattgcgttagaaagagaggatgttgcattgaacgaggaaggctcaattgatattcgactagagtgctcaaccaaacagctaaagtcaagcatgagggcatcaaatgattggctagaactcaaggagaggtctaaatggcacgacagagctattagagagctaacacacactatgaaagagctgaaggatcaagtcaaggatctctatgggaaagccaaccaagcaccactcgacatcaaggacgtcccaaatgatgaagttattcctatggttagtaaagaaggatgtgaattcacattagaacagtctagagaagacgactatccagatgatgaaaaaggagcttaccaagaaaggggcattgagtactcaattacagacttgtcacgagagcatgctgaatttgatgttgtatctactaaggaaggagaggagacgtcaattctactctatcaccctccttgagcctaatgagtgtgaggagtcaagctagagatttaaaacaagctcacttgggagaagtcccatgattatccttgtatataatttttctttcttgttatttttgatttgtttttgttgtgtttctggttttcaggaatgaagaagtaacctggagatagagtaaaaattcagaaattttactccaccaagagcatggggatcgagtataccagtccagaggagtgcaaaaatttgaaaattttctgttgcacctggtgaccttgtgatcgagtaagaaggtcgagtaccgtctggtttcactcacaaaaattcaaatgcatcaccacatactcgatcatcaagcagagttaacctccgcatttaaatgagtttactcgaccaccaagccgagttaacatctacaggtcaccaagtttactcgaccatggaggcatcccaactgcccgttttcactcgatcaccaaggcgacactttagtccatttctcagaccaatatactcgaccgccggaccaaacgtcctgtgaaccctgcgatcgagtatcatgcaccagaggaggaggaacaacaacaaggtcccagtattccatgggattacaccagagaggagatggcacacacaaccatcattgtatatccattttctgttttcgttttgttttagtgtctcttgaactcttctttagacttctattacacaagggactgtatagtttaagtttgggggaggattcagaagtatttacatgtttgctagtgagc

SEQ ID NO: 21016 - DNA, 628 bp, Arabidopsis thaliana
ggggatctaacggccgccagtgtgctctaaaggaattcaagatctaggggtaggaagacggcttgaatgaaagggagaatggtgccaaatactagcatccagatctgcacgagatggggcaccagcttatcatccggtacgccgttgagggtatggttcaaggtggcaaagccagcttccagcagcccgcgtagatcgtcgactatagctgtcggcgtacgcctctgcacgcagcgctgaatatggatgatcactagtttgttcagatcctcaattgcaatgcgaacatcttcgccgtcgaaaatcaccaacagttttgcttttaagaagtcccatgcatcttcaggactcatattatgaagaccaaagccttgtaacgtttcccgtacaacagcctcagtgaggaagcccccagtacttcctaacgatgacggcccagcaaaccctgcagtagctgccccagcgactgtcgaattcgccaaccattccggctgttcttctgcaagcgtcttctcttccttcttcttgtcgcggagatctgcccaccgatgtaatagatccaacccgcctacagacttgctgaaagaagtagtagtagcactcggggaagcggagtgaaagagtatag

SEQ ID NO: 21017 - DNA, 625 bp, Arabidopsis thaliana
cacatctgcagtataaaatactcgcgggaactatcaagaacaagatccagcttctgttcagagagggaatcggtaactcgaccggatggggctgatccatccaaaaaagtgaaagtaacggtgggacgtctttactctatgatccgtccggactggatgtatggcgtgtgtggcacgatatgtgcctttatcgctggatctcaaatgccccttttcgcgcttggcgtctcgcaagccttagtttcctattacagtggttgggatgagactcaaaaagagatcaagaagatcgctatcctcttctgctgcgcgtccgttatcactctaattgtctacaccattgagcatatctgctttggcactatgggcgagcgtctcactctccgtgtccgcgaaaatatgttcagaggttcgtctcaaactctcaatgcaagctttaaataaatgataaatttaaaattcttcagaaattagagatcccaatttttattatcatgtgatacttattctgtttttggtttaatagcaatcttgaagaatgaaatcgggtggtttgatgaggtggacaacacaagctcaatgttggcatcgcggcttgagagcgatgcaactttgcttaaaacca

SEQ ID NO: 21018 - DNA, 504 bp, Arabidopsis thaliana columbia
tgaagaagatgcagcttttagtacaaatagattttggttttgttgagttttagttctttttttggcttctccttgagatcatgatcatcaccatgaacgtcttcaaacaccgacaaaggcaatgacttggacaataaaccgacctcagtcttaaatgtaatcaaaccagaggaacggttcacttgaatctcgccaagcgagatccaaaccatgaactccttagccttaaccccagtgagtttcttgatcctgttaggctcgaaatacgcagtgacttcatcttcgaaacatacgacaacgttatcgaatcttaacaagtcttgatatctccttttctgatcttctatcttcttctccttgtgctttaaccaaacgaaacccgtgtccttcacgtatccacattctttgatctccttgttactaaggagccggtttggtaaccgatttcggataatagcgaaccgaatttctctctgcatgtcttgtctccatggtacacctctg

SEQ ID NO: 21019 - DNA, 508 bp, Arabidopsis thaliana
ccctgtgctcatcaagatgcttgtgggtttgaggatcaattccttgccttaaaagtttcttacgaagatgagtgttccaatagttcttaatttcattatcagtccttcccggtatccttcccgcgatcaatgaccacctgcatcacacattagaatttccatgaagaactagatcggttaactacctattctggttacaagacaagcttgcactgacatcctagtaatcatagacaatttgaaaacagaatgaatgatctctagaactattaatttgctctagaaccagaatcaacttaattaaaattatactctttagtgactagagacgggattatccattcgttctatataaatatcgtgtcaagaatcaaagtatcattgttctacatagctataagaatagatgggatcaagctaaaatcagagccttcatgtatatgtgggagaaatcgtaccctagctagcttatacagacaaatagctctagtgtatgggtagagagaga

SEQ ID NO: 21020 - DNA, 2318 bp, Arabidopsis thaliana
ctatctcatcatcatcccctatgcatatgcaacaatcctaaatgaaacactctagactcgatcctaaatgtaatgcaactacatgaacactctatttttgtgaaatcattttctgaaatttttcaaatttttttggtttttctatgccttagatgaatgcagactcaaaaatatacacaatgcaacacacacttcctgagccctctcccaaacttaaatcacacagtccactgtgtgaataaacttggaagagagtactcaggataaatccaatcacagaaacaaaaaatgaagaaacaaatcacaacagatgatataatacaatgatgaagtgaggcgcttacctcagtcgaagaatgaacgtagttgctcgtcaatggctgcctgtgattgctcccaggccatagacgaaccgccctgttctatctcagctccagcatgtgggtactcgacctcagtgcctctatggcggccagcaccgccatgagtatactcgacctccattcttctgctgcggccagaccgcagtcgagtgatctccagtcgtggataaactaaaacatggtcgagtatccttcattgctctgtggtcgagtatagtgttgtactctcagagctagaatccacttcactcatctctttatacttatctcctgaaaacactaaccaaatgcatcaaaaacaacaaggaaaaataaagacatgtacaaagatagacatgggatttgctcctacgtgagcttgttttaagtctctaagcttgacttctcatactcattaggcttagggtgggttgtagagaggaaatgaggtctcctctccttctttagtagagtgatcatcatactcattagggtttcttgacaggtctgcaattgggtactcagtggccatgtcctcacagtaagcttcttttttatcaagatagtcttctcctctagaccattccgacgtgaattcacatccttctttgctgacaagtatagtggctccatcgtgaggggcgtgcttaatgttgagtggtacttggttcgcttttccattgagctccttgatttgatcctttagctctttcacaatatgtgttagctcttgtatggctttgtcttgccatttagatctctccttgagttctaaccaatcatctgacgtatgagtgcttgccatgagttgtttggtcgagcatgagctttcatggcaagttggaggcttcttcgagttgttggtggaatcagttggtcgagcatgtgttgaacttacttcattagctttcataacctttgtgtcagaccccatcaagcccttgtaaacctttgagccaactgttgccttgtgtgagtctaatgacttctcagaactcaaagtttcactagggagatacccagctttaccactcttggtgaaaacagtttttgagttatttgcttctttaagttccactagaagttcatcaactagcagatccttttcctcaactaagaaggtctgtccttctattgtcggcttcttcatagcatcattgatgtcaaacttcattttaaaatcctttcccatattaagatcaatctttccttgcttaacatctatgattgctccagctgtagccaaaaagggccttcctaagatcaagggatcttttggttcttcatccatgttcaacactatgaagtctgtaggcacctccacatttccaatcttgataagcaaatcttctaataacccatgaggttgtctaaccgacccatcagccaaaatcaaggagatattgcaatatttatatttgttaaaacctaacctcttagctactgagagtggcattagacttactgatgttcctaggtcacaaaggcatttattgaatgtcaatgaacctagggagcatggtagagtgaatgaaccagggtctcctagcttctctggttcatctttctcatgtatgatggcactacactcatggctcataactgttgttttctgaacctcttgaattctctccatgatcaagtctttaaagaatttttcggaatccgggatacgcgtgagagcatcaacaagaggtatcctggcttcaacttgttttatgttctttgcaataatagctctgtacttattttctaactctttcttgtgtcggccaggaaatggaagtgggggcttgtaaggatgaggaatgaagactttttctgtgtttttgacaacaactggtttcagagcagttggtgatgttgctgggaatgtcggttgagtaaagtggtcgagtggcagctcgagtgactggtcgagtggctgctcgagtgactggtcgagtggctgctcga

SEQ ID NO: 21021 - DNA, 2369 bp, Arabidopsis thaliana
gtatgcagttaaagctcctatagtatgttggtgtaaaaggagagacaggagaatagagatgttcttcatcttcaactaggctaaggtgagggtggtatttgcggaacatggtatcattttcttttgttatgcttcttgacgcatgatatgtaggcttagatatgattgtataggataagattacatgatgatatgattttatgattgttgagtatgatgtttgataatgtgatgttatgtatgatattataagtatgtgtatgttaagtatgattatgagtatgtatgtatgatgaatgtaagattggggagaatcgagctatgggccgtggtctccctagtgatgtggacagtgatggaccgacgggttaacagctggtcaagaacggctgacgagcccggaatgggagtgtctgagccacgagggccagcctccacctatgaggttctagtcgtcacgaggatgactggacctaacgatgtgtatgtttatattaatatacataagatggttctcttgattatgttctttagaaaagaaagtatttttaagttgattgtttgtatctaaagttgtgtgttatgatgattgttgtataacttaagaaattgttctatgtttcgctcactgagtattctttactcaccccctttttctccttctttcccagatgaaaatgatgttgaatagctgctcaagtttgtctctcttcatggtgttctttgggatttgagtttacttttcaataaaacaaagacatggttttcctttaaatttcttcagttatttttacgagttttcaatgttgcttaagacaagtaacttttatgaatttaataaaaatacttcttgaataaggtgaatgtgaatgtgttaaggatagataatgagtatgaaataatgttttataggaaaagtggcacgccttctctgtagtttgggagaggagtgttacaattttggtatcagagcggaggttaaagtcaaaccggtgctgatccgggagactatgattgattatgttaagatgttttatggtagagtaaattttttaaaagtgatttcaaaatgggaatggattgttttttataaaaaaaaagaaaaagaaaaaaaaaaaaccagaagaagcaagacttgagcattacttatgttattaggaattattgtgattgttctgatattgatgtttgtttggtcaaaatggcacccttaaggaaaagaggacgtgttgcgaaccaaagggctaaccgtgttgatgatgcacccgctgacggggaagctcaaccactagtaggtgatattccagttggagattaggcagctatcaatgcatcactattaggacagattcaggggatcagaggaatgtttgaagagttaatgaaccgaattcctcaggcagcaccagcaccagcaccaacagctcaacaaccagaagaaaatgttctacctcagcaacaacagccaccacctccaccgccaccactaccagctcaaatggcaggacctgcgattattgagttatttgatatcagcaaggtttgggttcttgactattgagttatatttataagaaggtcaaccggtgtatgtatagtcctctagtgatgtttgggttctttgataacagcgacgtttgggtatgacaagtcagccaccacgttagactaactcagccgcaacatcgaattaatgcatgataagtcagccgttatattagaataactcagccatgacattatttgtgcgatgacaagtcagccaccacgttagaataactcagctaatcatcgaattaatctacgataactcagctataacacgaattgagcgatgataagtcagccattacatcgatttaacccataattaacagtgtgcattcaatatcatagattcatacaaacataattctaatcctaaagcgtcaatatttagtacaatcacatgctaaaaatcccaaaagacacgaacatatgttcgaaaaagccaatcacgtctctagaaaacgtgcaggcatcctttccggtgcttcatcgaagatctttgctgccaccctaacccgtcgaacctggatatttgcatcagtaatgccatcaaaacaaacaccaagcaataaatattcaagaatctttaacgcgtaaacgccgcagtcccctctgatatgattttgcgggacctttttcttgtccctccgccggaatgaaaattggtcgtattgcggggtacggacttcggaaggaaacagttcgttaatcatctgtggaatcatcctcgtgaacggcctacaaacttccagcatttttccatcgatatcgtctgtatgctctccgacgatgcaatcatagcaatcgatgtgagacctaag

SEQ ID NO: 21022 - DNA, 557 bp, Arabidopsis thaliana columbia
  unsure (1)..(557): unsure at all n locations
tnnnnnnnnnnnnnnnnnnnnnnnctaaagagcgggaaaacataccggaaacaaacgctgcgataccaataatcgccaggctgcgcaccgttgcacccatcataaatttcaggctgttgcccggatcgaacaacgaaaagaaaaacagcacgataaaataggcgcttgccagccagtgccacaccagcgcaaaggccgcgataaacaggctgaaaaaggccagcgaatgctccgcgaagttgagcaaatgctgggtaatctcttttttattacgaaagatcaggtacaacgcccagacggtcatgcacagcataatgatgacgttcgccagcgcacctatctgtacattcacctgattagagataatcggcacggccacaatcaggccataacctatcaaactgcttaaccagctcaggcgacgactccagtaacgggcgctctcgtcctgaatcgtgaacgggcgcagtccgccactgtttgggcaaaaaatcaggcgtagtacggctttgaaaaattcaatgagggcaaaggcgttgagaacaaactttgttgga

SEQ ID NO: 21023 - DNA, 491 bp, Arabidopsis thaliana columbia
  unsure (1)..(491): unsure at all n locations
tagtaacggccgcncagtgtgttcaggcgacgcgaatctacgagcagcttttgtcactttatcccacttctgtaagtttcccatgactttgcttccacgtattttaagagtttcctgatgtttttggttaattgtgagctcctttgtactctgtaggcgagattttggaagcaatatgtggaggcacagatggctgtaaacaatgatgatgctaccaaacagatatttagtcgttgtttgttgacctgccttcaagttcctctttggtaatgccatgttaccctttattagtcgttgataagagtcaatttaacatcttttcgtctcattgttgggtttcttgctcagctgcaatgcaagtcttgccatctccttggatataattctaacatcttattctctcaggcaatgttacattcggttcatcagaaaggtctacgacaagaagggagcagagggtcaagaggagacacaaaggcttttgagtttat

SEQ ID NO: 21024 - DNA, 487 bp, Arabidopsis thaliana columbia
cccatggtggtgaccggttcatgatggtgactgacatgacaagaaatggtaatggtgggatgtctttaacgttggggattcagaattccgatgctcgtggcgatgttcctatgtccggtgggatagataactacaagaataccatctcgggaaccgatctacagtacttaaactctcgcaaccaccagcacaagattggctcttcacaattgttgcatgattttgtagcttgaggagaatagaaaggtgtagaaatggattcttttgtgaaagtaaacccaaaaaacgaaattgtagattaatgagaaaacatgaggagacaatctgagattagacacgatctgtttcatatttaaacatgaggagacctaattatatggttagaggtacatgagatcaaatgttttgacattaaaattacacttaaaatgctaacaatcattcagaaaattcaaaaggatctacccgaagttatcttattgacagg

SEQ ID NO: 21025 - DNA, 511 bp, Arabidopsis thaliana columbia
cttttattgcctaaatttggattgtttctattcgtagcatcaatacttacctgctcactcccaaacccagaaataattccatcagagacacgcttattactcaaatcagagctataatctaacccagaagctgaaagattggccggattagaaacaagattcgaacttgggctactgggttcatgtgccattgtttggagcagggagagggatagggtttatgattactcacctggtcagtatcgtggtcgtcgtattcgaggaagaaacgaagaatcctattttgtagagagaagaagaaaggagaggcaaagcgagtcgttggaactgatacaacgacgacgtttcattgggagtatcaaaacctcaatttggattttctctgtagtctctttagaatttttctaaaagggagacacgtgagagatgggaagaggcacgtggtcgagcctcatgcaaaagaatggttgcgtttgtttccaaactgcgagagaatcgtgtgtgtaatgct

SEQ ID NO: 21026 - DNA, 1093 bp, Arabidopsis thaliana columbia
gtaatctgtgaaagggcaatctgatacgatgtcacatactccaagactagcctcgggactggcagccacaagaagcagccataaaagaacccctcatacaaggtatagaaacccgtagggggattgtcggctcgctcgtcagggctcggcacacgcaaggttactgcgccaagaccaaatcgggccctaagatccaagagggaccgctaggtgcacaatgttgagccagggggatctggcactatcacctttttattcttcttcctcttcttcttttcggccttctcaaaatctctctgctcattaagacgcatgatatcttctgtctcgttcgggctgaagtaaagaaagtcctcaatcttaaccgtcggcatgaagggctcgggcacatctcgccaattggatatcccggcttcgtcagccatcggggcaaaagacctccgaacaagaggcggctcgggatcatcggcaaatccaattctcgagcaatgtcggcattgttatcttcccgagccgtgaagggagtcgtctgctcgggggcatccgaagaagacacagaatcctcttcagaagacgtccaaactgctctctgtttgtagatcaggggaaggtcgtctaggtgatttgaatcgctagaatcgacaagagaagcgctcgggatcgacggagactgtttagaactcattctcggctcagggacgatcggcgagaagggaaacaaccagaaaacaagaatttctataccggaaaaatcaaaaataacaaaaagaacgacggagcttcgccagaaaataaaaaacgatagaaatatcaagatcagagagaaggaagcaaaccttgtttattttctttgaaaacttcaaatgaaatctcgaaggaatggctcgccatatataaagagtttttaaaggcgcgtcaggtccgcaacaaacatttaaaacgtgttcaagcgcgtgggctcggcagaaggaaaagattcacgtgatcctcgggaatgagctagaaacgtttccacttctcaagaatagtcggcgcgcgcgacagaagtttgagcgtccgggaagatgaagcgacagattagaagacgaccagt

SEQ ID NO: 21027 - DNA, 545 bp, Arabidopsis thaliana columbia
atagcattgcctgtgtcgtgtccattaacttcagtctcaaaccactcttcttcatcccatcttcttctgcagctctaaattcctccctttgaatgtcgtgaaccttgagatctgcctcgggtatagtctcgtttcttctgtaaggttgtgtccgtacacagtcccctccttcgttccaagccccaccttcgaaatgttgaggagaaaaactccttaaaaatgccagacccttgaaattctcgattatagcttttagagatattcttaaagccttcctgtatccataggtcaaaggcaattcagtcgtgtttggtaacgcacagtattggcacccagagatttgttggttttcatagaaaataaccggccgggaaaaccagtggccggatgatataccaggtagtcgagttggtcgagctgactcgtccacttcgtgtcatattcgtcgaggtataggctgaagaagttggacttcggatcaggtttagtagccttcactagaaatggtgacacatgacatgaagagtgaagtataggatgtgtag

SEQ ID NO: 21028 - DNA, 1323 bp, Arabidopsis thaliana
tccataggtgcttgcagaaacacaactcgtatccgcatttagtgccagtcgccattcgttcgcctgtcgcaattctgttttaacaaccaaccatgtgtaaaagcataccttggagttgccccagcaaaccaaatctctttatgtccactcatctcagcctttggtaagcgaatttgtgactaactctctcgagaactgtattgtttccggtagtagtcatatttccctttccataacgctgcatccggctctgtttccaagctgtgttgtccttggcatcgaagctcttcctcaatttggttcagtaagtctcgatgatggttccttctcctgtctctgttcatcacttcacaaagcttgctctctagcggaatctccatgtcaatgatacccctatctcctagcttctcatgaagacgtcccatcgaacaccatgagtcaaaccaaaaagatgtgctctcaccgttatgcacttccactctatgaaactccttagctagttgtcgatattttagcatgtttctccaaatccaagacccgcttgatgtattattctttaccgcccagaatgaacctccccggataaggtgtctattaacccagtctacccataaggaatctttcgcagacaggagtctccatataagcttgagcacacacactttgttcgcttcttcgagtgatcgcagccctagacctccttcacttttgggtgtacacacttctgaccatgcaacctttgcttttttcggattcaaagtaggtccagaccaaagaaaagctgaacacatcttatcgatttcctttatgcaagtttttggtagcctaaacgctgcaatccagaaatttgttaaactgaatatcacggaaccaattagctgaagccttcccgcaaaagagagagttctagctgtccatgattttatttgcgatcgaatcttctccaaaaggggcagataatccgaggaagtcatctgctttgtcattagaggtaatcctaaatatctcaccggaagtgtcccctgttcaaaaggaaactgggttagaatctcttctttagctctcatatgtaccccagccataaaaagtgtggacttttcaaggctgattttgagtcctgtgtgaaccgcaaaatcatcaaagacctctagtgctcctcctattaatttcttatttcatgcgacaaaaaccatcaagtcatcaacaaaacatagatgtgttaatttcatctgtttgcagttaggatgaaaatccattttttcgtcggctgcagcgttgtccaacttgcgagagagcacattcatgcagatgacaaaaagataa

SEQ ID NO: 21029 - DNA, 851 bp, Arabidopsis thaliana columbia
  unsure (1)..(851): unsure at all n locations
attttagggtcaaatgaactatgctccagtgactcgctaacaggggatgtggttttgacctttgattccagaaatgaagatgaatctagcttccttatctcagcctttctctcctcaccattattctcatctaatttggggaagcaaggatccaccctaaaattaaagttatcagttctctcagactcaatgacaatatgatctgttccatccactatctcagcctttgtcaaaccaggttcagtagcatccagagaatcctcatcgcccaaagcatttgacttgtgattctgcaacccttcaaatgcagtgcagatttgctctacagcttgtgcaaagtacttgacagttttaccttgacatcttgctaatagtttgctctttgcctcactagtgaaggcttggatatcaggtggcgcaacaaaagctctgcagtaaaggaagataactttgtcaatgatcagtttgtaaaagacaaaatcaactccaaagatattgtcagccaaaaagaaaaacacttggtaacatgttgaaacacctgataaccgaggtctactacttaattcctagcaacatgatatactgactaaagttcatatacctttctggatgagaaggtaccagaatcaaagaataaaagagaatagcttacatttcctctgttccaaagaactgaacaaagtacttctttgggtctggcgcacgatcccaatcttcaggccggctgatctgaaactcaaaaccaaattacttcacaagagagactaactanagagaattgtattagagagattcggaagctcattatttatcgagatgaataacatgtgtgtttcataattcaaccatgg

SEQ ID NO: 21030 - DNA, 1698 bp, Arabidopsis thaliana
taacactgatgaaaatcttatcgactctctttaagatcctgtctttatgatctgatgtttgtgtgacaagcttagattttcagaaaatttaacttaaactctataattcaaggctttaattattgatttggacatttttcttgactatatctttgactcagcagagaccttaacacactcatcttctgtaaccttgtcctatcaaacaaaaacaaatttaaattaatttagaggcaaaataaattaaacattagggctcttctgcattaagtgcagagccatgcttcaatgaacaactatataaatgttctgtcttttggtccacatgtcttgataattctgtttcagcttcttgataaaataacacagaaacttttttgtttatatatcaacttttttctcctctaccttaaaaaaaacagaaatctctggttaaatgtattaacacaactaaaagaaaagaagaagaaaacaaatccagaagaaagctcactcatacaaacaacacaccaattcaacctttgctttaccacaacaaagcccaacacaaacactttccacattaagaacattagcaagttctgctttccctccataaaccacaaaccacaagactgattataagctgaataatcccagaaaaaaaatacacatttgaaaaagaaaagaaaaagaaactcccctcagattttctctaaacctgtattcaccataccgaacttcggctatgttctttcttccttcggtgctaaaccatgtaatcaattatgtaggccggttctccgtcactaaaccgcttccgctgctgctacctccgccgttctggttttgttctcctactctggctgctaaggccataacttctggtgacatgtcccacgttccgcttttccttccccagcttgagcgtctcgggtgcatacttggcctatcactctgttcatcaactgttgccctaatgtctggagatagctcgcctaactcaccgtccttaacatgtaaccgctcattgttaccatgtttaccgtcaccatgatctgacattgctggacccatgtctgcccaaacagccttccttcccatttcaatctcatcattggctttacccatgtttggactcataaaaccacctgctacagatctaggaggtaatggaggttcacgctggaccatagctctaaagtcgttctttgaaggagggattgtggaaaaaaatgtttctttgaagttattaaccactcccttgttatgtgggttgcttcgccgatcatatctgtatcggaaattctcgtatgtagtctgcaagaacaaagataaatcaatggttacagagataccgtgattccttaagagagggtggggattggatggtcgcaacatacctggttcgtgctgatgagatataaatggaaaactgttaagccaccaacaaaccacattgatatgaatgtgtatattattagaacaatggaggcaggagttttaagcattgccttccaagtggttgtgtgctctgattccataatctttcttatatagacccagcagaaggcaaacacatatatacatagaagggtcgtggagaagacgaacatgaagaagaatcggtagtcctctgcaacaaccatcagaatatgagatgatatttaggaaactatggtttatgtggatagcgtaaagacgggatcagttggattt

SEQ ID NO: 21031 - DNA, 519 bp, Arabidopsis thaliana columbia
gctctgcacaaaacagtagagcaaatctcagaatcaagaaggaaccgataatggaatcttccagaactttgcattgtgttgtggctccgtaaaatgtcttcaaaaggtacttacgaagaacatcagcagcagaaatccgcctttttggatccgcagtcaacattctacgtaccaaatctttggcactgctggagattgacggccatggttggctctcaaagtcgatatggccttccaatatagcatcaaatattcctttctcagtctctgcatatccaatgttctgttttcagctttttattcacaacatataaatctcaaaagggaaaggaacaaagaagagagaatatcgcgttaccagcccaaaacgggggcacaccgctgagtagaatgtataagatgattccagcactccagatatcagcttctttcccatatctgcgacgtaagacttctggagcaacatagtatgcactcccaacaatatctctatatactttcctgcaaagacagaagaag

SEQ ID NO: 21032 - DNA, 583 bp, Arabidopsis thaliana columbia
cgaacatggcagcgagactcaagggataggaccactctgcaaccaaccccagctgcagcagttgatgttagatttctttgcttttctgggttttgcaataagattgaatggtttactgatctaacttttatatcaatgcttcagatgcttcccacagttgcctattcggataatccttcaacaagctttgctgcaaagtttgttcacgcatctctaaacaagaaccgttgttcaatcaaccgtgtattggtatatccctctaccagctgtgtgttttgtattattctctgtttgccatgtttatctattcaagaaagcaacatctttctttccttgttttaactctattatgccaacttaatgggatcattgctgattgggtttcttttatttagtggacaccttcaggaagacggcttatcacgggctcccaaagtggggagtttactctttggaatgggcaatctgttaattttgaaatgattcttcaggttcgtttctcagattgtaaaactaatctgttgaaacgctgttttgagtcttctatagttgctgctcctgggattgactgtttaaatttgtt

SEQ ID NO: 21033 - DNA, 1235 bp, Arabidopsis thaliana columbia
gatatctctagacttgagaaagcagctgcacttagtgatgataagggagagagagcatgggatggttactgcaactgagtatgtcttccgtagtgcctgttgctggcattttcaaaaggtaagttcttattaccttaactaatatagctactattattcaatatttttgatactgttttcttcgggcacagacaatttctgctctatgctaatattagatatttctttgaagattataaattgtacttgaactggaattgtgttagcaatcaatctcttctctaattcaattagaatggcatttgaataagcttaagaatagatcaattgaaacatcagcaagctagatagtgtctgtgaaaagtataaaaaagaagatgcatcagttgtttaagggggtcaagtattctgagtagagtatgggatgctccagagtccatctgtaggtttcatgtttccttctatcagaaattcagaatatcatggtacttgtgcaaaatcaccatgaatcttgacgacagttatgacatttgaatatatgctttcattctctgactaggtttttctatggcagtggtgagaaagcagaaacgagcgagtggccggcgatggtggaagttaagcgtagagttaggctgagtgggtttgggaaatttattcaagagcttcccaagtctcgaacccgtgccctaatggtatacaaagctttcttttgttatcattgtactagcattacattgaataatctattgcttcatacaacactagaagtaacccttttacttctcttatatatcatctttaatcatctcactttgtctcatctcaaaactcttctgtcttctcttcatggaaaccagaaagcaaagagattacaattaaacacttcacatgtatgcgtcacaggaatggggacacgttttatgtatgcagaacatcaactatatagatttgggtcaaattttgtattaaatccatccaaagaaaagggatgccaattcagttttattatgtctctgtatatgagtttctgtgtctgtgggggacatatagaataatcaggaaatctcaaacaattgatcgaccacacacgcaaaaatagttaattaaattctcttttcttaaaaggactttttttggggaaattattgggtaaattcaaagagaatctttcaacaacacatacatgaaacaagaaagaaacctatagttatagtaatttacacaaaaaaata

SEQ ID NO: 21034 - DNA, 473 bp, Arabidopsis thaliana columbia
atctgctgtggagtgggaaagagcagaactgatatgtgacctttatgaaaccatgttgctcgagattacaaagctgatttcgggttcgtcttatccgacagcaaacgtgtattttatgcaagtatgggcgattaaatgttggctgggagatcatgatgattctcatgatagggctattcgtgaaatggtggaagatatgacggagaaatatgataaatattgggaagatttcagcgacattcttgcgatggctgcagttcttgatccaagattgaaattctcagctttagaatattgttataatattctgaatccattgaccagtaaggaaaacttgactcatgtgcgtgataagatggttcaactatttggagcttataaaagaaccacatgcaacgttgcagcaagcacttctcaatcttcacgaaaggatatcccatttggatatgatgtaagttgctaattttgtgtgt

SEQ ID NO: 21035 - DNA, 2223 bp, Arabidopsis thaliana
tgaaggccagttcagagctgttctgcaaggaaatgagaagaatgagattgagatttgttttgagagtggtaggggaatttgttgtacagattatccatagaaatgagctcacaacttccagaccagaattgaaatttcgtttttggttgattttgtgtttgcaggagataaagccggtggaaactagccagggaactcaccttgtttatgttcatgctggaaccaatccctttgaagttatcagacaatccgtaaagtatgtttgcaaaatagccaaaatattatgttatgtctctgtttcattgatgtgaaggttatatatgttttcttatgcggcaatccttgtattttacagggctgtggagagacacatgcagacatttcatcatcgtgagaagaagaaggtgattgaacatttcatggctttggtcacaacaagagttcaatctgattttatatgatctcatcattgtctttgactttgtttgtttagcttccttctttcctagactggtttggctggtgcacatgggacgctttctacacagatgtgactgccgagggtgttgatgaaggccttaaaaggtaccttcatatggaagtagagtggcatattgttaatatacttgtaattgcttaccgcagtataagtttattgagtctctgatgtgtttggtttattgcagtctttctgaaggaggtacccctccgaagtttctgatcatagacgatggttggcaacaaatagaaaacaaagagaaagatgaaaactgcgttgttcaggaaggagcacagtaagatctctcggtcttttatttttgtagtcacatagatgggcatcttaaatatgtcctcagttcaccaaataatagtccagcaaaactagatcgaggcttgagtactttaaactaaagttcatgtggttgaaagaaaataagattcatctatttcaatctatgcattggaattgtcgaatccttagttcataagccgagtgtgagtgtgctcactagacagctcgagcttgaggatattctacagttgttaccataatattttgttggtaattgctaactttttctgcattcttatgtatgcaggtttgctactaggcttgttggtatcaaggagaatgcaaaatttcagaagagtgatcagaaggatacgcaagtgtcaggactaaagagtgtagttgacaatgcgaagcagcgccataatgtgaagtatgtcctttcttcttaatttacaacactctggtcttcaagctgattgtttaatcacaacatcaagcatttgacaaaaaacattgcatacttatggcttgacttctttatccacaggcaagtttatgcatggcatgctttagctggatactggggtggagtaaaacccgctgcttctggaatggaacactatgatagtgcattagcatacccagttcagtctccaggtgtcttagggaaccaaccagatatagtaatggacagccttgctgttcatggtctcggacttgtcaatccgaagaaagttttcaacttctacaacgaactgcattcatacttggcttcatgtggtatagatggagtcaaagttgacgtccagaacatcattgaaaccctaggtgctggtcttggcgggagagtctctctcactcgtagctaccagcaagctttagaagcttcaattgcccggaacttcacagataatggttgcatatcttgcatgtgtcacaacacagacggactttacagcgcaaaacaaaccgctattgttagagcttccgatgatttctacccaagagatcctgcttctcacaccatccacattgcatcggttgcatacaacagccttttccttaggagagttcatgcaacctgactgggatatgttccatgtaagtaaagagacattttattttttttacaagtctaagaagtatgagttcacttgtaactgaagctttgatgtcttcagagtctacacccaactgcagagtaccatgctgcagcgcgtgcagtgggtggatgcgcaatctatgtcaggtaaagctctcctctcatccttaacttgattcttgttctgactaggtaatgttttaatctgagggtttaaatggagatatgtttctttctttcaaattatatgagcagtgataagccaggcaaccacaactttgatctattgaggaagctggttcttcctgatggttcagttcttcgggct

SEQ ID NO: 21036 - DNA, 455 bp, Arabidopsis thaliana
atacggaggtaaaagatggcttaagaggtggtgtttgatggctgtctgctagtaggagtcgtaacccctccattcttcttttaaagccctgcttaccggttgtggggagtatggctgagtgtactaaagatgatgtttatctgtgaaaagtcgatgctcatgctccttcaaactcgttctctgcttcaaagacttggatggctcttcaccctccgggtgtccaggttaattggcatagatcaatttggttcaaggatcgggtccccaagcatgctttcatctcttgggttgtggcttggaaccgtttgcatacaagggataggctgaaaagttggggtttctctattcctgcagtgtgtgtgctctgtaactcaggggatgagtctagagaacacctcttcttcaactacccgtatagcagcgctgtctggacttatttcactaggtgtgttgga

SEQ ID NO: 21037 - DNA, 741 bp, Arabidopsis thaliana
gttggatacccacgggtagtctcgtaacaatcaggttttttggagctttacccactatatcaaaaacccatctgggttttctaaagttgggtttttggtggacgggtttattttggattcaggtcgggctgagcttttttacccaccacaacatctctaccaaaatgtcaattctagttctagaaaacaagagatgaaaaggcaacggtcaccaacatggtagagtgtgtattctatagtaatcaaaaccgaacagaaccaaaattaatcttaaacattaaggaaaaaaataaacattttcaagttcagaggcattaccataaaagatgcaacaagatgagaaaaacaagaaagaggaaacaaattttcttacacgatgaaaaggaaaatttgaagcttccaatatgacacaatgaacccttacacttccttgttggagcaattgaatgatttgattgatgcctttgcttaaacgatatctcagttctctccaaaaagttatacaatctctttaagccaataagcctctggtctgattccttagtcaagtttcaccgaagaaaacaagtagtgtacgaaccagaaggaagagaggaaaccaacggtacctgttgcgagcatgatagccaggaccataaagagagagtagctgagataaagagtcgctgaaacgggtccactcaagcttttgaggtcgaagacgagatagtttatggagtatatgaagatgtagattgcaac

SEQ ID NO: 21038 - DNA, 719 bp, Arabidopsis thaliana
tccttgaggtcttcttctagattacttaatgccaagaaaataatatctattactcatctctcaacaactaatagcgcaaagcaaaggagaagactaagcaaaggagtgaccaactgtcatctgatttaaacgtaaatcaccaaaaaatccaccatacaaacattacaaaaagcactactcagctattttttgatgggttttgaaatccaacaacataagaaaagaaatagactcacaaactgagacaagcagcgagtctgtaaaagaaacgggtcttgatgattcaaagcagttggactttcaagcagcttgctgggaagcaagtctcttcctggcttcctcaatgatggtcagcttaatacctttgccctttggaagagacacccatggctttgttcctttgccgattgtgtacacattccccaaccttgtggcaaactcatgccctgttgagtcttgaatgtggattgtctcaaagcttcccttatgcttttcacggttcttaatcacacccacacgccctctgtttctgcctccagtcaccatcacaacgttacccacgtcaaacttgatgaactcaacaatcttgttctcctcaaggtccagcttgatggtgtcatttggcttgatgagcgggtcagggtaacggatggtgcgaccatcataagtgttcaggtatggaattcccttctgaccaaactggatagatctaaccttgc

SEQ ID NO: 21039 - DNA, 500 bp, Arabidopsis thaliana columbia
cacattttcccgctaaaaacgcaatttaacatttttccgccaaaaccgacattcaacattttcccgccaaaaaggatttcacattttccgatcaaaaacacaattttaacatttttccgccaaaaatgatattcaacatttttccgccaaaaacacaattcaacctttttctcatcaaatatatatgtaatacagaaaataaatacaatttaaaatatatttataagcaaattatagatacaacatacatataatagtatattagcagttaaaataaactctaagaaaatgacaaacaccaagttgggtacccacgggtagtctcgaaacaatcaagttttttcgggctttacccactaaattaaaaacccatctgggttttctaaagttgggtttttggtgggcgggtttattttgggttcaggtcgggttgggcttttttaccaccacagcatctcagaatatggtgaactttgttgagaggtcgagcatcttagatt

SEQ ID NO: 21040 - DNA, 576 bp, Arabidopsis thaliana
agctcgaattcggcaccataatcaatgtaagactttctagagcaaacccataaaccttgttttgtctcccacaccgaaatatgacatcgagatcggaaatttgaaacatcaatcagaatgttaccacatgtttaagtgatacatttatcttactgttgtttagcagaagttgtgatctccctaagaccctaacattaacaaaatggcccctaaatactacgaagcaattcaataactatctgaagaaacaaggttgagttcaaacttaatattaatagcgcaaaaggtccaaaatatagctcataacaatccgaaaagataagttttaaaacaaaagtgactcattgaaaagctgcaaactaaagcatggtttgttctgaaactggaaaacagagcatagtattaactatcaagcttgttgagcagaaagtctcttcctggcttcctcaatgatggtcaacttaatacctttacccttttggaaggggacacccatggctttgttcccttaccgattgtgtacacatttccaacctttgttgcaactcatgtcctgttgagtctgaatgtggatgg

SEQ ID NO: 21041 - DNA, 496 bp, Arabidopsis thaliana
tccgtaaaattctcataaaaaaactggtaatgcgcgggagatttgaccacgaagaaagtacactaacaactctttagaaaatttctaaccaaccccaacaccaaattacaataaacaagataaagtctccatacatgactctttgaatttttcttcattactaaagattcataggctggtttatatattttcaataggttaaattaatttcatattgttagtgtatgcttttggtattccggtgttaattaatttaatcatttacataagttcgtctctcaggattgcaacagaccacttcttcttcatcgacttctgcaaagatgcataaatatatctcttaaaccagaggttgatgatgaatcgaagtgaaatgcaaaagttaggtttcgaacacgtgagatactacacagagtcgccgtacaacagaggagagtcgtcggcgaacgtggcgacgacaagcaactattacggtgaagatgaaccatacgtggag

SEQ ID NO: 21042 - DNA, 460 bp, Arabidopsis thaliana
  unsure (1)..(460): unsure at all n locations
agttagtacctgagaagacaagtcggcggcaatgtaaataagagaggaagtgacacttttggtcacaactgggtgtgatttaaccataccaagataccatccaacgaacccaatcctcgacggagatgaagaagaagagaaacccaaagaaggagaaggtgagactcctgtttcttttgctctttcgagaagctgacgtgaccggaaataaggtctcgattgagcaactccggtcttaccatattggtctgttgacgccgccgcgttccgccgtatgagccgagcggtgtcgacggctacgttcctgaacaatgctctgctcattatggcttccgagattttaggggttgttgttgttgttcaggtatcagaaagctttgatgatgactgcaaaaaattgatagatttttccaatttaagtagtntcagtcggtttagctagaccgtacatataccgagt

SEQ ID NO: 21043 - DNA, 1005 bp, Arabidopsis thaliana
gaactatgtaattgccctgtggatgttatagagaacagtgtataagcttgcttacctctgagggagggtcgaactcaccgacctcttgttccttcacaccctcaagagactcaccagagaagttctcaagaatgtaacgatgagagccaactaagcattgagaaaagcattagtaaagcaaacttacagcatgttgctgaggccaatagcatggaaaggagaataactcaagcaaataccgggaagtgggggcagaatttcattttcagtgtagtagaagccgagtttcccatctaatggatccagtagtgtatttagaaaacaaagaatctgaatatattatagatggacacctgaaggataatgaaatagcaacttactgtttagtggctgtgtttgctgcaaatacttattaaaaacatcccaagatccctcagcacaacggtcacgaatttctgaaatggaaattcacattcttgattgtctctgaggatcaaacaaagcacataagaacagataagagtgggagtttgcagtcatgagtaccttcccgggtgagagaagcattcttgtaaaccaacatcaccatataactctcagggtccacaggattaggtaacacatgaccctcaagactgggttgaagttctttggtaatcccaaatacctgtaagagtttataatgttcgacatgtgaaatggtaagaacactagtctatatctggattaactaactagcaagctcgacaagaatcaagagccttgccgtgtcactggttccaagactgatcgccagatctccaggagtactaagagttagacctgcatgacatggtatagcctcattggtaccttgtaattcatatacaaacacagacagaatccagtcgcaagatacactctccatttcatcataaatgtcgcagttgctactcaaaagcccaagtcaataacaatttgaaaatgcataggaacttctccccaagcttatgttgttgaatatgt

SEQ ID NO: 21044 - DNA, 531 bp, Arabidopsis thaliana
ctaaagcccacaaaacaaagtcgttcttaaatcaaaaagtagaaattaaggagcactataaactccaaaaaatgatgacaagaacatatatgtacgtcaatgttgatggcaaatgcctccagagaatagctatcaatctaaaccaacatggttctcatcatatcttctgtaccggagtagaccggctctttgagcttgcgatggggagaaggggcggagactttccgggagtttgtgacgtcagctcttcagctctctcggcttggactttccaatctgttctcaaaagtgcacacaacatgagagaagcacaagttgcttgagctgcaagcaacccgaaccagagacctggaaacccttgtttgaaaacaaacccaaacagaatagcgactggcatgcccacaaagtaaaatgaacccaagtttatgttggcaccaagtgtaggtcttgcacagcctcttaaaacccacaaccggttgtttgaggacagtttccgagctcacataaccccacaatgggtaatgcgatgga

SEQ ID NO: 21045 - DNA, 577 bp, Arabidopsis thaliana
ctgacttcagactctgaagctttgattccaaagacctacagacagaatatcatagcacagaattgaacattcaaaatctggttttgcctttgattccaagacataaaaacgtttaagccaataaaaagaaatataagaaacaaatcctaacccaatagagtcttcggatttaagtaaagctgctttaagctcagctactcgtttcttctaaagctcttcaaaccaagctctaccagaacattatcatataagtaaagtttaggtcacaaaagtccacaagaaaaagtgttgaagaaccaggaaaaaagaatctttacttgcatcccacataacgttttcgcaagtctttgtacttggccttgcatatctgcaaacaagagtagaatttagcagattcagaaagagagacaatgtctgcattgaccctgatatatcgccaaccacactgacattttctaatttcttgcataactaaaacctatttaggaaacttcgaattcaatgtggttatcttcacagttcaagcagaagcataagagttatttcaattgtctacaagagtattttttttttgcat

SEQ ID NO: 21046 - DNA, 558 bp, Arabidopsis thaliana
ggatcattgtctctgtttcttaaggttagggtctttgtgtctctgtttctcaagcttaggatctttgtctctgtttctgtttcagggaagatgactcgaagctggtcgatggaattactgagaagatatcaacaaagttgttctcggaaaaaccaaggaatgataatatcctaattggtatcgaccaacacatgggggaattgtatccactatttaacctgaattcgaatgaagatgttcaagtcattgggatttggggaagaggaagtaatggtagatcagcactagcaagccacgtttaccaaaacatcaaacatcactttgaagctcattgttttctcgaagacgtgagacggatttcgctacatttccgtgactctcatttacaagatgagcttctttcaaatatgcaaggagaaggtttgacaacaaagaactgtcataggtgtcttaagactatcaaagcaaggctaaggaacaagaaggttcttcttgtggcgaacgatgtagacaaacttgaacaatttgatgcacttgctgaagaatttagctggtttg

SEQ ID NO: 21047 - DNA, 1542 bp, Arabidopsis thaliana
acacagctgagactatatagaagagagagaaagaaatttatcgaagcatatatcttgttcggcctgaacaaataaaccgcctgaagctgtgctctccgttgtgttgttggaacacagctgagacgactcctcttgaatcctagatgacacttcattgtagatctcctctgattttccatcaatgaaactaccatcaggttttctatgtgtcttatctaagagcacaagaaaatttggagtagtttctccggtgagctcacactacaacagaaacaaatcttggttagttctttgagtaagtaacaaaattgactaagtaagagagtaaaataacttacacgttttctggcatgggctttgtaagaggtctggccagacctgtgtttatgaatcccgaggccatccggatcatgtaatcttgcattcctactattgatactctttagttctgacttaggatctcgccaaaaactaataagaccggcccacactgcaggatcaaaccagcgaggcattgctgcatctcccttctctctccactttcccttccaccgacaaacttgatcagtcatcctctccttcagctttgcttcaaactcagtcttaactctcttgtttattgctttatcccaattatacatatgctacaaaacagacacaagtgacagcaaaaattagacttaatattacagcaactaaaaagctttacacaacaaaacataatttagtggacttacagcaaaggtttcaaaccagcgatcaaccacatgttggggtgtcattgactagttagcatgaggctccttgaaatctctttcaaagatgctccagacagtagctgcaactgaagggtcatcctcaaacctacaaacacaaggttccattaggcaataaactgataactgagactagcactatgaacgcttaaggaatatgtttacaaaagtggcttaccagaaagttccgggaggacggttagggtctaatctcggtaacccagcacgaccatgactatcaagcaactcatccagagtcatgtcgttgagccgagaagctagaggattagcatgattgacagaaccgttgggtgactgatttccctgctgaggagaggcaccgcttgcttggttgataggcgtctgaggtctggagttttggccagttccatgaaccgcagaagtgttcccttcactgctatgagggtttccacgctgctgttaaacctcgagtagtcatttcaagtgaacgacatcttgcaatgaagaaatcattgtgttagtcaaatggataagcaaacccgaaaccctaaatagatctagaaggaaaaataaatcgaaaccctaaatagatctatgaatgaaaccctaattaccacaaaagaaaccgaatgaagatctgagaggtaagagacattaccttgtttggttagaaaccgacggtgggaagaagacacggcggagatcggcaactcgccggagaagagaaaagactcgattagggtttactagaacaagacggcaaagaaggggatcctctagagtc

SEQ ID NO: 21048 - DNA, 2194 bp, Arabidopsis thaliana
tgacatcgccctctttcctctggcgatttcagctcttctctgattatgtcgggctgcagacgttcgagttcatccctgaagctctggtatacatgttgctctctcggtctagcggaccaggactcagcttcatccacattgtaatcagggtccatagaggattctccgctgtagttactcattacgaaacctgaaaacaaatgtaactaaaaaataaacgttaatacgttagttccaacaagaccagacacacaaaccacacaaaccaaaaacaggtagagtaaaccggtcgagtgtaccaaaatagtttttttttttttttttttttttttttttttcggttcggtcgagtgaattctgtggcggtcgagtgatttttgatcgagtattgttgaaggcgaattgatggcagaggtcgagtgtttgatgagcttgagaggcggaggtgttcttgcggcgaagtcgagtgaaacgactacaaatgaagaggtgagggacgattcttcgagtgagtggatggtgagaagcggcgtggtaagaggcggattgtaggaggtcgagtgaatggagcaaacggtggagttgatgatgagagatgtgaagtgaatcgagtgaagctataatggaggagaatcaatttgattggtttggagaggtcgagtgattgaaacggagagctcgagttgcttccttggagagtgtgagcaggcggtgattgtggaatgacggtgagaagcggcgatcgagtgaagcttgtgagaagagaaacggctgtttggtcaattggtgaagaggtcgagtggtgctttggacaaaagatgatggcgctaaagtcgagtgattgagggatggtcgaatggacacggagtgtgagcgagaagtgtttggtcgagtgtttgagagatggtggagtgtttgaggaagagaagtggcgaggtcgagtatttgtggagagaggggcgatgggatcgagtgaattgataagatgaggtcgagtggtggggataaggtgcgttgaggtcgagtggggaagagacgaagaagatagattcttgtcttctggtcagttgcatggaggacatgggcgtcagcggcgggtcccacaatgtcttcttgtctcttctctgtattctctgttcactaggaaagctccagaaaatcccgcaatcttctctaaacttgatgaactctctgtaagactctgtagctcctgttggtcgaataaaatgatgatttaaattttttaggtttttaaacatcactcatactcgaccattatactcgatctctaggccatcagtagagtaaaagttttgaatttttactctaccttcacgttactcctttcttcctgagaaccacaaacacaaccaaaacaaataaaaaataacaataaagtaaaaattatttacaaggatagtcatgggacttcctcccaagtgagcttgtttaagtctctagcttgattcctcacactcatcgagaagaaaatgaatgatagagagggtctacatagtcctctctagtatcatcatcatacccagcgtcctccctggagaggtctgcagcagaatactcaattcccctttcttcaaaataggtttccttctcttctggagggtaatctgtctcttgagaccattttgaagtgaattcttttctcgcgatagtgttaatcccgcctttaggttgagcttccttctgcatctgattcagcttactcctaagttcctcaatggtgttggctagcttctctatagtttcattctgcttatcagacctctttctaagctctttcactctttcagtctcatatccttctcttgagatcgctctatcatttccagaggttcttccatcttcggttgacccttgtggagttttgttgatgccaaactgcaacttgatatgctttccaaggttgagactaattttcccttccctgacatctatcactgctcccactgacgctaaaaagggtcttcccagtattaagggatccttatgctctacttccatatccagcaccacaaagtctgtaggcacttctacgccattaatcatgactggtaagtctttcagcatgccgaacggttttctagaagacctatccgcaagatcaaagtcaggtcacaaggtttatattgaatgaactctaaccttcttgctacagagagtggcataagctaacaga

SEQ ID NO: 21049 - DNA, 2644 bp, Arabidopsis thaliana
cattgatgctcaagaagtgttgatcttgtctatttacgaagttatggagccaagataagcattatcgtgtaagtaatgaagttttaaagattttttttgttataacacgctatgatcttcattttattcgaaatcgactttgtttttttatagaaaaacccagaatttttttatttccaattttgttggttgaaaatgctaaatgtgtaaatatttatgtttctaagtgtgtacatcgaaattctatttatttttgtagatataatcatgttttcagttgcatttaatgggtttctcctgaatttatgatgcagttgggtaatggatattcccgtatttactatggtcggtgagtggagatgcaaataagataaatggaaatttgaaccaaaggaaaacatgtttggtcgttgtgtacgtgttaaggaaaacaggacgtacacggaatttgtacgtacactaagcgaggctttcagtttgaaatccatagagatcaatcccataattagttactggatgccgggagagatgttagtgatgatagatactaaacgccctcctgtctacattgacagtcaagtggggttggatacgttctttttaattcgtggtcggtatccttctctcaacttgtttgtctctttcattacaaccgtcaagacactcgagaataatgtctctaggactcatggtgatgatgctgaaagttaccgtgtatgtgatagtgtttcaaatgttgatgaaaataatgaggccgtagatgagcaagacgacgatgaagacgataaaacaaatgaggatgaagaggagggggacaacgaatatcgtggtgggtatgatgattatcagggtgacgatggatctatagggggaagtaccctcgatcctactattgatggtagtgaaagtagtggcgaagattatgattacaacaagtggaacgatgtaattgtagaagaatatggaatagggaatgttgaggagaacgtcattctcacaccaggggaattcagtcgtctgttggcagagtgtacgtacacaagtcagcgtgtacctggcggagataacatttctcactcgggagaccgcacaccagctgtgactccaagaagtatgtgtcaacatggtttgtaccaatgtacctacactatacattgagaagtgtttttaagaacagaaaatcatacaacaaacaatgtcttatctcaaccactgccaatattggtttaatattgtatcaataaatttttcttaataatttaattcacaaacaaaaatgtacgtatattatttcacatgtacacatgtacacatgtacatacattaatttaccaacaaaaatgtacgtacattatttcaccatctatttttatttaattattatgtatgtattgagattattgagatataagaatacgtaataaaatagttttagttattagaattcgtcccatatacgttccaataaataattttgtgtacgtacactgtaaattgaatatacgtacacagaaaaaattcgatgaagggtataattataattttccagtcatcttcaacctgtgtatccttttctgcaaacctaattttgcggccgtctttatcagttttctcaaaatctcattttttttacgttttgattactatttataaataaatcttgtaaacctatactatctttagtttaaaaagctaaagtgtttgaatctatgagtttttttttttgcattttgttcatctctgaaaacaagaaatttgttcctcaattttggagttcaatggagagatgtcgaaatatgaaggagtggataatgaattttgaacttctttctacttctctctcgaatttctccgtctctttctctttttcttcttcttcgatttctttgtttcagttttttttttttttttcaaaattgaactacagaaactaaaccgaaatcaagtgctgtgtggtttggttgctcccattaagagtattttggtctgaaaacaactgaaaagacaaacggtgaaaaccatatctcactttgacaaaccatgagaacaattttttttcatccacttatgtgaaaatttcttttgtcttacatataaaacctagaaagtgaaattctaggttctatgaaatctaagatcataccgaaaaaaatatatatgatatataaatttatcaaaagaaaaagaaagaattcatttgtttattaatccgcagttgaaccagatcaaccagctaacccgataacccgaaagttacttaggttcacaatttgggtcgggttgatctatatacatagcaacatgatggaagactcgtgaccgtcatcactcttcaaaccctaatttgctacttctctgctcttgtccgtgtgagtctaggccgactaactctgtcttgtctcaacatctgaaacaaggatataaagtttgtgggtgcttccaaagtggagattgttgttgtgccacataatgggattttcctttctccttgccacggtacaaaaggagagaatgaagaggaggtcgagaacaagaagtagaagtagacgaagagcgacgaagatccgaaaacttgggtcgcaagatatatcgctcaggatctactgatcgagattctgacgagattacttccgaagtaagtgat

SEQ ID NO: 21050 - DNA, 1869 bp, Arabidopsis thaliana
ctatgcctcatcgtcgaagtattaaactcatcgatcaatatcttgttctgcgaccccatcatgtgttatagattcaaagttgaggtacgaacataaccaatcttgacaaagaagatttcaccaaagctcctatgaacgatctccaactgcttccacctgctctctttagctggtccttcccctgccaccgtgtttcttgatgatgaagaccactgtgagatgaacaactatgatatcttacaacactcaaagactccgttctgcagttttaaacaaattccagcctctaaccaagacttccctccattcgtcattaaccataagtttaggtgaccacctttctctcctttgtgtttttgaaaaagacttccctcttgtcccaacactttaccacaaaacaattctggtggccgtggcgattgacccgctttcccgataaatataagcctcaatggaaactcctcttgcttctctccaacacccttgtaacccatgggcatcactcctagactaccctgttgcgcctctaatccgccatagtttccaatggtttgagcactcttgagccttgacactttcaacataatctctgaaaaattctttcgactttcaccgcttattttctgtttccatagtatttccttagcaagactttcaccactcattttctgtgtccatggtatatccttagcaattcctccccacatagccttactccccccatttcaaaactaccttgtcttcaaggtaatgatcaatccgctcttgctcattttcactcttcatctttacttttgtagtaacttgctcaagttcttcgtgctcagcacaaagagtgatccattgttggttgtggctgaaagagaaatcttgattctgccaattaaccattgtctctcccagttttgagagccactcataaccaagaatcacatccacatcagtcttggccaagtctagcagaaggaaattctcagtgatttcaacttcttgaacccataatctaattccgagacaagttcctacgctttgtatgcactgcctttgtcccaataaaactgaagcttggtttgtaatactcgtgggtagtttgagactgaaggctaactcaactaagataaaattgtcggttgctccagaatctatagctacaacgaccttatgatctaatatgaagccatagaatctcatacctttgttcctggttaaatctatcactagttgctccattccctgtctcaaggtataactatcctgctctaattcttccagctcatttataactccttttttcttctttaccacatccagcttagcttgtaccagggtaaggctcatcagctccgcctgtcttgattggtagctgttctcaatgacgacacaattccagaatttatgagattattactttcttctaaccattgtgttgtatccatcatttgtacaatcccattcggtttcaattctcgaactgcagtttgcaaactaggttgcaacccttgtaagaacatctcctcgaagccttgtcctggtaaggtaactgagcgaagacaaagagcttcaaacctttctctgtaatcacgcactgatccttcttgttgtattcccgaataatgaggttgatgatttaacttcattgtcgtctatgtctctcggcccatcatacacttaaattccttccagcttgtaggtgaattctttttccagagatgctttatccattgcctagtctctccttccaagttagcataaacaatttgtaacctctcatgctccgaaattttattctcaccaaaataattctcaaagttatttagacagcttcttaggttttttccgtgaaaagcaacgaggctctgtactagctga

SEQ ID NO: 21051 - DNA, 1615 bp, Arabidopsis thaliana
cgaacttgagtactacgtcgccggacgacgagacgtccgggacggggtcttacaaatggttcattccctctagctaaaaaaccaccatcgagatatccgcaacttctggtctgtccggattggcaaccacctttgaaatagcaccatggctctcaagcttcgggttagacagttcggttagacgccaaaagctgagtgcgacaataaaatttcccttacccaaactctgaaagtaaccatccaagtactccgcctgttgattgcgggcttcgcactccaagacttcattgctacgttagaaatatggacagttagcgtttagagtgacattgtaaataaaacaaatgaaaagaacacttactatctatcttttatcttgaaactcagtttgagaccgtaatagtctgtagtcaatgcgccaacatcaaccaacgctccaacgacatctagatgatggagaaacaaagataataaacaaaaattttcaaaaatgtaataaatgaagcatcggagttattcttcctcaccgactaaaacgttcttgtaagcagatttctccaaaatgtagtcgaagggagtgaaatcgaaatctggaactggtggtgatctcggtggggcctgaacgacgacggtccgatccataaacagtatgtcgtattcatgctttgttgctctgactgagtcagttgacttacggaccaagaaagaggtgatcgtcttccactcattttcaacgaatcggtcttcgtaaaacggagcaaggcgacgatcaacggtggcctcaatacggttattctttacatacagaacatgatagtagacagtttaatatacaagttaagcgaatgaacgagaaaaacacataatgatttgacggaaattaccgcgtaatctgccaggataaggccgagttcgaagacgttgggcgatataaccttcttgaagactctcaagtcaaagacataaattcgccacccagtgatcagaggacacaattctgagaccatatgaaacccctccatctcacggatagcaagaacaagcgaatcgaaagactaaatttttatttgtgaatgatataactgccggcacaagaaatgggtttaaaatgaggattgtggataaaattaaggaagggaggagacttaaatagaggaaatctggaacggctacagttattaatgcggttccaactacacttgattcaaatttttggtaatagcttggtaaccgtcatatagggtaattattacgttgatttgacaataaacatcaacagttacgtcctttccattaaataccaacacaaccacagtatacccaaccatgtctccaactccgttcatttaagagggggaataagttagattttcaaaaaacttatttgaaattactcaaaatattgagcaaccacctctatgtacccttattacatgaactttaacacgtacacagacaaaaacgtacatagttatacaaacgtagagtttaaacgtacgtacacaacgtacatagttacaggtggattatatataaacttacgtacaccgagaaaacacagaagcgtacactatattggcaggctcagaaacttgtcaccagaactagattggat

SEQ ID NO: 21052 - DNA, 1779 bp, Arabidopsis thaliana
caaaattatcgtcaggctgtcgagccaatgatggtgtcgtggtgccgagccggagattattatgctgtagtaggagttggatttgttgcatgctttcgtgccgcgagtttgagaaggactttccatgctggagacgtcgaatttgttcgacggcgagagccttgttaatttgtgataacatcaatgtgtcacaaccgtggcgaggtggattctccgattcgaggcggcatattcatagattcatcaatttggtgtcatgacgaattagagttgttgcagggccggttttgttaccgtgccatgcgtatgtcaccatccaatgccatgtgtgtgccgttgtattgaacggtgcatgcgaaagagagtttcaaggtcacacggcaaaaaagtttgggaaaggccgacgcgacgatagagtctcagtgcggcatggcgaaagagagactcggctctacccgatgaagaagtatgggcgtttcacgttgaagacgtcaaaatgtcgtgtggtaagttggattgtgttagtttctagttggtctaggtttgacgaggtttgctcttacgtcgcttactgattaatattatttgtttttatgtgcgaggcgtggcttggttgtgtttatcataaaacatgtgtgatacgcaactcggcttcgatacatattttgcggggcaagacgtctcttggcttatcctatatgtttgtttcgaaacgccaagcttagggatatctagtcgaggcggactcgctatactttttaggtgtggctctggtctccggcttaccctatgggtgcattgcggtcaacaagaatatgctagttagagctcggcttattttttctgccgccttctagctattgtgagagattggactcggcttttaatctttacaaaagtaaagttataggtgtagtcgagacagactcgacgtactttttaggtgcggctctcgtgtccggcttaccctgtgggtgcttcgagatcgacaagaatatgcaagccagacctcggcttatttgttctgttgcctgcgagctggtgtgcgagattgggctcggcttgtaacctttacaaaagtaaagttgtggattatttcaccactgcatccgtgcgaaacgcgtttaaaatcgtcacctggccatggcgacgatgcgggagctaggcgatcggcgaggcggactcggccgaaagagttcatcaacgatagtgtgctctagcgagtgctcacttgtgtttcttgaaatttttttttttgtttgagacggttgtgtcttgtgaaggactgctcacgtacctttagaaaataatcaagtcatccataatttattttacaaaggcaaagctaggtagacctagcgtgtttttttttttttttttttttttttttgcggcaacgcttagtagtagtttcgtttctttgcgttagatgctttcagctgtcgatccatctcggccttctcttcttcaatctcgatataaacggttggctcggtgcaaagcatcgtcaaaagttgatggtcgagcgatgataagatcttctcgaaaccgtgaaacgaacattaacgcatttcgaaggtctccgatagccgcgtcgtctttaatagctatgtttgagacgaccttcttgaatctctcgataaacgttctaagcggttcgttatctctctgaaacatggtccataagtcagcgtttgtagcttccttgatcatgaaaaacgagtggtgttgcaggaatacagacgtaagctctcgatagctatcgatcgaattagcttt

SEQ ID NO: 21053 - DNA, 2445 bp, Arabidopsis thaliana
agctttctcgataacccggttgatatccggttctgagcttgtagcttggaggaatttcgacctcatttctttcaactcccgacttacttccttcatggtttcgagttggtcgaagttttcctgctcgtgctggtcaccgaactggttatcatcttcaggatgcgtttctccatcttctggttgattctccgcgtttgtaccatccggggtcgtttggtctcttgttgcatttcgcggaagagaatttggggatccgaagatggttctccaaactctagaattccctacatttaaagaacggacacgagactgaatggtactaacattctggctgagtgatacctggtttgtttgcaatgtttcgacggttttttccacgcttgcaaacttttgcgtcatatcggtcatagcttgttgcatggccttgagggtttcggctatctaaacgttggtagcatcctctctagacattgcggatcacttcgggtatataatgcacagaaagaatctgatgactcaagaatcctccatccccacagacggcgccaaaatgtggatgtcggattcacactcaagtatttatttgtttagtgagaaggattattcttgaggtcaaatatactaaaaaataagtaaatgattatagagaaaactatgagtattgtaaaagaaaatgtatagctaatttgcaccaaaatatgagtgtgtccttacatgacctttgactctcaatatatatccaaagaatacatttaattcttatttaatcacaatcattctatcttaaacatatccgtttctagtcttcgaattaattattttaacgtttgaatttgaatccactccgggccttcttgacttcacctttcggcccatttggcctcttcaatccgagtagtcttgacctcgacgccgcattcacttcgcaggtcaacaccccatccatattttcacctcgagaacgcttatgagccctctctcttatgggcctcttttatccacgtagcaatctttggccggatccgagcccgtggtgcgggatccgacaccaacaattagccccccaagtctttcgaagtgttactccagtttggaaggctttaatgctataagggcaaagattgcgccaaatgattcttttgatttcccgcccaaattacgcgattgcattgatctcggaattttccataattactgatgcgacacctgtcgcaattatgaccgtatattgtttatttactattaacgcggggaaactcttccacttcccccacgactcccaagacggttccgttatcatcactggctcgcgtgtaggtaaatttactttactctttccttgtcattttatttttgacgcttctctctcaaagcaaagttctcttctttccctgaaccttcaatctttctactctctacacaatgaattccgaaattttaagacctgaatccccttcttttgacgacgtcggctctagtaatgacctctgcacccggccgaacgacatcgccggtccccactatcaatccacatgcactctccaatctcttaatcgattgggagagctgtgtcggattccggccaaagtaatgagggatttccagatgccggagccaaccgaatcaccggaggagcaccgacccgggttcttttgcgtgtatgagatttacttcaaagggtgtggcttgacttttcctctccccgaagccctcgtgcgttacttatcggccctcgaaatcgccttaccccagctaacccccaacctcctccggactattctaggaattatcaccattgcggcggaggccggatacgtcgtcagggttcccgaactgaacgaacttctcagtgtgaggagttcttcaaagaaagtcgggtacttctcgacttatccgaacgcctatagaaatctcatctcgcatcttccgaataaagacgagaactggcatcacccgtggttcctagtttaaaagagccctgcctcgatcgggaacgtcccagacttgctctccacgaagtgatcaccaagcccggtagttattaggtcatgcatatgagcttcattttacttcctgccttatctgaccaattctattttccacttcgcagcttttattgcacctacccttcctactactgagttcggcgaattcttcaagattgtcatcgaaggggaaaccctttggaactccttcactcttgaccggttcatagaagccaatcacaagcttaggatgagctcccctggacatctcctccagctgcctctgccccctagctcctttacctaaagggacttccgctcgagccatcacagctcgtcacaagacaatgtcaagtcgattgtggaggcttgcgagatgaacaaatcattcctccaatccacagtcgacaagaaggaatcagcagaccctgttagtcgcgatggcagtgcgaagggtaag

SEQ ID NO: 21054 - DNA, 714 bp, Arabidopsis thaliana
tctaaaaacagcatgttggcctctgcatcagcaaatcaacctttttacatcatttaatgtcattttcatttacatctaaatattgtgacgctaagaaaactatataaaaacaaaaaaataattacctttattccatgcgtatggattaaagttaagtccgtttccgttggtgtccacgagaaaaggaccaatttcttgtgttgccccatatcccacagaagaacaacctggacctatatatacacattattcagatgcttaaattcaaaatgtgttctcccatgagaccatatttaaaaacacagcaaatcaacactaggttttattgtgtaagagctattagtggaaggaaaaaatcgtagtaaaataaaatatgcagaatagttgaagacataattaatgacaatatatctttatacttgacgttggtatggtgaaataggcataaatcatgtttcatgcaaattatctaacgttataaagaaatatgtagaatttacatgttatcaatcagaatgaaaatagtgagttgctgatgcaagcatgaataattcaaaaagattgagttacctccattaagccagaggactagaggtttctctttcgggagatccatggcctcaaagaaccagtaaaacatagctcttccgttggattcatcgacagggacatatccggcataatgtctgaaactcacatcaggctgtccaggca

SEQ ID NO: 21055 - DNA, 599 bp, Arabidopsis thaliana columbia
cgccagtgtgctctaaagcctgaaattgtttgaactgggcgctcgccggttacaaaacgtcgatttaattcgtagcgcagatatccagatgcgtgagtctcccgcctgaccaaagaaactatccacctcggcgcactggacgaagacagtattgtttacattcacaaaattgactctatgtacaatttgcgcatgtattcacggattgggcgtcgtaatccgctgtacagcaccgcgcattggtaaggtactgctggcatggcgcgatcgcgatgaagtgaagcaaattcttgagggcgtggagtataaacgcagtaccgagcggaccatcaccagtacagaagcgttattacccgttctggaccaggtgcgcgacgaggggtatggcgaagataatgaagagcaggaagaagggctgcgatgcattgcggtaccggtatttgatcgctttggcgtggtcattgccggtttgagcatctccttcccgacgttgcgtttctctgaagagcgtttacaggaatatgtcgcaatgttgcataccgcagcgcgcaaaatttctgcccaaatggggttacacgactatcagttctgatgagagt

SEQ ID NO: 21056 - DNA, 901 bp, Arabidopsis thaliana
ttcagatacagttggcacttttcccacctatgggcaagtattttaacagaactgaagttcagagaattggatttgacttgagtaaccaaacatataaacctcctcctttgtttggaccttactacttcattgcatctccctacacattcccaggtaacattacatacgaagcttatacacctttttggagttaaacacatcgtctaacaatcgaataatttttggcagctgatggtaacggacattccttgagctctcggatggtcactgggataataactggttgcagtgctttggtcctgtgccttgttgcgttaggaatatacgcaatgtggcagaagagacgtgcagagcaagctatcggtttgagtagaccatttggtaagtccgatgttctaacaggtgaagttatcttagaaacactaccattttagattctctgaggttcacctgaaaaaaaagaaactctacattaacttacatgatagatttactgttaagtagaagactgacaatgatattttgattcactcagtttcatgggcatcaagtggaaaagacagcggtggcgcaccgcagctgaaaggggcacgatggttctcctacgaagaactcaagaagatcacgaacaatttctctgtgagcagtgagctgggttatggaggttatggaaaggtgggtttttgaaagatcgatcttgaaactatctagggcttcactttcagggtttgacaagtaacgctcctctgtttctctctgtaatctccgcaggtgtataaaggaatgcttcaagatgggcacatggtggcgatcaaaagagcacaacaaggatcaacacaaggagggctcgagttcaaacagagattgagttgcttcctcgagttcacacaagacctagttg

SEQ ID NO: 21057 - DNA, 1848 bp, Arabidopsis thaliana
agggtttgtgtaacatagtagaatctgcctttgttctaaactcagtgtgtgatcttgttaagttcttcaatttgtctataatcttgttaggttatttattgtgttctgtggtgaatcatgaacataattgtggaacatttgttgattgttgaacttagcatgttttcggctttgacattgaggatctgtctttgttctatacttgtctataatcttgttaagttctttattgtgttctattgtgaatcatgaacttaattgtggaacatttgttgattgttgaacttagcatgttttcggctttgacaatgaggatctgtctttgttctatacttgtttatacttgttcattactgtctatgatcttgttatgttgactattgtgttctgtgtgtgatcttgtcggcttatacttgtctagaatcttgtaaaatctgcctttgttcaattatatagtctgctgtagttgtagtgttttggattttaaacatgtttactttctgtctgtgttgcatgtgtttggaggtttactcgcgacagaggatctaaattggttagaaagatcacacggatttttactcaaaagttcaatgctccctactataattggtcctgtgtgccattggataaaagagaaagattgtttttagagtttgcggtaagcttcttgtatttcttcaactttcattagactgtactatttaatctgtcatttgttcactaacttcacactttttttgtagaaaactcaccattgggatcccttaataacagggacagtccaatactacttcaatgagatcgttaagaggcgcttgaaggacatggttagcaccgcaaggagaactcgagagcagcctccatggattggagaaactctgtggggaaccatgtgcgactactgggacactgaagaggcacagaaaaggagtaagacatattccaaagctcgtctctctgaccgtaacggtctcggtcctcacgtccactactctgggccaaagtctttccaagaaatccaagatgaattggtaagtgtttctgcaatcttcccatgtgttttagtgatgttcgtttaactgtgtgtgatgtttagtctgttgatagtaatgaagcttgtgatctgtgtttgcaggaagaaaaaatgggaagacatgtccctcttggtgaggtgttcatccagacacacactaagtcggatgggacttatgttgatcagaaggcagagaagattgctctggcgtatgagcagaatgtgagagagaagttgtctgaactagaggcggctgcttctgctgtgtctgatggctcttcacatcctcgggatctcacactagatgagtatgcagccatatttctcgaggtaagatgttctttgtctttttcagagtcttagagacatttaggatctgtcactaattatcttcctctttatttcttgcagtccacagaaaaggatgcaagaggcaatccttatggacttggctgtcttaaagaaactctaggcagtgccaaccgccaactccccggagactcaacctttaaagccttagaagaacggctgcagaaagctcagcggcaaattgaagaacatgctgcatataacgagaagcgagatgctgagattgctgcccgagaagccgagacagcccgagtcacaactgagcaaaaggacaagctcgagcacttgtccttagtcgagaagtatctccgccaagccgatccgcagttcttggacttcattgccacacactcttccacatccctagagcgtatccaattactccccatctaatgatcatagaatttaggtttcaaacactagttgtattttcaataagttgtatg

SEQ ID NO: 21058 - DNA, 499 bp, Arabidopsis thaliana
ctcaattccaagatagtaagtaagtttcccaagatttgtcatctcaaacttggatgccattccttctttgaattcttgtataattcccaaagagttccttgttacaaagagatcgtcaacgtacatggcaacaagaagtagctttgtaccttctgacttctggtacacaccactttctttcgaacactttgtgaacttcaagctctttaaaatctgatcaagttttgtgttccatgctcgtggatcatgtctaaagccatataaagctttagagagtttgaaaaccttctgctcttctcccttcttttcaaacccttcgggttgagacacatatacatcttctttgaattcaccatgtagaaacgcagtcttgacatcgagatgatgaatttcccaaccattagaggttgctagtcccacgagcaaccttattgcttcaagacaagctactggtgcaaaaactttatcgaaatcgatacccgatctttgaacctagcct

SEQ ID NO: 21059 - DNA, 602 bp, Arabidopsis thaliana columbia
gaactctcttcctatgatcaacgtccactatctattcccaactttgaagagttaagagacatttacctaaggaatcggtaaatccttgtttgcatttgtcgatttcatgagctcctgttgcctgttgttgcgcgacctggtttcaaaacggcttccaagttcgatttcaagtttgcaaaatgtgaagttgtctctgatagtgactccttgcatgcccctatctcacacatgctcgtaaggccccatcacactttccaattatttctgagcggaaaagtcaagtgtggtgcctctgccagtggacattaaatgtaaccaccaaacattagatgacataaagttatttcaagtcttaggattaaatcaacccttaaagctctacgtttctctcaaagttgctgagaagatgggttgtttgctaattcttcttcttacattgatttgcttttccttgaggctttgtttggctactgatgtaatcacgttttctagcgagttcagggactctgagactgtcgtctccaaccacagcaccttcaggtttggtttcttcagcccggttaacccacaggacgttatgcagggatatggttcaataatat

SEQ ID NO: 21060 - DNA, 638 bp, Arabidopsis thaliana
taacataataatatctgatttttttttttttttggtaagatcaggtattaatgtaaattcccaagtcactttccacatcacaagtgaaagcttgaaattttccaaatcactgttctaccaataatccccacaagaacacgtcccattcttgaaatgatgaaaccgaatcggatcccttaaaacaatctcacgtcccacaactccggagattaacttaatcactgtgtgacaatcttcacaaacccgtagattcttcatcactgtgactgcacttccttcaactgtattaatcaacccaaaagcaatagcaagcctctcactgtggtaccacaacatctcttctttctgttcatcttcaacgtcatgtaaagcggatctataatcaggagcatagcccagttccttcaacttctctctcagaaactccaacttctcatatatcctcgagcaatgtggttgatcaccggagaaaaattcgtgcttttccctctaataacaacccaactgctcccgggtttcttcataatcccattcttcttcatcttaactctcaattttgatacattcgaccatctaccagcagaagcatatatatttgacaataagacataagcagcgcttgattttgagtccagatt

SEQ ID NO: 21061 - DNA, 457 bp, Arabidopsis thaliana columbia
ataagataaatggtgatttgaataatattgcaaagagagaagcaatatcgaagaatctcatactgtgatatcacaaagttataaaaagaagaagcaaagattcgatctattaagcttcctctttgaaccactccatcctttgatgctcctttaacgcagagccatcaccatccaaacaacaagccatgacaaagggtacattacccattctcctgcttatcagtaaagccactctctgtcagacaaatctctatactgtcaagtactactaggcaatgtctcagtttcttgtctgagaattcgcttgagaagtaatacgttatagctgcgaccagattatctatgagacagtgtggtgttccatatacctcaatgatttgcctaggtatagtagcagtgtgagagtggtgcttacttgagaaccaagggacaggactagccgcagagttattgtgga

SEQ ID NO: 21062 - DNA, 591 bp, Arabidopsis thaliana columbia
ttctttatgtgaaacaagcaacagaactgctcagtttcaacgtggacactttcactatcaggtatctaatcgatacccttcgaaaactgctcaaagtgtctatcttttataagacaataagttgctaatatatatgtatcatcatttgctttaggaactaaacacaccatttgcaacagagagcttaaattctttattggcctccactgaagcgaaccagaacttatacacagtgccaccacataatttcggatatggtgagcccattggttctttatatgaaactagtaacagaacttatcagcttcaacgtggacactctcactatcaggtatcatcaaatatgatcttatccgtttcatctgctcaaaagtgtccatgttttataagactatgagttggtaatatatgttgttatcatattctgtaggaactatacacaccatcagttgaatttcagacgttatcccactgccacctcttaatattaatttcaatgagcctggtggtggtggttctcaattgctgctgattctagtcacaacaattcagctcaatctacctatgtggcatgaaaatcagttgaacata

SEQ ID NO: 21063 - DNA, 854 bp, Arabidopsis thaliana
cccctgcatagttatacacgaaagggtttgctcctggtttcacaccaacgtaaatcggtcttcccttgtggcgcgtgtgcaccgtcacaccgcctttaccgactcctacgtcggttcttttaccgggtttacccgtgtggactgcgacgccacctccgtgaccttttccgctgccaacgctcacgtgtgtccctcctccgggcttgccattgcctgtgtccacgcgtacacctccctttccaacgttcacggcggttccgctaccggttttacctttatgggtgttaacgtttactccgcctttacctacttggacgttggtacttttctcgtcggtaaaatctgcaaaaaaaaaaagtttggtaaggaaacatttattttattaacaactaaaaaagaatacatttatttgctacatacaaattcagaaaaatatgttgaaatattacagacattgtaataatacaagtcaaacacatctttatttgcatttatgtaaataaatattttttgtgtgttttaaagaaaagaaagaaaaaaaacagttaattatggagagagttgggaatggaatggcaaacatgtatttctaacactagtgaaaaccataatataaattcataatataaattcagaacaaacatgtatttctaacattaagaacaaaaataagtgagagagttgggaatggcaaagtaaaatattttaaccgaaagtcaaaagattatggagagagttgggaatgggagtgtttggtaaagcagtgctccaataacgctccggtgttaaatcagccgcaatcgccactaccttcaataataaaaagaaaataacatcaaaccacaatgaataaa

SEQ ID NO: 21064 - DNA, 454 bp, Arabidopsis thaliana
gactccccccaagaagcagctcgttgcttacgacgtaatccattgcgctagatgcagagtccattggcatggatacagttgttatactccaaatatatccttgcatgtgaatcagtgaacttgcttgctttgttaatactgttgttatatggaaatgtgttgttgcaggtggtagaccacttttggaacttaaccgggttctaaggcctggagggtttaatgttcggtcagctacaccagtttatcaacacgacgaagggcaccgtaatgtgtggaaaagttagtgccacttgtgcatcctagtcccacgtcattatgtttaattagcatacagaagaagtttgtgaatgttttatggcctgcatgtgatactcatgcagcaatggagtctttgactacatcactgtgatggaaagttgtggcaagaagccgcttcactaaagttggattcgtg

SEQ ID NO: 21065 - DNA, 595 bp, Arabidopsis thaliana
catcttttaatcattactcgagattctgtttccatggccatatcctcaaatcttctcctttgtctctctcttttcattttcatcatcaccaaatccgccttggctcagaaatgttccaactacaaattctccaccaaccgtctctttgagtcttgcaacgacctacctgttcttgattccttcctccactacacttacgattcttcttcaggcaatctccaaatcgcgtatcgccacacaaagctcacccccgggaaatgggtggcatgggccgtgaatcccacatctactggcatggtcggagctcaagccattgtggcttatccacaatcagacggcaccgttagggcttatacgtcacccatcagtagctaccaaacgagtctcctagaagctgagctgagtttcaacgtctctcagttgtctgccacttaccaaaacaacgagatggtcatctacgcaattctgaatcttccacttgcgaatggtggaatcattaacactgtgtggcaagatgggtcactgtcagggaacaatcctctgcctcatccaacttctggcaacaatgttcgttctgtttctactcttaaccttg

SEQ ID NO: 21066 - DNA, 839 bp, Arabidopsis thaliana
caagttggagtgatttcaaaaactaccttgaattcaagcaaaagcctttgagcttacagaacttgatcgctaggctgcagaatgagtcttccgagagagacaaatcttgtttcgtagctcatgatgcaaatgtggctgagtacaagagaaagggtaaagccaaagttgtttataacaacaagggtgaaaaacctaacaagggtggtccaaagataatgtcatctaaaccctccactagctttaagaagcaaggtgatattaaaaaaaattctgggaagtgcacctactgtggcaagcaaggatcataaggcgagtgagtgttgcagcaaagctaagggaaaaggtcagctaaccaagcgaatttgactgaagatgacctctatgcggtggtcactgaagcaaatgtggtgacgactgatgagaacccaatggagtggtggtacgacagtggagcaaccacccacatctgcatcaatatagacatgttcagcacctatcagaagtgcaagtctgacgacaaactgatgatgggcaatgtctctcactccaagattgaaggcactagtaaggtggtcttgaagctcacttcgggaatgactatcaccctttccaacgtgaagcatgttccaaaacatgaggaagaatctgatctctggtactctgatgaacaagcacggttttgctatcaactttgagtccgaccagctgatcctaaggaagaatggtgtgtttattggtaaaagttttgttaagggaggacttgtcaaatgtgtgtttagacaatcctcaagaaagatgatgtagcttctacttctgtttcaacaatgctatcaataaaa

SEQ ID NO: 21067 - DNA, 537 bp, Arabidopsis thaliana
cttggacagctaaaaatgagatgagaacttaagcttaccgttaatcctttgcatccttcagggagacagactgtttcattaagaatctcaccaacacctctaatgtcatcatgctgcattctcctacatgaatgaaaaaaaggtgaaatacaagcaaaacaacatatgcttgtcttggttatatagagaaagttagttgacaaaccgatgaagcatcaactcgatctggccgttctctaagctggatccacctacagctcgatccaccaacacggatagctctgaggttttatcttgcatgtatatcccgagatttagctggaagaaaatatatatattagacaaaaggccagatatagtgcagctcagtctagtacaagaccttagtacaccacgagaaggaatctcagatgggtttgatgccttacaggataatagttcccagcaaccggttggtacacttgcaagtcccaatctgttctgaagtccgaatctgcaagaaaatgtaacaaagtatgttacaataaaaacaaaata

SEQ ID NO: 21068 - DNA, 515 bp, Arabidopsis thaliana
caagagaaaagcttggatccacaactatggcatgcttgtgcaggatcaatggttcaaatcccttcactgaattcaacggttttttacttcgctcaaggccacacagagcacgctcacgcgcctcctgattttcacgcgccgcgcgttccacctcttatcctctgtcgtgtcgtctccgtgaagttcctcgccgacgctgaaacagacgaagtttttgctaaaattacgcttttgccacttccgggaaacgacttggatctagaaaacgacgccgttttgggtctaactcctccttcttctgacggtaacggtaacggtaaagagaaaccggcgtctttcgctaaaacgttaacgcagtctgacgctaataacggcggtggtttctccgttccacgttattgcgccgagacgattttcccgcggcttgattactcggcggacgaccggttcaaaccgtgattgctaaagacatccacggcgagacttggaaattccggcatatttacagaggaaca

SEQ ID NO: 21069 - DNA, 614 bp, Arabidopsis thaliana
taaaacattttttgattatcaacagagggtatttagatccggagtacatacgaagcggacgtgtttccgtcaaatctgacgtttatgcctttggagttacaatcttgacgatcattagcagaaggaaggcttggagtgtggacggagactctctaatcaaatatgtgagtttatatttaagtaaaagtttgtatgatggtaattaagtggttccttaatcgtatgaattgtcttcttttaggttaggagatgctggaacagaggagaagccatagatgtgatccatgaagtgatgagggaagaagaaagagaatattcgataagcgaaatcttgagatacattcacattgctttgctatgtgtggatgagaatgctgagagaaggccgaatattgataaagttctgcattggtttagttgtttctctactcctttacctgatccaacatttggtaatagatttcttgtagaggaagaaacaaattggccctggtcgccatctttatcgtcctggcacagctctgtcacgtcacccatatcttcacgttaaggagattgagtgctctgttttattagactgacgagagtttatgatgaaaagaatttgttggtga

SEQ ID NO: 21070 - DNA, 767 bp, Arabidopsis thaliana
tctaaccttctgattcatgagtaatcatatgtccattatgaagttcttgaatcaaatcctctgtctctctcttatcctctccatatccatgactactctttcctttgctcagacatgttctaaatacaagttctccagcaacaatgtctttgactcttgcaacgatcttccttttcttgattccttcctccattacacttacgagtcttccaccgggagcctccacattgcttatcgccacactaagctcacctctggtaaatgggttgcttgggctgtgaacccaacgtctacgggaatggtgggagctcaagccatcgttgcttatccacaatcagatggtactgtcagggtttacacttctcccatcagaagctaccagacgagtctactagagggtgatctgagtttcaatgtctctggtttgtctgcaacttaccagaacaatgagatcgttgtgttggcaagtctgaagcttgcacaggatcttgggaatggtggaacattaacacagtgtggcaagatgggtcaatgtctgggaacagtcttctgcctcatccaacttctggcaacaatgttcgatcagtgtcaactctcaatctggtatccggtgtttcagcagctgcaggaggagctggaggaagtccaagcttgcaaacgcaatgtgagttgaacttttgtggcacacatctctttcctaattttttattggcaacacgaatatgatgattttgtaaaaaaggttgcagatcatggatattaatgag

SEQ ID NO: 21071 - DNA, 752 bp, Arabidopsis thaliana
cgtcagaccctcttcttcagctcgtatcttagcatgtgcttgtgcttgatcatacgaatctccgaaaagaacaaccgttgcacccaaattctctacagcttgccactgttttcaatcccagaacaccatcagatactaacttcaagacatgagaaagcttaaaaatggaaaatacctttatctcaggagtcgtaacaggcataacaatcacagcagtgcagccgagtttactagcagataaagcaactccttgagcatggtttccagctgaagagcagataactccttttgccaattgatctgctggaagtttcaccatcatattgtaagctccacgaagcttaaacgagaatacctaaaacaattccagtcaccactcagtacaacaacacataaaacctcagatgtagtctcaattccatacataattcacctaaaaaatcaaccaaaatgtataaagggagaagcttcattacttacaggttgcaagtcttctcttttaagatacatacgaacacctaatctcttagatagcttcttagccaattggagtggtgactcaatggcgatgtcgtaaaccttagtggacagtatattcgtcaaatactccatagcttccgcgatgcttccgttctcagcctcgttcgtacgttctggtacagcaccgaggtaaccggcagggtattgcaacgaattcggagagaccttaagacgtggtaaaggaagctttggaggcggtggagtcatagatg

SEQ ID NO: 21072 - DNA, 547 bp, Arabidopsis thaliana columbia
caatatccacgagattcgccatagggatcgtagcaagctaataagcaccacaaacgaagatgtccgatctagcattatcctgaattaaataaaacaagaaataaaaataatgaagtcagagaacttcatagccacatatgatgaaaacctttagcatggaacgaatatctgaccaggatcttaagcatcaaaacattcagagctttaagaagttgactcccatcttccatgcgtggaactctttcatccagaagccaaagcaagagctctgttataaggctttcaagagtcccttctttgactgcatgggcaagctttttattttggaatgtctgcaaaaatacatacttatgagtagtgaacttcacaaacaaatctaagtgggctagccagctaatgaagaagagcagcatcactaattcacacgaagttacctgcataagtgtgttcaaaacatatttacacgacctcgatgaagctcccatcaagctaacatcaaatgttttggcaacctaacagaaaacaaaaataattaagtggtggtcag

SEQ ID NO: 21073 - DNA, 547 bp, Arabidopsis thaliana
agaggatccccggtccaaataccaagaagccaaagacagtaagtcatgatgctgcttgattctaattgttggtaccgtcaatcttgttcttatattcttcattgactaaggtataagaatatttcattctttgtgctcgatgaagtcgatgcagtacccatctacaggcattgctggaaggccccaggctggcgctttaacaaatgaaccaggtgaatcgggatcatatgacccgttggttggaaggaaggtatggacgaagtggcctgatgacaaccaatactacgaagctgttataactgactacaaccctgttgaggtatcttatctttcattgctatatattagtgttttagtgccaaatctccgttttctgatatcatttatttccttttttcaacattgattaggggcgtcatgctttagtgtatgatattaactctgcgaatgaaacctgggaatgggtaaatcttaaagaggtaattatgatttcagtttttctacttgtctaatatatctttcacatttgtacagaagatgatgctat

SEQ ID NO: 21074 - DNA, 1998 bp, Arabidopsis thaliana
tcccacttgtcggaggttgatccctcgttcgatgtaatcgatgattgggttctccagacgttgtatgtttcaggttcatacagggcaggttgttcgggatttcaagctcaggctcctcctctattgcacttgcctccgcggctgctgcgagagctctagctgcggcggtggtgcttcgggttactctcgtgaagttgcaagttgcggaggtttccggcccagcatgtttaaccgttaggtcgatgcttgggtgttctattccttcgaccgggataattcttttgacgaaaggatctgacgtagaagcgagaactgccaaggcgtctgcagaggtgttttctcctctggggatcctggttaattcaaacaattcgaactgttggttcaacgttttgactagttcgaggtacgcttccatgcgctcatctttagcttcgtattcccggtggaactggcaggtgacgagttgggagtcgctatggacgtgtatttcgcggatccccattccttgagctagcttaatgccagcaatgagggcttcgtactcagactcgttgtttgatgcgttgaatccaagtcgaaacgattgttcgatgactttcccgatgggggaggtgagttgtattcctacttcggatccctgtcggttggaggagccatcgacatggaggagccattttttattggagttggttccatccaggtcgctaacgggagctcgattacaaagtcggctaggacctgtgctttcaagctggttctggtgagatattctatatcgtactcacttagttctatggtccattttgcaagtcgacctgattgagttggactgtgcagaatggttctgattggttgagacgtcatcactacgatgggatgtgattgaaaatatggtctcagttttcgagctgacatgactacggccagtgccagtttttccattgctggataacgggtttcagcgtctatcaacgttttactaacgtaatagatcggtttctgtccttcgtgatcttctctcaccaggacgccgcttatcgcggttcgggagactgccgtgtacatgtacaacggttctccttcttcaggttttgcgagtatgggtggttcagacaggtatgctttcaattgtttgaaggcttgctcgcagtcctcattccaatcgaactttttatcctttcggaggagctgatagaaagggacgcatttatcggtagacctggatatgaacctgttgagggcggcgatacggccggtcagtcgttggacctcccgtgccgtttttggcgatggcatgtcgatgaaggctgcaatctgcttaggattggcctcgatgcctctttcggttactaggtatccgaggaattctcctgagggaacttcaaaagaacatttctcggggtttagcttcatctcgaatttgtttaggattttgaagcattctcttaattgagggacgtggtctttttcgcgagctaacttgaccagcatgtcgtcgatatagacctccatcgttttacctagctggtcggcgaacattctgttcaccaatctttggtaagtagctccagcgttttttaaaccaaagggcattactttataacagtaggtgcctcagtcagtaataaaagctgttttttcttggtcatttgggcgcataagtatttggttgtacccggagaatgcatccatgaaggacaatagttcgtttcccgtagtggcttcgaccagtcggtcaatatgtgggagtgggaaactgtctttaggacatgccttattcaggtccgtaaagtcgatgcatactttccacttcccgtttttctttttaacgatgacacggttggcgagccagtcagggtattttacttctcttatcgatccgatcttgagcaaccgatcgacctcatcgtgcacagctttagcctttcgggacctagcttgcgacgtttctgctttataggtcggtaggtctgatcgacgttgagttcgtgtgag

SEQ ID NO: 21075 - DNA, 2003 bp, Arabidopsis thaliana
  unsure (1)..(2003): unsure at all n locations
tctcgtcaaaacgtctctgagccgagaatgaattctggatctcccacaaccccgagcgcctctcttttcgactccagcgattcgaaccatctgtacgatcttccccctatctgcaagcgaaagatggtttggacatcctcggaggatgatggtgcatcgtcttcgaacgcctctaagcagataacccctttcacggctcgggaggataccactgctgtcattgctcgggaattggatttgcccgacgataccgagctgcctcttgtccgaaggacccttgctccgatggccgacaaagctgggacgtccgactagctatacgcaaccgagcccttggtgccgcaagtaaagattgaagactttctttactttggcccaaacgagatggaggatatcatacggattaccgagcaaagggcctttgagaaagccgagaagaagaaaaagaagaaaggcaagagggcgataatgccgaaccctcctggctccactctgtgcaccgagcaatcgctttcagaactgagagtctggttcaaccttggtgaggtcactctgcgcgtgccgagccccgacgagtgtgctcataatccccccgagggattctacaccttgtacgctcgctcatttgagaaacctcctcgagatccgaggtggatcgatactatatctctcctgctaagggtaggaaggttattgacgggttccgagcaaggacgagccgtataccaatcacttcttcttcgtgccccttgaagatgctgttctcgacgaatctcctcagaactgttctgacgcgatggagaactttaggtcgttgtagctattactttgtttgtgcccgaggcggttttgtgagcgttctaactatttttccctttgttgcagaacgcactatcaaattcctcgagccgattccagcctccttcgctttggattttcacgcattatcggctaggaagtgtgactggttgaagcatttttcccgagatcagatcgagcgagcgcttcgtctagttcatggtgtttcttgcccctccagctcagagtcctcggaccatcgcacccaattcttcgtagatatgcagtcgaccaagctcactttgagggaggtttatgcgaagaagaaggaagacaaagagaggcgtttggcggaggagaaatgtcttgccgacacggggctgatttcaccgcaggccgctcccgaggcaacccaggacggaaaagtcgttcctgatgcaactgcgccggttgagacggtgcctactgaagctcaggaagccgatccgccttctgctgtgcctacgcctgaggcggttgttgcgctgcacgcgagctgaggaagccgatccgccttctgatacttttctggagtcgtggaagtacgtcgagactgcgtctcacttcttccgggtatgtgtttccttattcatggtttgtccttggttccgatcctataactctatcctttatttgttcaggccatcgcctcgatgaaccagatggtgcactcgtaagatgcggccatgcagaataacatggaggtggtcagcaagttagccgaggtggagtcccgaattcaggccgccgagcgagagaacaatgaagagctcgcagaagccaccgcggcaaatctggtgagggaggaggccgagacggcgtcctttgtaaacaaggagaacgccatcaagatggccgagtagaatcttaggcggattctgagattgtccgtctcaagcggatgttggtcgaggcgagagtactccgtgatagcgaggtggctcaggctgttcaaacgacgaggcgagaagtttcagagactgttatcgctaagttgaaagctgccaagcaaaaggtgtcgctcctcaatgaagttaatgaccaattcatttacctgtcccaggcgcaacgtanatgcgcacgtaatcaaggtacttgaagaaggcggggttttggagccaagaagcatcaggtcgatgagtggttgaaagattcactgacgctga

SEQ ID NO: 21076 - DNA, 2608 bp, Arabidopsis thaliana
acaagaaaacacatagttagtaactgaaatgaaaattaaaaaaaaaattgatctaagcaagtctgaaatcttaaatgtaacaaacaaacacccaattggcaacagcgccaaattgataatagggtttttagtcaattatcctaaaacaccaatcattgtattttaggttgtcaatccaaatgggtgtgatgctagcgatcaagatgcaatcagagttcacagagtcaagccaagcaataacaggttttgaggtttctagcggtcctaggtgaacatgcaggaaacagaaattcaagcagaataattaaaacactcgaccaacacagcttgttaccaagcactaggtgtggtcgagtgagaggtcgagtaaacagcagagacagtgacaaagatattcgactgcacagtctgttaccagacaactgggtgtggtcgagtattagagtgataacaggagagaaatgcaaaaattaagcaacaggtaacaagatgcagtagacaataacatagtaaacaaagaaatcaattagatgaggaattctcaaggatgggataattgagtagtttcgttttctcagtttataggtgattgacatgctcaataaattatcccgagaaaataagttcgataaccaaatctaagtgccaccgcaaaatagaccctcaagttaaaccacaatcaccattgacaagagctaacttaacatgcattaagaatcaacaagttaaagccaaaacgctccatgtaaccaataccttggtacagagccacgaatctctggaattagtggttcagacatttcatctaacaccttttgggtgcggaaatgtctgggctcaaatttcagttgattagaaagcaataggcattaagaacaactaatccataagggatctataaatcaaactcaaccacctagtatactgaggattctaactactctaacacatcctaagaaacctagtcactactcacacatcattgtagaaagcataaacgatgataagaatgaaaacatgatagcaacagagtaatagcgaaatgataataggaagaacaacttactgaatgaaaagcaaatactgaatagactaagagaagtcgtgattacaaaatgtcaagaacacacagtgtatgcggaaagaaacctttttccaaaaaatgtaaagtagaagctacttatagcgaaatattcccaaacactaatgctcaaaacgacacagtattgggacggatttaagaacggcactcgacccagttggtcgagtgattggttggagtcttcttctcttccttgtgcttgattgtttagttgagtgcataatggagaagactctgaagctggcagtcgagtatgatgtcgagtggtggaagatggtggtactcgactttgtggtagagtgattggtcgagtgtgcgatgatgaagggactcgaccatgtaatcgagtgggagatcgagtgaaggtgatggtggtactagaccagggggtcgagtggtgatgtgatatgatgggttcatctactcgaccaaggggtcgagtggtggtgagaagtggtgatgccatctactcgacaagggggtcgtgtggtgatccagagtgttgcggtcgagtgatgtgctacggaggcggtgaccgagtacttcagaaagtccagcatggcagtactcggcatcggggtcgagtatatttataagatcaagtccacttcttccaattagctcgtcaacagctccaaatcacatgaaaacaacacatatattcaacatgcatgcaaaactatcctaaacatgtaaagtgatgacaaatgatgagaaatggtataaaacaatggtgatatgatgctaaagtgatgacaaatgaatgctcaaaacatgtaaaatgcacacttatcaatgtgtattaatatttaataagtatataaatatattattattattaaagtatgaagaaaaagaactagaatcttggaaacaaaataaaaatgaatattttaatatgcgttgcgtgattcgtgaaatgcatatttgtgtggtaataataaattatttgtatgaggaaatattgtgcgatagaaagtcctacaaggagaaatccttgtagttgtgtgatggtctatagacgtggatagatcaggatggctgacgagccagcgagtgtgaagtgcatgaaagaagtgcaagagccacgagggatccggttgcacggaagaagtgctaacgcacgaggtatcctttatgtacgagtagacgatgtgtgttatacgttcgtatcctgtctgccattgtggtagtggttatgggacgtagtctcatttatttgatgtgtcgtgtttatgacacgttattgattgcttgtcttaggtttatactttgtgatgctaggtatgtttctatatggaaaattcgtgagtcctaagacttatcttagattgctcatccctctttttgtctcgcagataatggtgaggagtagttgttggagtttgttagttggtgttgaatttgagagtatcaatttcattattctattatttggatgttttagaatatttattcagtttagggattgaaagacgtttaagttgaatttatagaaagatgtta

SEQ ID NO: 21077 - DNA, 1650 bp, Arabidopsis thaliana
tatccattaaacaacttttttatcgccttctataaactgatctcaatgagtgagattaaaagtcaatatatgagacgtaccttcgccaagctagctgaaccgcaaccgcggcccaagtccgccatccgggagaataatagcgagcactacgtttgactttctcgttaacaaaagtgtaacgaaaatgctgcgtcacgtacttaacgtcttcggcgtcgaggccaaacgcttcggtggtctcgagtgttacaagcgttgaagaagaaggcggtagcctctccacgaagggtcgtcggagacaccacgagagaagctcgtcgccgctgaaatttcccggacctaacatgcaacagctcttgacaccgtctcttagtaactgactgctttgaagatgacctctcactacgaataacattctctgtactgcatctccttctttctgaatctgcattttcaaagatttcattactttgccttcattgttgacgttaacagtttcttggatctcacgctaacaatcaaaggctttatgatggttttgaaaccggttacaattttttatttttgtatatgaagaagcatactttacaaacgaattgtaatttcagtttttaataagattttggtatatatattaatttgtttacgtcccctaaattggtttgaagatacttactgtttctcctttggtgaaaatgagagacttcacacggtcgcatatattctcaagcaccaaatcatccatatgctgaaacaatggaacctgtagtactcatccactttaatcaccattaactaatttcatcgttataattaatcttccttttttctttaatcgataataaatcatgacgatcaatctgacctgccggactaagtctagacagaggtggtacttgatgtctctcctaagacgttctggaaggttctgaaccatttcacactcgtctacaccgcgcatagcagcccatctttgccgctcatagttgcggactcgctgtctaaaccctattggcaaatgtctcttcttcatccaccactctatgttcctcattttcaagtgcattgcttgcttctttgaagttgtagcgtgcagaaataccttcgttttagaaacaaattagaaatctttaacttgattatcatgttatttatcaaaattatgaaaatgtaagatctatataccttgatgttaccaatcaacatggtaacgagaagaagaccacttgttagaactatgatattgaagacaacctccgaccattctgttgtgctctccaaattcccaaatgtgctgattaattatacagataagaaaagattatgcaaacttttcttttttacattaatcattttattggtgaaattatgtatatacacatatatgtaaatgatgaactaaagcataatttatttgatttgatttctttagttttgtctcatggggtgaattggtatgatcacatataaactcgcaccaagcctgattgaaaaaatcaaataattatagtgattaggatgtgagatcctgagagtcatgagaccccaaaagataggaaaaaggatttctcccaccgactctcactgctcacaagttgaatggccattgataagcccatatgtgtaattggtgttatatctaacaaacag

SEQ ID NO: 21078 - DNA, 2308 bp, Arabidopsis thaliana
cgatgaccggctagggttacgggtgatcacgatgctactatgacagagatcggagagggtgtacggcctccatgagatccgccggatggaaggggatcttgggcggcgagagtgatgggtacgaatgcaggagggagctttgcccagagagtttgatggatgatgagtttgtttcttcgaggatgcgtgtagagttcccgaatggagcagatggtgaatcggttataacgattggtagggaagtgttggatgtgatgaatagtatgtggaagcagtgcatggtggtgaaagttttaggacggaatatctccattgctaatttgaacaggaggttgagggagatgtggaagccacaaggagctatgttcgtcgtggacctgccttgtcagttttttatgatcagatttgaaagagaggatgagtatctgtcggcactcacaggtggtccttggagagcgtttggcagttatcttctcgtgcaagcctggtctccagaatttgaccctttacgcgatgagatcacaacaacaccaatttgggtccgtctgatgaatatcccgttgtctctgtatcacacgtccattcttatgggtatagctgggtctttgggaaagccggtgaaagtggacatgacaacgctgcatgtagagcgagcccgctttgctagaatgtgtattgaagtagatttggcaaagccgttgaagggaactttgttactcaatggtgagagatattttgtctcgtatgaaggtttggctaatatttgttcaagatgtggcatgtatggtcacttgatccatacctgcccacagactattgcagagaaagaagttaatgccgcttctcagagtgctccggtggtggttagtggagcagttccggagaatgatggttttacggtggtgagaaggtcgaggaagaaggcggcaccgcgatggtccacggtggtcaatgggatagagggcctacggcggttgtagggcgcaatcttcgggaaatcactcaaggaaaaaattcggggaatattctggtatcgaatagttttggtaacttggatatcgaatcaagtccagtggagggaagtgaggcggatttgtcgggagttcagaataaggaaaatgttaatactctgcgtaagtttattcaagggaagagtattagtcaagataaggaagggattcgagagggaatcgatggtggaggacttgagataaggaaaattgggctgaaaggtgggctgaaggatagacgggccggattctttaagcccaatgaccagaatcgtcaaaaggccaagcagaacacgaataggcccactaaagggcttgtctttggcccaacgaaaggtgaggtagtgcggtctgagacagggaaaaggcttcgagtagagaaaggtaccatggggagacgaggaggaatttttgtgaccaggactgagatggagaaaatcacagagagtgctctgttatcggtccgggagaatgaaatggatacgacgagcctgatttcagccgggactcgagtggagggagggataggtgtgaatggaagcttgtcgcctgaagcgggaagctctgcccttgtataacaggtcgccccggtgattcgtttgcccttgatttacagatatcttatggattgcttaaagtggaattgccggggggtcaacaaacccaacttccgtcgttcaattcggtatatgctgaagaaacatcgaatagatgttctggctttgtttgagacacatgcgggtggtgagaaagcggtcagaatttatcaaaatttgggttttgaaaattctttcagagtagatgcgcgagggcagagtggaggtatttggctcttgtggaaatcagaggtgggagatgtttcaattgtggagtcagcggaacaattcatacacgcgaaagtggggaatgggttagcggctatccatctgctggcggtttatgcggctccttcggttagtagaagaagtggactatggagtctgttgagccggatagtgcagagtgtggatgagccgatcattgtaggaggtgattttaacacaattatcagactcgacgaaagaacggggggaatggaggactctcgccggattcactagctttcggggaatggataaatgagctctctctcatagatatgggattcaaagggaacaaattcacatggaagcgaggtcgtgtagaaagtacttttgtcgcaaagcgtttggatagggtgctatgccgtcctcaaacacgtttaaagtggcaggaagcttcagttactcacctcccgttcttcgcttcagatcacgctc

SEQ ID NO: 21079 - DNA, 1979 bp, Arabidopsis thaliana columbia
ccgctaatttttgaggaatatttgaattttgtttttaaaaatagatggattcgagttttggtaacaatcggcggtgtttgttagttgattgtgttttaattattgatgctaaatagacatagatttgtgtaaaaattgaggaactgagagaaatttgatttgctaatttttgaggaatatttgaattttaattccaaaaatagatggattcgagttttgataacaattcgcagcgtttgttagttgaccatgtttcgattaattatactaaatcgacatagatttgtggaaaattgaggaaatagagagaaattcgatccgctaatcttatatgaatatttgaatttcgttccaaaaatagattatttagagttttggtaacaatcaacggcgtttgttaggtgattgtgtttttattattgatgttatataaacatagatattttgatcggagttttgatcggcgacgatggagagaaacgtcgagaagatgctgaagagagtatcaatagtgttcttaagcatcggaacagtattaatggtaattatgattctccagacaccaaaaacttgtatttctccagaagctccatcgaaacctcatacgcatttcccgagatctacatgcgattcatcgcctcgtcagcatcttcctctcccaaagaagaacgctcgaatctggtcctctggagcttggaaatctcgtctatactccttctctacctacttcctccgatttcgcgatctcggattcattcaaaatcacaccaaagctctctgtctctccgccggagcaggccatgctctgatggctctttctcagatcggattatctgatgttaccgcagttgaattggttgattcgattcctcttgtgaaaagagctgatcctcataaccttccgtttttcgacggtgtctttgattttgccttcactgcacatctagctgaagctctgtttccgtggcagtttgtggaggagatggagaggacggtgagacgtggcggattttgtgtggtttcggttgatgaatgtggtggagatgatgtaagagacattgctaggctttttcataactccaaggtcgttgatgttgctaatgtaaccttagaaggatccaaaaagactagtatactattcaaagttcaagactctcctacctgaggtgttttatttctcttttgatttataggccctttccggattctcagaaaactgcttcaatattcatagagtggagctagatttgtttctgttgaaattcacttacatgtttgaaaagcaggagatttaacagattatgtggtaacattgttcaaagaccatgaccatatttgttctggatcctaaagcaatgttttgttgagggaagctgcgatgtttgttgcgagttcaagatccagaacaaaagctttctacaggttaatatctttttttttggaagttggtctctgagctaaacaattcttaggaaccttggtcgcttttgaaacaagtaaagaactttcaacagcttttgaagactttagtgtgtgatgaaagaaagtactttctttccaggtgaggttcacgtttcaatctgttagagctctcctgtgtactatttgtgagttaagtaaaatactctttagtcattttgtatacttagaaagaacaaaattcttattggtgaataaaaggctcttactaaaaaaaaaaaaaaaaaaaaaaaaaaattttctctcaagcaagataaccaaggtagccgcaagccttgttcgtgattagttctcttcaccggcgttgctcctctgactgcctgcgttcctgattgtagctactactaaagtgagatctctccaatgaatctacttttccggtggcgtaattgttttccggcgagtctttcacttgaaatgactttcctttttctctcgaatgcgagccactctcgtcgcttaccgtcgtcttcggtcgccttcctccttctgaggccacc

SEQ ID NO: 21080 - DNA, 610 bp, Arabidopsis thaliana
agaagttagaaagtaccgtggagctagcagtcttattttcagttgtgtgctcatcattgtccaatatcaccttatcagctggccatgcaattttactccccaaagcttgcccaagtgagcaaatggttggtgtaggtctccagacatatgcatcttcgactaggacagacctcacaataatagctgctgcgtttggaccaagtcttatacgaccaatcttgtaagtttgttcaattagcagaattctccttctccaacaacaacttcagtagacgcattccaatccagtagctgacatctaactactttactatactagttgcttctgattttgagtgactatctgttggaaactgtgaagaacaaaaaagggcatcagtaaaataaagactacatcactatcataacagaggtgagaaacatacatttttgccagctaagtcatgaacgacattctgcaagtcttcaagtttgctgatcaattcagcttgtttagcttcaagctgctgcacatgtgaatctctaacttgcatgaaagctagcttagaaaaagtaacccctctgcccatccctctgactctcccgggtttgtcctttcctaatacttgac

SEQ ID NO: 21081 - DNA, 2697 bp, Arabidopsis thaliana
gtgtaagtacttttgtattttacttgtcaattaccttgaacagatcaaacaactaaccttatttatttttgttgtagtgtgagttgaccgggaaactactccagattttcttgtgctcttagatgagacacatagaaaatctgatggtagtttcatcgatagaaagtctgaggagatttacaaggaagtgtccggaaggattcaggaggaggagtcgcagatgtgttcaggagacactacggagagcatagcttcagggggattatttgttcaggccaagaacaagatttatgcctaggtaaattttctctttcaactcaataaagtttcagttgagccagtttatgattactatggattttggccattgtgtcttagtcattgtgtttcaaactgatttgattatgttgtggcttgcattttttcataacattgtgtttcggatgcgctttgattattttgcttcttggcctttgtgttatgacattgtgtttcaaacttctatgattatgttgtggcttgcattttttcctaatgtcattaagtttcagcctgctttgattatgttgtgttatgactttgtgtttcaaactgatatgattatgttgtggcttgcattttgtcataatgtcattgagtttcagcctgctttgactatgttgtgttatgactttgtgtttcaaactgatgtgattatgttgtggcttgcattttgttataatgtcattgagtttcagccttctttgacaatgttgtgttatgactttgtgtttcaaactattatgatgtatgtgtttttggttgtgttgttatatcattgagtttcagcctgctttgactatgttgtgtttttttttgttgctccaaagaagaaaggcaggatttatggtgctggttcattgcagcttgaaacatcttcagctcatgctggtccagttcttcctcgagaagatccggttgcgctctcgcaaaagctggctgccgctgaagcactcattgcaaaccaagctgagaagatcacaagctttgatgcctactttgactatcttgctgagaaggatccagaattcgctgcactgtttcgagccaggtcctctacaaggactgaaccggtcagctccagtctgagacccgaagagcctaatgccacagctggtacatctgttgggaccggagtcggagctgaggcagttgtagctgacccaagcactagatcctctccatctcaagctttctaaatttctgtactttggttacaaacttagacagttttgaagtttgtaattgtataattacttgttctgtttaacatttgtgcttgaatcttaatatttcagctttgaatcttaaagtttaaagttttcaaatgacttttcaaatataaagtttagtaacaagattaaattaagaaaatcattaattaacgctaattacaacagtaatcactaaatacaacaatattcaagcaaacattatatacaaaaaatagtcgcaattatcttgcaaatccatcgcaattattggtagggacttgcgactactctaaaagagccacgcaaatccatcgcaaattttgctagggaattgcaaaaaccaagcactctcgcaaaaccatcgcaaaatttgcgaggaagaagcgagatagttaatctgctacgaatttattacggattattcctctcgcaaagtgcgagtgtttcgcaagatactttgttcctcgcaaaatttgcgaggaattaactaccgcttccactttgcgatgcacgttttgcgaggaaccggttttcctcgcaattccctcggtatactcgttttccgagggattcgctatagattcttccgtcgcaaatgacctatttttttgtagttaacacaaacccagaaattaccgaaattatatcaaaatgtagatttaaacaagataaacatctttgctcaaagaactaaatgtaaaaacgaaatagattaagagtaattaaggtttcaagattctaaaacacaaagcaaaactacaaaataaaagcttggtcttttggacaaatcccaaagaacctatttatactaaaatctcaaaaaccctagattcactagaagacaagagacttgaggcggtttggattgatgctcgatcttggggatctagtaaagagggtgctgcaaagtctgcgccttttcctccatgctctgagtgatcaattggtcgagtagatgcttcatcctctcctattcgtatgctcagatgtctggttaagtggggaatgaggaggatccgaagacgctttgatagctcaacaagtctggtagagatagttacccttggtcgagtaaatggatcgagtagtggatcgagtagaagaggtgagtagatcaatctactgcttcatctaaggttgccttgatcgagtaggagggtcgagtaaactgcagcctcctctgtggcatcctggatcgagtaaagaggtcgagtaaactgcatcctcctgtatagctgcctgggtcgagtgaatggatcgagtagagtccttttagctccttctgcacctgaaaacataccaaaacatgcaatgcatacgcaagatgatcctagatgcctaagtatgcaaaataagctaaaattgtgcaaaatgatatgatacaatgagcaaatgcaaagctaaatgatgataaacatacacctaaaatgagtaaaatacagtg

SEQ ID NO: 21082 - DNA, 511 bp, Arabidopsis thaliana columbia
caattcagtttcgtggaaaaggtttttgtctcaagaaagaagacagtttcctaccataagcaagagtggttggtcactgaagaagacaagacagtctcttaccattagattattgtagcgtgatgtgttttgtttgtgctaccaaccagaaatactagcaactatcatactccacagaattgagattggttcaagtgtattatacattgatgatgaggttttgaattttgatcaaacaacacacaaaaatagtattgtagttggtttaagagcaatgacttggagtgatgaccagagttacttactcattgtagaaagtcaaacgtggcaacacagctttgcacgcttcattgacatacacgtcgacgaaaaaaccatatccgctcatcgagaaagtcggaatttttccgagaaaattcaaaagggcgaaaaaaagagcttttgcgtacagttttcgaattggtctcctcgtacgggtaaatcagctcaaaacctgacctttattttctgg

SEQ ID NO: 21083 - DNA, 1794 bp, Arabidopsis thaliana
tagggtttttaattgttgacacacacacgatccaatccatcaaacccagcctgatctctttttcgtggctgcgaaaaataccgtcaatcaagagaagaataagcatatctctctgcttattccccaccactttgggctatctcacacccacacccttcatctgagcatgattcttgaacaaaataatattcttcgagagaaaaagtaaaagcttggtccacataaattgtaagattctaatccgatcatgcataaaaaagttgcaaatacatatataaaacatgtgcggatgtaccatattctttagcatctgcaacaaagaaacatattgtcctgttcaactcaaaatgctcactttggtatctaggaggaaaaaagggtaggtgaattgtgattatgcaacttttgttggtccttccttactaatataatatgaattaaagaggaaaacaaaatattaacaaagtcactttaatgtacttggggaacctttagctagatctcctgtgatctctctttttttggtctctaacattcttttcttctttctttctttgcttataaatagcatatggttcaagaaactcaagtctcaggcaacactgagcttaatactgtagtacacacacacacacacacacacacacacacaaaaccctgttttcttcaaacaggaaccccaaaagcgaggtttaatctcaggcgttttcagttctaaatctctttcaatccacaagagaaggaagattttgtttcttcttctccaagaaacaatccctagattgatcgagacctccttcaagaaaccatggacaaagttgtgagaatgtcgtcagagaaaggagtggttattttcagcaagagctcgtgttgcatgtcctatgcggtccaagtacttttccaagaccttggggttcacccaacagtccatgagatcgataaagaccctgaatgtcgtgagatcgagaaagccctaatgaggttagggtgttccacgccggtcccagccatctttgtgggtgggaagctcattggttcgaccaatgaagtcatgtcgcttcacttaagcggctcgctggttccgctagttaagccgtttcaagccaatctatgttaaaaaggtgttctaattttctatactacaaaaatgtatttcaataagaaacacaaatcttatagcctatgcaacctttgtaatgtagctttatatatatattgtttgttctgtaatttcaggtaatatccaataataattgactaatttctactcaccagttcaacttttagctttcatggtactgtttcagggaaataatagaacattcttcttttatttaagttaattaagggtaataaataacattcactgctaattcttaagaccccaccccaaataaagagtacagagtatatatatttctacaaatacagagcaattacaggcaacgatttgtcttcttgtctgattcacaacaagaacagcagaaactgatagttgttgtggtgtttcatttgagctccaagaaacttggatttggattgtaagagttatctgatgaagaagacattgaagacacattaatgggatatacctccgttacttcttcagtcttctcatcaaagtagaccacatcttgcattgttagctggtgatattcgacgactcctctcagatagaggttttcgcgggtgtatatcgagttttcatgagccaaccgtgctttctcagctaacagtgtttccagttgaagtcgcacctatagatgagagaaaacacacaaccaaagatcagaa

SEQ ID NO: 21084 - DNA, 1911 bp, Arabidopsis thaliana
tgatgaagataatgatactgcacccacagagaaagaatcacaacaacaaaaataagaaataacagaggtatgcattccttaacttttgaaaaagacatgataaaattgtttaaaaaaagaaaaaatttgctttgatgttttggtttacatgttccaaaagagaccaagaaagatgatgaagatgttatacaaacaccactatctactcgagaagaaaaaatcacccaggaacagagttgtttttaagttgtttttacattcacaaatgatttgccttgagaaacaacttctaatattactatttttttttggttttgtatcactttaaagcttctcggacatgttatctagctagccaccgtctgaagatccaatagcaattaacgaagcccgcgaagaaagaaataatgttagaagaggacaagccaaatcggaaagttcgaattggagctactctaaccgatgatataacccaatattcaccgatttatctttgttttaggtataggattttgagtctttatgttatttctcgagtcttttttgtgtcttttcaggtattctatgcaatgggacaacattggagataaggagacattttggagcaaaacctaatgaaaaggaagctaaggacaattttggttcaggaatcagcgaggagtgtcgaccgacacactcttggtgtcgatcgacaccagttctggcccagcaaaaaccctagccgctttcgagtttccagaagctcaagtttgccccagaagatttctctatttgcattattagtccctagacgtttttagggtctatatatattgtttttagacctaagtttcttttatcaagtcttttatcaagttctttgcaaaccctattgtaagagacataagctattcatccattgttattcagagtttcattcagatctatatacagtgaagagatccttctttccccttctctattcactgtgttcatgctttctatctcaattatgttgtttgttcattcaatatgtctgagtagtctgcttgttaggaatagggtttctcattagggattcatatggtttagtagattgccccctttgctaggttatctgtaaaattattcatctttaactgtgtttaatgctagatctagaatagctaactagatcttgaatccagacaatagatatgcccgccataggtatctgtagttggatatattatttgatgagcctggtttgtaggtgtgtaataagaatcggcctatctaccaaggtgaacaatcgaactcgttaagaatgcatatttaggttaataatttctcggcttctccggttattcttagctatagatatatgaagtttcgcggaaccgcaccggtcattccataattagagtttgagtttaagaatggtttgataacaacctagctttcattagatctactaaccaatagtttatttaatcgtttacaacacaatcaacctgctgttttcttactttgttttcttaaaatttcaatcatcacctgctagcttaatctcgacattcaattcattgtttgacaaaagaactttgtggaaatcgatccttaaatactgcaattgatctcttatttgagagagtagttctagggaaatttgaaccatatcaacaatcatgttcaagctactacaacaattttaatgaaaataattattacctatgacttatactttccatttgaagcttttacattctggagcaagtggaggaggcgttgtgatcttccaaagatggtgattcatcaaggtgcctctgaatccatggatccatgattgatcctagactagaaaaaaaaacgttagtactacaaaattgaaaaccgatttgcagaatacgtaatattaacagattcataaaacaaactttaaatttgaaaacc

SEQ ID NO: 21085 - DNA, 442 bp, Arabidopsis thaliana columbia
tgagacaagaggtcaaaattttgattctttgaagtaaagttggaaaaagcggtcattggtaaagaagacttactagagatgagtctagaccaagagatggagaatctgaatgtatgtaagccagtttcggccatgagctgcacatcttcctgcatagttaggtaaaaacctttgataacaaggccatagccaatttttcttggtgaatatatatataacatgtatagacagagaaagaaccttatacttgtgatatccatcacaagctatgtctccattatccattttacctgccaagtacaaacatttactctctccgtttcactttaagtgatgtgtcatgaattttttttttttttactttgtattttaagtgatgttccaagtcttcatacaaaactttaatgtatttaatttttttgattatttatattctgcagta

SEQ ID NO: 21086 - DNA, 2066 bp, Arabidopsis thaliana
tgggcttaaacagtaccggaacggcttaacatctatgattgttgcagctgtagccaaaaagggccttcctaatatcaagggatcttttggttcttcatccatgttcagaactacgaagtctgtaggcacctccacatttccaatcttgataggcaaatcttctaataatccatgaggtagtctaacagacctatcagccaagattaaggagatattgtagtatttatacttgttgaaacccaaccccttagctactgagagtgacatgagatttactgatgcacctaggtcacaaaggcattcattgaaagtcaatgaacctagggagcatggtagagtgaatgaaccaaggtctcctagcttttccgagacatcgttctcctatatgatggcactgcacttatggctcagaactgttgttttctgaacctcttgaattctctccatgatcaagtctttgaggaacttttgggaatccgggatacgcgttagagcatcagcaagaggtatccttaatttggcttccttgatgttattggcaaacatagctctgtgcttatcttctaactctttcttgtgtcgaccaggaaatggaagtgggggcttataaggaggaggattgaagattttttctttgtttttgacagcaactagtttgggagcggtaggtgatgttgctgggaaggtcggtcgagtaaagtggtcgagtggcagctcgagtgactggtcgagtggctgctcaagtgactggtcgagtggctgctcgagttgtttgtcagcgtgatctgtattgagattgaaatcctccccatcttggtatgcactgtccttagtgactaacttgggtctctctctagtggataactctcttccactccttatggtgatagcatgaacattagcatactccttgggattctgaattgacttcccaggaagtcccgtaactttgggagcagaggtagatgcggattgtccttccaagtatctgactttggaattcaacgcatccacttttgcagtgaggtcactgtagctgcagtctagcttatgacgcaattcagatatctttttagcaatctcaatggagctagatgcttgtccttgtagcagctgttgtagcatttgtttcatgtcatcgtcaggagcagcaggaccttggtgttgctgaggtgcaaacacaggtggtggttgctgctggtagtttccctgaacttactgcttgggaacaaaaccttggttataaggaccaaaaagtttgttctgaccctactgttgttctggaagatacacttgaccctgaggattagcaacgttggtgctgcagtaggagaggttggggttgttggtcttgaagttgttgtatcctttgtagccaccttgattgttgatgtagctaacttcttataactggttttcctccccatcttggatttgatactgctcgtcattaacaaggaagtgcacatgcttctactggctaagaagaatcatgtccaacttgtcattcagcgctttgatctcttttttgtgtttgtcatccgaatcagctgtaactaaggaaaatttttgataagaaaatttagacggagttgtgggtaaatcaaacattaccctaatgatcattgatcaaaaatggttacataaggaattcaagatcagtttagaagtgagtagagattttatcggctaatgcgacatatcaagaagactaggatatgctattatcagcaaaggcagttaaggctatcgaggaattattaggactatcaagattcttgacaaaggatttcttatgggcaatttggttgatggaaagatcaattttgccgaggaaaaataaaggaagtgcggaagactagtttttattggagaaaactagtaaattcaggcataacaaggtttagtggagtagttaaattacttagtcatttatttttaggaataggtaatgatcattgtccgcgtacgatggtcagagatttttcggtacgggcgtgtaccgtgatcgagcgaaacaagtggtcatggatgggccatgtcgtgagtgcttgtgcagctacttg

SEQ ID NO: 21087 - DNA, 565 bp, Arabidopsis thaliana columbia
tttcgttatccttcttctttatctcccacatagactgggaagccttctcttcgtcttcagtagttgttggcttgcttatagtcttttttcgtctttgcaggtaaacaccaataggacgatgcattgcttcgtcaattccatgagaaagtggttgggggtttgaacattctgcagcctcgtcacacttccttctttttgacattccccttactatagtagagggagctgaacacaatttctaatcatggcgaactctctccaagcatgcgcaaaggtgaacttaaccccatagtcgttgtcgtagatgttgtgtgctagtgtcatgataggaacatcatcatacatattggtttcttcagtgtagctatcttgttgactagttaagagttccacaaagcttgatgcattactatatggatatgaattcatagcctagttttgtggttggagttaaaggagaatgatagaaccataggaagtgtttttggttctgtgttaatggtgtattttaagtagatcaatatataacaagatgacgagttgttctctcctttttaaagatata

SEQ ID NO: 21088 - DNA, 1604 bp, Arabidopsis thaliana
cgactaattacacctgaaaccaaaagacttgggctgaacaaaaccaaaaactaggcgagagatgagttttctatacacttaactcggaccacacttacaaagaaccaaaaaaattaaccagaagtctctctgggaggcgcaggcactgcttcgcttgagctcacactctcaccaccaccatctcctccctcaactgaactcggttgttgcaacccaataggtgcaaacaagctcacaccactcacatcccggctcacactgtatagacctctgcttccatgatggttcaaaggtgtagatgttgttgcattggctccgcttatgagcaatcgtagtgtttctcttgcacctttctcgaccagcgaatcattctccactgggagcggagggatgcccgtggatattatcccggtgggtccagcgcttaccagatagctttgacctgaagagaagatatcgataactggaatatgaacaatagggtcgcacattataggaatcatcatctgttgctgggatgatgatgatgatgagcctggaatgggtatgtggtggactaatggtaatggagggatgtcagagagatcgagcggtgatgacgggatcaagaatccatctgatcccgatgctggtaataaggaggaaagtggcggaagggaaggtagctcaatggatagtggagggaactgataagaggcagatggtgcgtgaagcgatgaagtggttggagggcaccagcaataataaggagaaaagactggtggacccatcttcaaaggaaatgggggaggtccggtcattgtacttggtgttgactctgcttcttcaaaagcaataatttgtctgattccattataattctcagtagcttcttcaacttctccttctgactggataaaaccctctacattggtggggatagaggtaatggatgaattatcaaagattgagaaatggccttcactgtgtccctttgatttatctctagaggagatacgtagagaagcatttctcagtgtgttttctttgaaggagcttgctctagggctgaggcttccttgggtctttgtctgttgagtcccacagtggcgtgctctaagagattttgatgatgcactcgaggaggaatcagctgtttcagaaaagccagaagatgatgatgaatcaggagatgggacctgacaacctttgatgttaggcaccactgaacccatgagatacaaacggagatgagaagcaacagagccaagacgtgattcttcaattccagttaattctgagattgatggcttcttcttgatcaagtctttcatctacacaggataacaacagatgatgagaaaatttagatgcacagacaaggattttaaaacaacagtatttcacaaaccttcctacgcaattcagttcccagaagttttgacttctctgagcaccaatagtaaaaagcattgccatttgcgatccttataacaaaagatctaccagagctgtccacagttatccctcaattgacaccgcagagcactgagatttgctggtataggtaaagagttgttctgaatgaccattgtctccaataaatgagagctcaagtcagatgt

SEQ ID NO: 21089 - DNA, 251 bp, Arabidopsis thaliana columbia
attgaaatgattttgtagatagtattgattgttgtcaggtgtgtaggtagttttgattatccttaagagagtgaagagtctggtttgtagtacgagggagaggatgaccgataagttggatgaagataggagtccaagagagttgtctgctataagatgaggcggacgagaagaatgatgatggtggtcatgcttgatttcctgaccaaagggactttgacaaaagggacatttgatatcagattagatga

SEQ ID NO: 21090 - DNA, 912 bp, Arabidopsis thaliana
cgccagtgccagtgtgctctaaaggttctggctgatgctgcttattatttctgcaaaaatggcgcattcactctggcgctatatctccttttctgcggaatatacggcggtttctcaaccggtgaataaaccgagccgtgtggatgcaaaaacgttcgataaaaatgacgtgcaattaatcagccagcaaaactggtttggcaaatatcagcctgtcgccgcgcaggtaaaacaacccgaacctgtgcctgtggagaaacgcgtcttaatgtggtgctgcgtgggatcgcctttggtgccagacccggcgcggttattgaagaaggcggtaaacagcaggtctatttgcagggtgaacgcttggctctcacaacgcggtgattgaggaaatcaaccgcgaccatgtgatgctgcgttatcagggaaaaatagagcgtctgagtctggcagaagaggaacgttccactgttgctgtgaccaacaaaaaagccgtcagtgacgaagcaaagcaagctgttgctgagccgtgagatgtgtaggataagtgggagcttcggcgcaagtgaaataccactacttttaacgttattttacttactccgtgaatcggaggctgggtacacccctgtttttggtcccaaggctcgcttcggcgggtcgatccgggcggaggacattgtcatgtggggagtttggctggggcggcacatctgttaaaagataacgcaggtgtcctaagatgagctcaacgagaacagaaatctcgtgttgaacaaaagggtaaaagctcgtttgattctgattttcagtacgaatacgaactgtgaaagcgtggcctatcgatcctttagaccttcggaatttgaagctagatgtgtcagaaaagtaccacagggataactggcttgtggc

SEQ ID NO: 21091 - DNA, 481 bp, Arabidopsis thaliana
ctaaagaggcgcgacttttgaacagagtaagccatcaaatctccctaaactttacagcaaaccggcatgcttaagcgccgctctgaccgtctcacgaccactgtcggtgattggtgtcattggcaggcgcacggtatcggtcgccacaagacccagttccttacatgcccatttcaccgggattggattgggttcgacaaatagtttgttgtgtaatggcatcagacgctgattaataacgcgtgcctcggcaaaatgcccttctgctgccagtttgcacatctgggccatatcacgcgctgcgacgttagccgtaacggaaataaccccatgaccgcccaattgcatgaagtccagcgcgctcgcatcatcgccgctcagcagaacaaaatcatctgaaaccagctctttgatctggtttacacgcgttaagttccctgttgcctctttgattccgataatattttttactttcgccaga

SEQ ID NO: 21092 - DNA, 557 bp, Arabidopsis thaliana columbia
gatgtctcttgttgatctcttgactcttgtatgtcgttgatggacatgacaaaagttttcttaacttcttcttgtttatcccaatcccacttcttgtctttttgaaaaacgacatctcttgatacttccaccttctcatcttctagtaagaacactctatagcctttggtttgattgctatagccgatgagaataccacactttgctttagcttttagctttcttcttttctgatccggtatatgcatgtagcatatgctttcaaacatcctcaagtgtgacacgtttggtttgtgtccacaccacttctccataggcgtcacatcatcttctattgcttttgatggtaagcgattttgcaaatacgctgaggtatataccgcttctgcccataacttgaggggtaagtcttgctcaacaagcattgatcttgccatctccactaatgatctattcttgcgttctgctgcaccattttgttgtggtgagtaaggcaaagtcacttgcctattgattcattcttctcacagaattgattgaattctcgtgaagtgaat

SEQ ID NO: 21093 - DNA, 470 bp, Arabidopsis thaliana columbia
tgatcgtgtaccaatgaagctcaagaccactggtgggctcttggcttctcaatcatcttcctccttctcgtttccgagattccgcggccaacttctgattatcttctcagccaataataatcagaagaagaagaatcttccaaatccagacgtcgtcactcattgtctccactctcattccaatgtctcctcctctcaaatcgccgtcactcgccgcgcaattctcgtcgcatcaacgatcctcgacgtcgccgcttcgttgtctctctctagttactcagctgcctctgctgagactactgaggaatcagtagctgttcctcctggtgctaccgctcctgctcctgcgcctgtggagaaggaagatgcgataacttctagaatcgcgtcatcgtgaatccatggtcggtgagccgatgagtgttgggaaagataagaagagagtgagggagaagctatcgaatgtgagg

SEQ ID NO: 21094 - DNA, 556 bp, Arabidopsis thaliana columbia
cctgactaagctgcacagaacttattccaacaatgctcactatgtttccattacgtaagttgacaaaggtattgactagtgctaggaaatctaagaacctatctctattgtttgacacatgatgagtggctcccgaatctataaccaaagaactagtagagataccaatttcagatttggaagaagtaagcatgtgataataggtagagggataaagtgacagaaatgtaccagatatcggtttgatatttggcacggaagtagaagtagaagcttgggaaattgcaagagtaggagtgatgctagaagtgcgacgtgtcaactatagtaagaaataatatcttgaagctgatccatactcaaatctttcccaaggagatctgaagctttacatactgaagtagtaatgcttgaagaatccagagatgtgacatttgtactcggagtggtgatgatgaaaaggacttcttcttccctgtccatccaggtggataccatgaagtctatacacctttctttaagatgccaatagcccataatgagtcaaacatgacga

SEQ ID NO: 21095 - DNA, 569 bp, Arabidopsis thaliana columbia
  unsure (1)..(569): unsure at all n locations
nnnnnnnnnnnnnnnnnnnnnnctaaagcaccaaatgttccgtgtttcggacattccagggctggacagcgctctctgatatgctgcctggtcaggggctgctgcacgtcgtcccattcctgaagctatggcgtacgtactgttacgtccgctgcttgatgatgtgccggagatgaactgtgcggcgtaccccggaagagtattgccggtatcagagcaatggcatccactgttgattgaggcgttaaccagcattccaaaactcgaagccggagactccgtctggtggcactgcgacgtcatccattccgttgcccccgttgaaaatcaacaaggttggggcaacgtgatgtacattcctgcggcaccgatgtgcgagaaaaatcttgcctacgcgcacaaggtgaaggccgcactggaaaaaggcgcatcgcggngcgacttcccgcgcgaggactatgaaacaaactgggaaggacgctttacgctttgcgacctcaacattcacggtaagcgagcgttgggcatggatgtttgagaattaatggaagtgaattgatgtgggatta

SEQ ID NO: 21096 - DNA, 485 bp, Arabidopsis thaliana columbia
gactctacccaaagattagaaacttacaagatcagacttgattagtgtttccttctctatggatttgatatatacgagtttcgatatgtgtttgtatattgcatagtagtattattatttttgtgatgatatatatgtgtgattctaatttttgaatattattaggtttcgcttatattttagtctttgatgtataaaatttgttacttcacattcatatatttcatgcatgaaattacattctatttttcgtttgaagtttttaacgcaagaggcagttgatggaagttaaaaatttcattcttattgtaatatgaaaaaaaaaaaaaacagaacagagaaaataactcttaagtttgtgtcaggagtgagtgacataatgtcttcggtttcccaccgacgtaactgaacctgaaacgtagccgccgctgccaaaaactcaacgcattgcggtggagttaaaatgtctaatatacctttaagcg

SEQ ID NO: 21097 - DNA, 502 bp, Arabidopsis thaliana columbia
ttgacaattagttaaatattaaactaaaatggttttggttttacatttcaatgacttttagccaaaaccgaaccataattttaccaaaccaaatttaacattctccaaaccaaataaagaacctgtataaaccgagcggacacttaaaccggaaaataaaattaaaattcggacaaagaaatttcgttaaaccctaaaccccaaaggtcttgtttgctgtatctcctccatcgctcctgcgccgcgttttctctctcaagctcttaaaaaacctttctttgatttgataatcctaaaatcgtttttccgaggaaaccctaatttcttgttcgaactcgaaagatgggaattttcgaaccgtttagagcaataggttacataacgagtacggttccgttctccgtccagcgattgggtaccgagactttcgtcaccgtcagcgtcggcaaagctttccagatttataatgtacgctcccaatcttcatagttcacttgcgtgt

SEQ ID NO: 21098 - DNA, 520 bp, Arabidopsis thaliana
cccccttggacaatcgttcctctactgttcatttctctctctctttctgaagcttttttcaatttcttagatctactttgtttttcaccttcgttcttcatggtaggtcctagatttgcaagatgatgcaggagtgaggcaagcttacttctccgacattggagtggtgtggtttttccgtttagcgtggcagcggtggtcctttcttggcggacgagaggcttctcttccaagtcttcctggttatggatgtcagtgaagatcggtggagtctttcttggctcaaccgatcggatagaagctgtagttgtggcggaagacgctgcggataggtgggtttccggtgcgtgtttgatgtttaacggcagatccagttttggatctgagatggcttatgcgggatttggttgtggaggggttgtctgagccttcacccttccctaaccgccgtgtttttgtctccacggacgagattgaagattgctttgcttctggaagatttcagagctacggttttgga

SEQ ID NO: 21099 - DNA, 546 bp, Arabidopsis thaliana
gtcgactcgataccatcgtcttctagatgcagtcctcgagataatgctattggcattcatagaatgatcgttgtttcttttgcgctttaaccttcgcttggtttcttcttccttttcatcaacaaatgctaaaaaagtctgtagctttgttaaacgtgaagattttggtgaaggtatagcttcttctactactacttcaggtgtgtctttgcagaagtcgcggattattttgaagaagtggataaagagagcgacgagacaggctatcccaaccacaaggaacataccccagaagctatgcacgttgagctgttctgagtcacctgactgagacccatgcgggctgctgcagttggatttcgaaagccatcggtcatggatcttctgaagctctccagtttcggatagaccaagaatcgcggttgacatgtcaactgctaaaggagagtctcttgggaatgcctttttgaacagaaaatgcaaaaatgtgatcagaattatgttcaaacatgctggtaaagagagaagatattcagaagatggatg

SEQ ID NO: 21100 - DNA, 567 bp, Arabidopsis thaliana
ccaagaagatcgatgaaacaaccgcgtcttgcgtaatttgctgcttggcgaagaacagagagttcactccagtggacatcatgccgggacgtcgatgaagatcgttagagagacgccgacgtcggcgattgtaagattcaaagcgggaagtgtggaaccggcgcatcaccacacattcggccatgaccttgtagtcataaagggaaagaaaagtgtgtggaatctgagcaagaaggagagagctgatctcgttgacggcgattacctattcactcccgccggtgatgttcaccgagtcaaatatcacgaagacactgagttcttcatcacttgggatggccattgggacatattccttgacgaagacctcgaaactgcaaagaaagccatcgaagaagaagcttgaaggtgtaaactttgtgtagtactctcttcttttgaatgttgtaagttctgagagtaaactttcttaaattgatgtactttgtaagaacgtttgatttcaaaagatggtgtaatattacaaatactttctcttatgaacactatataaagggttctacatat

SEQ ID NO: 21101 - DNA, 522 bp, Arabidopsis thaliana
tctctttaggataggtcctgaaaggagcacaaaagctgttaagctccgtaagcagataatatatatggttgatgatgatatgagagaggtacatagttgctgagctgttataataccagtgatatgattaagtccagcaatgcatatattacattaggtttgtgatcccaaattctcgttccaagaatctaaagacaatagaatgtgatgaaattagtcagaggaaggtaattaaggtatgtgtgtgtaatagatagatagataaataaaagttacaagttgaagaaggtggttatggtgaacgtcatctaagcaagcaacagagtgtgatagaattttcaagagtgtctgcaaagcgaatgagaaatgaagattgtcttagttagcaacaaccgaaaaaaagaaagaatggatttgtcataagacacacctctcgctgagccacaacatcgacatcatcaggcacctctggctgtgcatagcatcgtcaccagatttctctttttgatgtacattactgac

SEQ ID NO: 21102 - DNA, 650 bp, Arabidopsis thaliana
gtcttgtgggcttaccgcacgactcctaggtgttctactggggagactccattttctttagtcagttactccaccccgcggtatccacaaggaaatggtcaagctgaagctgcaaataagacaatcctaagcaatcttaaaaatcacctgaaccatttgaaggggggatggtacaatgagctccaacctgtcttgtgggcttaccgcacgactcctaggtgttctactggggagactccattttctttagtgtatgagatggaggcagtagttccgaccaaactcaacgtgcccggactttgccgaacagaagcacctttgaatgaagaagagaattcagcaatgcttgatgattgctagatgccatcaatgaaaggcgagatcaagctgtaattcggattcaaaattaccagcaggcaacagctcgatatgatgaggccaagatcaaaagtaggccttctttgtaggagattatgtgttgaaacgagtctttgacaatataaaggaaaaaggagtaggaaagctcggcattatttgggaaggacttacattattcagaagtggtttggaatggtgttataggttaaaggcttagaagataggcaatcgagcgtccttggacgtggcaatgtgagaagttttatgttagt

SEQ ID NO: 21103 - DNA, 510 bp, Arabidopsis thaliana
caggtcattgctgataatgtcggtgacaatgttggtgacattgctggtatgggatctgatctctttggatcatatgctgaagcatcatgcgctgctcttgttgttgcctcgatctcatctttcggaatcaaccacgacttcactgccatgtgctacccattgctcatcagttcaatgggaatcttggtttgtttgatcacaactctctttgccactgacttctttgagattaagcttgtcaaggagattgaaccagcattgaagaaccagctcattatctcaactgttattatgactgttggtattgctattgtgtcatgggttggcttaccgacctcctttaccatcttcaactttggaacacaaaaagttgtcaagaactggtaatttccttgtggatgattgcttttgtttttttcctgcatttctctattcaaatttctcgttgcacttttttaagtcttgcattattttggatttcaggcagctattcctttgtgtttgtgttgg

SEQ ID NO: 21104 - DNA, 497 bp, Arabidopsis thaliana
  unsure (1)..(497): unsure at all n locations
gttcaaatatggcgacatgcctctcaggaacaagctccagtattggttaaagtgggatggtgtagacttttggttaacatatgatgtatacgtttcgtttgacttagcaatcaagagcctagacttgccttgtacacttttgcttaacaatgatgtatatgtttcgttttgactaagaaattaagagcctagacttgactagttaggttgggattttctcggatcggtctgaggactatactataatcgaaattttggtctactatgcagattttgatttaaaccaagattttctccaaaaggtactccgaatccaaatgttgctttagatgagctggtgaagatcaaagagctggtggacaaaggccaactcgtgaccattcccatctcctacaagctagagacatccgatgtgagattgcttaaacaagagtttggtactaacttcaaggttctagctgatgaaagtgagcaccccgagactanaattgggagac

SEQ ID NO: 21105 - DNA, 1856 bp, Arabidopsis thaliana columbia
gggctcacaaggataacatgatcagcctaatatcttctaaatctgtttaattttaccgtccttttttccatgattaaatcatttcactattctcatacatatctcatgcaacgacaagagcagccttttgacctttatcgtagcacattcctcactttcacccatttttgtttaatgtatatccatcaaatacagccttgatactctctttttgtatgaaaggctatttcgttttcgttgttttgagataaagatggacaattaatcagatttacagatagcaaataatgtggactaaactagatgaaaaaactactatattacatttttgttttcagtttatatactactgcatgtattacatctttaggcataactacggtccacaacacacagattcgaggataaacctacaacgacccacctctgtttattttaagataatttatttttgtcgacgaagaagacttcttcaggatttatatacattatttattgttaccactatcgcagctctgattatcattgtttttttctttatataataataacaataaataatggtattatttataggcaataaaggctcgacatgaaatttgaaaggacccaacgttaggaaaatcgtaatgtaggaccacccacccactttgtttatattttcttctcttctttgggatcactctcgtgaataagaagcgccacaaggagcgttttgttcatttttctctttcagcttcataaaatactacacacttcctcacattattcatcctctcttttcccatttcttgtgttcatataactcaaaccaaaatataccgtctctatctatctaaatcccaacccatttcatataacgtcaaagaaagtttcttattcagaaaaacaaggcgatggattttgaatttgatgatcaagaacggttttgtgcgactcctaagcttcctttgttctcgattccatttaacagagcatgtgacactccagggctagcgacgccgcctgtgaacatcgctggatcagtaccttttctatgggaggaagctccgggaaaacctcgcgtctctgatgagaacaaaccgctggcttccaagcagaacgaaagagaaggaggaggaggaggagtcgtgcggtgccttgagcttccgccgaggctattttttccagccgatgatgagccatctccgaccacagttcttgatgggccttacgatgtacctcgccggtctttatcagtgataaggagaagcgaaagagcctctgagggtagattcgagttttcacgttccaccaatagccgctgctgcgacggtggcggcggtacaacggtgaagattagtagagttagaagaaaaggaagcctcttgaatctctctcattccaaatcgcaattcttggtaagttttgaacactcatcaccttttctaacatcttatttttagctgtctaattacacactcttaccgggtagtttactagtaactagcaagttaatcgtattcttttgtagtcaaaggtagtcgatgattcagaattgcaaacactataattttcgttatcaaaaaaaggaaaatacattattacgttgttcaaagtaccaaccgttttatcaaaaatttcaaactttattcaatgatttctaactcaaaacaaaacttcaacatttttgggatttgaataaatgtcccttttgattaaaaagtttaggttttcccttcaaaagtctttggttactctatatagtatggagtgttttttcaatatgctttgtttttttcggcttgtgcatatgaattcatttttaggctcattttgattacataataataaaatgcaggcaagggtttaccaag

SEQ ID NO: 21106 - DNA, 477 bp, Arabidopsis thaliana
tcgaattcataaaaactgtgacgttttcagcgggaaatgggtgagagatgaagtctcccgaccactgtatgaggaatgggagtgtccgtacattcaacctcagcttacatgtcaagaacacggccgtcccgacaaagactaccagttttggcggtggcagcctaatcactgcgatcttccctcgtaagctcactctaaacgctctgttttctctgtttcatgggttactctgttttctctgtttcatgtgttgctctgttttctctgtttcataggttcaacgcgtcactgatgctggagacattaaaagggaagaggatgatgtatgtaggaaactcgttaaaccgtggaatgtttgtatcaatggtttgacttcttcatcgtcttaatcctgaagatcaggaatcgattaaaaccaatggttccctcactgtcttcactgccaaggtaaacctatctacttaaacttattcaaaa

SEQ ID NO: 21107 - DNA, 943 bp, Arabidopsis thaliana
cgtcatgagtgattgtatattgctttcctgaggtgccactgtctgctcgcaccaagtccatagaagttgttcgatttgtagagagcaaatctctgatggtctcattatatatctccaacatcgatacctacattttaaagataaatttgaaaatccaacaaataaagttagaaaaaaggtgatgccaatgaaatcaatcagcaatattggatgaaatgtacacctgcatcttgtacttccagccttgtgcaccgagtgattgactggcttggaatatctgttcaagtgatcgagggatcagtcctttctgatctggcgcctcaggccggcccatcatggtgtaggtctttccagaaccggtctgaccgtaggcaaagatacaaacctgtatccaaaaaatatttaagatagaggcatcaacaatagaacctggcttcaaatttgacacttaaaaaaggagccatatctacacaagcactctgtgaacaaacacgaaatactccaacactacttcaagcgagttactctaactagaaatatttaacatagcaggtatatccagagtacgtaagttaatgaagagaatagaccttatagccatccaatgcactctgtacaagttgagatatttcaaagaatacttcctcctgggaagcttcgtggttgaaaactttgtcaaaggtgaaaggatgtttgttccctgttgacatatagaacagcacgaggcaggaaaaatgatttaatgtctttgagaatagtcattcatagcaaaaagtaattcaagtcaggaaatagtcataccactctgaaccaaatcaacacctcttccttgggcttctgttgaagtaggataggctattacagttgcttcatgtcgtcctccatcgtctggtaacaagggacgcactcggcagaagacacgtatattccttttaatcctgaa

SEQ ID NO: 21108 - DNA, 607 bp, Arabidopsis thaliana
tcccgatatccttggcaaaggtccttcaatggaggcccgcatagaccagtgttgccgataaacgctgttggtcctctgttcataagagcaccggtttgaggaatgggaccggagagattattgaaagtgagatcaatgtaaaccttttcaggaagatctccaagggcaggtgggattgagccggtgaagtgattatgagagaaatcagcagttccttgaaggttggagaggtttccaatgtcgctggggatggagccgttgaattggttgaaggcgaggtcgagtttctccagagagacgaacgctgagccaaacccatcaggcaaaggaccagacaagttgtttctgctgacatcgagtgttttaagtctgttgcattgcagaatcgaaagtggtaacgacccgttgaagagattctgtgacaaatctaaggtctgaagaagcttcagcttaccgatctcttccgacaatgacccatcaaaggaattgccgtaaaggactagactttggagtccctgaagatggaaaagctgaataggcaacgacccataaaacctattgctccggagattcaagtgacggagactggagagaaaccctagagacg

SEQ ID NO: 21109 - DNA, 2424 bp, Arabidopsis thaliana columbia
gagagtaagtttgttggtttgctttctggatttcaattagtcggattgatttgaatctgtagtacttaagcaatcctggcaataaactctagagatagatcataatttcagacaaaagttttgactcaataaaaacgattatctaagttataatgacacaactgactcataagaaaataaaagataagttagtaactgactcccccagacttaaataacactggccccagacttattaagccagaggaatcgaaagaaaaataatcaaaagataaaagttagagaaacgtgagttgccacttgagagtggtgtcgatcgataccatgttggtgtctatcgacactctggtcgttttgcttagctttgcgaattcagctcatttttgtagagccttggttagtgttttcacatggattctctagttagactgttaaatcactaaaacacacatcaataggtccaacaaagcataggaaaataagtgcaacaaatttcaaaacaaataacaaatagtttgaaataaagcaagaacaaagtcagaaaacaaagcaagataaggagggtggctagtcctcatgctctgagccggaggtgggtgcgagagagcgacgacgatgacgagtgggagcaacacaacctcatcgagagagtgtagctatggcattccaaacgctcttgaagttgtcgacgacgtactgctgaaagacatgtggctccatcgggataggaggaggggaaggcagctgatatggcagagctgaagaagaagatccaactctcggacccccagcaggatcaatgaactcgtcctcagtctgtgtaggcacagatcttgaagataaacctctatgtcgcctggtgcgtggtgctgcatgcataagggaaggatcaggacaaaaactgagctcctcatgctcgcatgtaatctttgtaagcgcggtgcaagacaactgaatcatatggtctcatgtctcgtctctgaaacaccaaagtaagttgtcttttagctagtgagatttcttgagataactctcatccatagtgaacctcgtggtgttgacctcttctccctcaaagctgatgcgaaaatgctcaaatatgggagtgagaagactgccaactctctctaatttcttccctctacctgtaaagggcttggtcttgagtgagaccaagtgatgagcaaacacagcgccaaagttgacattgcggtcaacctcctcaaatcctaagctgtctggaaagaagtcatgaacaacatgatagagcaccaacagctcagagagtctcatctttccaggctccatcttgcaaaacagtgtgctactaatcagcctaaccaagtatcttagaacaaggtgacgaatctctgaatgtactgcgtccttggaatcataaattccattgctaaatctgctccagaagatctgagcatctttaaactgtccaggcagagcaactccagtgagatcattgtcaaaaccatagatgtcacataactctctcagtggtagactgtatcttacaccgcgaacgaagaagataagggctccttcctgaacattgagtttcctgtcattcacataatagaccctaacagaagccatgaattgtctaactagctcaggatacagatcgtactacctagaacagatggttccaaacctatatcatttagcaatcctaaaacagatttctccatctgcaaaccctgcatcaaaccaaaattcgtaacccgagtaggcaaaatttctacactcatctaggcattatagaacaaagtgtcataatcatcccaatctggagaaaagggcgattgatatagtcacctttagtgaattccttgttgatatctttctcccaacccctttgagaaggaattctctcttttggatgctttggccatggaaatcgatgaataggaggttgaggggctgcagcttcggattccggttgagaagggctgcgaccgacggcggtggagaagcgtcggcggtgtggagggacggtggaggaggaggaaggtccgacgctcttcctagccttctttttctggcctgtcatcttgtagatcgatggaattgatacttggggaagatagagggtgagattctattgagtttagagcctgaaatcacgagaaatggtgaagaatcgaaggatctatggaggttttagtgaattcggcggttttgagaaaaatgaaatgaagaagatgaagttttaggttaaaacgacttacctgaaaaatgagggtgtctatcgacaccatcgcgtttttggtcgacacgctttttttatttttttttaatctgaatatttctataaaataaaaaaaatcctaagttagaaatcaaatgaatgaaatgaataaaaggagaaatacttaccagtgggttgcatccactaagcgcttgtttata

SEQ ID NO: 21110 - DNA, 1635 bp, Arabidopsis thaliana
  unsure (1)..(1635): unsure at all n locations
ctatcaatacaagtaaaagtcacattattattggttacttctatgtacatacaagtcctcaaagcacaattaagtgccaaaataacttctgttgtttcagaagaaaaaagattcaccgaaatttgtaaagtgagatataacatgaatagatattaactattcagtaattaacacctaatggtgaagcagcagcagcgagcgaggctctcttcacgaatcttcctttcattcgtggtcttttctctgcattcaatttacgtacctcgtaccgtatcttcttagaaaacaaccttgtcctcctcttctctctgtatctcgaaactctagcttctctacctccatctccaaacccacttgatggtaaacatccaccaacgtattgcttctgatgagtactttctcctccattctccacctaaaacatattatttcaacttttagaaatttgagaacagtaaactcacttttatttgaattctataagaatgaggattttaaataacgtaccatggaaaaggctggccaaccgctgatgtccatgtctcgttccggtggctctcctgaactccacggtggaccttgacctccccaagtggatatcaccgagtcatagtttaatcttagcatcagaacattcttatgttcttcctctttcaccttaacaacacattcaccactactttcaacgttcttcattacctcttcttcggacgtcttgtgtgacgactcgtaatcaaagcttagctcaaacggtactgttccatccacgtcttttcgatcatcatcaaatatatccatgctcatggcttttatctcttctacttcttcttcaatctcatctttttcgattttgaacatctctgaattagataaccctagctcctccatggcatacgactccgtgtctaacccgcgaccgagcagagtctccacgtcagcagcaaactcctcaagctccatgtcggtcgggaaaaatccattaagacaactttcagcgttgtcttcctcctcctcgatcatcaaaccacttctgatcataggaaactcgatcttgggctcaacgacatcgttcaagaactgctcagacaccaacggatctagaaccggcacttgacagatcagctgctcttcaagctcatagttgtctgtctgatcctcaatactaatatcaggaaccaagtcatgaaatatcgacgaattgtttttcttaccagagccacgtggcgttcgagctttacgagtaaacccgtgatgccacgtggcgacctcatgtggaggagaagctgatgagtggttgctatgctttacgaccgccgggctagccgtcttcaaacggactctctcgtggcggcgagcaagagggtttgctgaatggaccaaactgtcgcaagactggcaaagaaaagcatcgtcggccgcgcagtaccaccgtgcacgtctcttcacgcnagtgtcgcaagccctcgccgtcttcgctccaacagcattcgccaaacttttcatcattgtatacaaagtctacacaaccaacatcaacgacaagagcacgagagctttggttttgagatcaatctcaattattgaatcttttgctctctgcaaaaagttagatttagtgtagtcctagagagtttg

SEQ ID NO: 21111 - DNA, 1655 bp, Arabidopsis thaliana
cataataacttaatcttgatgtcaaaaaaataaaattaaaattttttcgtaaacaatggttagagaatttttaaactcattttaaagttgtatacgtgtacgtgtatctcaatattatcgtttatgtttaagggtttagtttaaaatcttgtttattctcaacaattttaactcactaacaaagatgtacgtacattattatcatgtacgtacataacatttttcaaaagtaagagaaacaactatactttgaccatatatttttatttaattattatatatgaatagatttatggagaaaaccccaaaagatattttatctaatcaaaataaccaaaggtttctaatgtacaaactcaataaatattttgtttgccgactttacaataaaacaaaatctaacatgtttatttctattttaaataatattttatttattatcatttgaagacaattcacgattagcaatatcatataaacatatgtgcgtaacggtaataatatatacgtacacggtagtaatgtgtacgtacacggtagtaatgtgtacgtacacggtaataatgtgtacatacacggtagtaatgtatgtagtaatgtgtgtgtacgtataccgtaaattacatatacgtacattttttttaatgaagggtataattgtaattttgcactcatcttcaacctctgcaaccctaattttgcagccgcttgttaactcattaacatctgaaactcctcgccgccgactactcttcttcatctgcgccatttgagtatgaacaataattcaagaaaccagaaaatcctctttttgttattctttatcacgagctcgatcgaaatttcctcaacttaagcaacgactagaactcgcacagagcctcaatcgaaatttcactttcgatcggagtttgtgtttcgtcggaattgttcttcgtcttcgacaaacagtttttgatttcctttggttgtcagaaagttaataacgtgtttttgatttaattttaaatttaaattttgtaaccagaaaaataaagaaacgaaactgaaccgcctcctttcatttctcgttccagggcaaatttgtccatttttggctgaatggctaaaatctggttgggcgaacccactttgtcattttgtgaaagaaaaagtcagaaaagtgtcgaagggtgaaaatttctttatgttttattaattagtactaatgcatgcagatacacagcacttgtagaaaacaatatcgtccaagcagcaaaagacatgcaaagagtcatgtcaagatctcatatctccgacgaagccacgacggatccacctcctcctccgccgccaccttcctacaaactcttctcccgctgcttcttccgcctccatggtcgcgacctcttcgcagcctcctttaattggttcctagtagacattgtcttctacacaagcaacctcctcctgtcccatatcttcagtcattactccaagaaaccttccactgcagaaaactctacgacgcagcctttgaagtggcggaattaggagccatcatcgctgcttgctccaccattcccggttattggttcacagtttacttcatcgacaagataggtcgtgtcaaaatccagattatggggtttttcttcatggccgttatttattta

SEQ ID NO: 21112 - DNA, 2183 bp, Arabidopsis thaliana
cacaaactctccacttcccgtttttcttcttgtctacaaccgggttggctagccattcagaatattggacttccttgatcagaccagccttcagcagtctttcgacctcgttttgaacagccttggcacgatcagatcccaaccgcctgcgcttctggcgaactggtttaaaagtcggatccatattgaatttgtgacaggttaccttttgagcgatcccagtcatatcctttgtggaccaagcgaaggtggacgaccttgatttcaggaaggcaatcagcttttccttcatctccccctctagttctcttccgataccgactgttcgggatggctctggcatgttaatattgacttggatgatcttgcagcttgacgtctttattgattcacgagccgggcgtttcgagggagtagatcgcactttgtcctataattgctataagatctccttcctttgctgcttcttttcgatcgcgtaacaagtccgggagaccttttagttaccgtacagggtgaagattcccgttgctattgggaacttcaaacacagatggtaggttgaggggatagctctcatcgagtaaatccagagacttcccaggatggcgttgtagatcggttccgaatcaatgacaacgaacttagttttctgggtgatgccgtccgcctggacaaggagcttaatttctcctatggacatcttcgcttctccatcgtatctcgtcaaaggccggatttttggcattatctttctttcggagatccccatctttaagaaagttttcaagaaaatcaagttgaccgagctgccagtgttgatcaagacccgctccacatcaaaatcttccattactagtttgacgaccagtgcgtcgttatgcggatgctgaataccactagcgtcctctggtgtgaagacgatgggctcttggcttagcggtgcagcctctgggacgaccctaacgctgcatacttgtcgtgctcttttctttagagctgacactgaatcttcatcgtcggacagaccgaccatattcgtggaaattcttccacgggggtggtctggagctcgctggggttgttgtcccctccatctttttgaaggccccgggagttcattctctagggtcctgaattcctccgcatgatcttcctcttggtttggatgattctccagcaagtgttgtcctttgttcgcgtgttcaccttgggcatgtttgaaatcgccccattcttaggacaatacaaattttttgagttggtcggtttggccaactgttgaggcataatgctgacgtggctcctggaagtcaccttcgggtcataatgctgacgtggctcctggaagtcttcccgcgctctgtcttttattttgggtggttgagacttccccgccaacttagcgtcttcctcttcaaggggcatgggtggtctcccgtgctgactgacatgatggtgtagccctgggaacatggtgttgaccctgttggactgtgcgtccgtgaagtcgaaggtgaggccacgcggttgaattgatctcggcggtgttatcttggagtttggatgttgcgggattccccttactaactcgtcgaatcggcggttggtttctgtgacagcatcggagagatctttagtcatggtggcgaagatggctttgaggtcctccagagagaaagctggtggagcgatggttggggtgacaggatttgcctcttgagccattcgatcttcggctgccttggcagctaattcagctgcggcgaagagggatcttctccgttaaggagggttgactctgtaccgtcgccgttgattggagggatgatggggtcatcgatcggtagcaacgtttcttcttgcgggagtttcgaaaagagcgtaaagagaatttctttatattcccctacctggcgcaccaattgatgattctgtaaaccaaacgatgaatttatactaagggtttagataaattcacttctctcttagctcttatgtaatcggaaactataagaaaagaagaacaaggttgcttaatgatgaagctagggttttcgctttaataaaagtaaggtttttgtattaaggtgcagatggattgaatagagaacaaatccatctatttatacaatactttgatcgtctaggaaaatgcaaaccttctaattatctaaggcttg

SEQ ID NO: 21113 - DNA, 1948 bp, Arabidopsis thaliana
taatcggtggctagctaaataacaagttctcgaagcttcttgatctccctgaattgtttccactccgctcggagttgggaatttgaggcattggtgataagtagaggggaccgctttcatttggtagatccatagagttccaagaatgatgttataggctgctggtttatcaaaaacgacaaaatccacaatcttcgagatctttccagccaaaactggtagcttgattgttccgagagacattagcgattcgcttgtaaaagccactaagggggatggcggtcctaccacgtcggccctgcttatccccatcctttccaaagtgctaagaaaaattagatcgaccgaactaccggtatcaatgaggatcctcgatacttcgaatccaacgtaattacaagtgcatcatcatgaggtctttcgagatgctgtgtctccttttcctcgaataatatcgaagtgccttgaaagtctacttcttcacttaagcttgatttcagatgaacattgcgtctatgtttcttgattgcgctaatggaatcacggcagagtttagatcctccaagaattacgtttattttaccatttaaagttcttggttcctctttgccagccggtcttggtcttttagagttttgagcctctgagttatcccttgattcatgatattgcttgacaaagttctccatgttgaattttgaaatgtctccactggcccataattctgcgatatgccttttaaggatactgcagtctttggtcagatgtcttgtgactctatgtatatcgcagtacgaggtttcatctcggacccaggtatttgaccttcctttcccctgaaactgctttccgacgttgttattgaatggttgtgaaccaaacttccttggtccctgattttcccgaggttcgaacttctttggtggaaaagtgaccgctagttttgcttgcttatttctttttgcgaaaatttctttttcatcttcgacttccatccaattgtttgctcgaaacaatgcatcctgaatagtatcaggcttatgaagtattagatcttccttaaacctcgaatcatgacatagtcctttttgcaaagccgatagagccgactgttgtgagatccttgggagctttgaaagcacgtttttaaatttggtgataaaagcccgaagtgtctcattcggcccttgagatagattccagaggtcggtatcgaaatgctcttatccatcagaattgagtattgttttaaaaatactgccgatagttcgttgaaatttctaatcgatcctggttccaactgagtgaaccacatcagggctagcccacatagatttttagagaaaagcttgcaataccctgcgtcttcatcggcttcgtttagatcaactcgcccagcggctattagaaaagctgcgagatagcctttcgggtcttccaaaccattatatggttctaagttgagtttttgataatctctgattctcaaactcgcaattcgcgggtgaacggtgttcgcctagcctcctcgataacttggttgatgtctggctccgaacttgtagcttgatggaatttcgacctcatttctttgagttcccgacttacttctctcatggtttcgagctgatcaaagttttcttgctcgtgctgatcatcgaactggttatcatctttaggatgcgtttctccatattccggttgactattcgcgtttgtaccatccagggtcgtttgatcgcttgttgcatttcgtggaagggagtttggggatccgaagatagtccttcgaactctagtagaatttcccgcatttaaagaacggacatgagacggaatggtactaacattttggctaagcgatacctgggttgtttgcagtgtttcgacggtttttccacgtttgaaacttctcgccatacccatagtttgttgcatggcttgaggg

SEQ ID NO: 21114 - DNA, 660 bp, Arabidopsis thaliana columbia
cgtaattcttccaaatgccagtggtaccatcaaaacttgcagtggccaataactgtcctgagggtgaccaagcgcacgacctcacagttcttgtatgcgtctcttccaaaactgtctgaagattcacaatatacaatcaataaatctttctagagaaatagcacaagaactaacacaacagtcctacaccatatccaaatcaccagtcgattccatgtttaaggtcaagttaatctctttagtgaatcgaaacaaaacccacaaattgtaatgtaagactgatctagagaatcaatagatttttgtgaattgaacttgctaggtccaaaaaaggctagaactttcttgcgagaaagagaaatgagatagagaccttgcaagtccaggagcgagagagagagctttgttcccagattcgaacagtgttatcgccactgcaagaagcaagaatcggtgaaacaccgtcggcgtgagaagaaacggggtccaagctacctccaaacacgatcggtgtggcctctagtttctgaatctcactaactccaagttcttctccacaaatccatctatgacgctaggctacgagaaggcacgagaaagttgaaaggagtagcttttagggctgacagagattgtgcacagggtgactgaactatatat

SEQ ID NO: 21115 - DNA, 2239 bp, Arabidopsis thaliana
atctaaggttagtagagtttgcatacaataatagttttcaagctactattggtatgtctccctatgaggcgttgtatggccgagcttgtagaacaccgttgtgttggacgcccgtgggcgaacgtcggttgtttggacctacgatcgtggatgaaaccatggagagaatgaagttcttaaaaatcaagttaaaggaagcccaagatcgacagaaaactacgccaacaaacgtcgaaaggaattggaattccaagtaggagatttggtgtacttaaaggcaatgacctacaaaagggcagggcgatccacctcaaggaaaaagttaagccccaaggtatgttggcccgtacaaggtgatcgaacgagtaggggcggtggcatacaaacttgaccttcctccaaaactaaatgtgttttacaacgtcttccatgtgtcacaattacggaagtgtttaagtgatcaagaagaaagcatggaagatgtacctcccgggttaaaggagaacatgacggtggaagcatggccggtacggatcatggaccgaatgacgaaaggtactcgggaaaatcaagggatttgttaaaagtcttgtggaattgtggaggccgtgaagaatacacttgggaaaccgagaataagatgaaggccaattttccggagtggttcaaggagatgggtaaagatcaacttgatgcggattcgaggacgaatccaattcaagggggggagacttgtaacgcccgcgatcctcaataggatcgttggctaggacttgatccaaaagaagaaggtggagtctcggacaagtgagaaggagcaagccataagctcagacaaaggggaaatcatgcgggctaagctaggatcataaagaaatcagctgggtcagctcgcccaaagcttaagttcagctggaaggagtgacggttactcaggtcgagttacagtccagctcgggcagctggacgagtgacggttgagctcgaggtagctggacgagtgatggttgagctcgaggtagctggacgagtgacggactagctgggcggttatgggcgaagagatacaactcttcggaaaggtgcaactcttcggaagggcgcaactcttcggaaaggttcaactcttcggaaaggtgcaaggaacggatgtgttgattcgggaagcatccatttgccccctatataaggaagggcgcccaggaccattccactcaccacaacacaccgaaaacacaagaaactcaccattaaaactctctccctcttgggagaataaatagtcttaggattcggtagtcgggctgtggccggcaataaagaaggagggtcggatcgacctaaggaaggtaagggctcctagactttgagtctaagggttctaggatgtgagttagtagtcggatccttgaaaggatcgattagagggcttggtagtatccgggtcatgtgcatcctatacaagactcggtccgggtagggatcggctgaggcggggacgcggctcggcggaggaccggtgggtcttaactgacctaccgagaatcggcgggactgatgcgcgatcttcccctctctgaatcctctctactgatccgagtagtgtatggcatatagagcattgcatggacttgcatatgactaagtaaatgagattacttatggctctatgactttcaggaacgaatggtgatcgtgggaaggacttggcttaagcgcgagagactcaagaccgggatgatgggtggtgatagttcggatagtctagggatcgattatatgacttgtaatagcttatatgcaaactcataagttgtatcgaatcctttactcaattaataaagtatcttattgtttgtttactctatttgtctcaaatattgagtcagaatcatatgaaacggattacactagcgaatgaacctcataaatggttggggtcaggtcacttagtgatttgggtcgagagatcttgtccagacttaggtagtctggatcggggccttttagaggcccaataagacatgaaggcacttcctttatggcggaatgtgacttatatgacttaagacactcaggaaatttcttctcttggcgtggaaagaggcatgatcatgtggtgcactgctgtctaaatcgagctatgtcaaatggagcatgggctgaaacttaccctgcaagttgctgtgcttaccttcgctttgaaggatctgaccatatacgacttctcactcacttt

SEQ ID NO: 21116 - DNA, 1063 bp, Arabidopsis thaliana
gaatcgttttaccatcctctcaatgatggctgctttctcgtctaggttggactgtgtttgaaatcgggatcctgctgaatggtcgagtccaaccactgaaatttcaatctgagtagaaacctccccgtcttgaacatcactgtcctcggtgattgatgtggagacatgtcgagtaggcagctctcgatcatggcagatggtgatagcgtgagcggtggcgtattccttcgggttctgtatggactttcctggaagtcctgttacttttggagcagaagttgacgctgtttgtccttccatgtatctgaccttagaggtaagtgcctcaagtttgatattcagatcgttgaaagtacaatcaaccttgttgtggatttcggccatctttttggcgagatccattgctcctgcagcttgcccttggagaatctgctgtaacatgttcttcaagtctgaatctggagttgttgaagctggttgttgttgctgctgtgtgaacccaggtggtggaagttgctgctgatagttgccctgatactgctgcttaggaacatacccttgaccttggttgtatggaacaaagggcttgggttgattctgctgctgtgaagggtagacttgatcctgcgggtttgcaacatttgtacttctgtaagacagattcagatggttctgcttgaagttgttaaaacttttgttgtaacctccctgattttgcaaatagctaacttcttctgattggagagtctctccatcctggacttggagcgtctcatcatcatagagaaaatggacgtgcttttgttgcacaaggagtaacttgtccagcttgtcattcaaagctttcatatccctgcggtgcttctcatcagaatgagagctggtgcggatgcttccatcgtaatcttcattgtagttgccatcagaatatgccaaattctctaccagctcccatacttcttcaacgtccttgttgaggaagttcccgttagaagcagtaccaagaagcatcctgatttttagaaggacacctctgtagagggtgttgagaagtgaagctttg

SEQ ID NO: 21117 - DNA, 1984 bp, Arabidopsis thaliana
gctatctcatcattatccccgatgcatatgcaacaatcctaaatgaaacactctagactcgatcttaaatgtaatacaactacatgaacactcttttttttgtgaaatcattttctgaaaattttcaattttttttggttttcctatgccttagatgaatgcagactcaaaaatatacacaatgcaacacacacttcctgagccctcccccaaacttaaatcacacagtccactgtgtgaataaacttggaagagagtactgtggacaaatccaatcaaagaaacaaagtaaagaacaactcacaacagatgatataatacgatggtgaagtgaggcgcttacctcagtcgaagaatgaacggagttggtcgtcaatggctgcctgtgattgctcccaggccatagacgaaccgccctgttccgtatcagctccagcaggtgggtactcgagctcataagctctgtggcgcccagcaccgctctgaggatacccgacctctcttcttctgatgcggccagcaccgcggtcaagtgatctcctcgagtgaattatgtgtgatctgctgctagatcgagtgagtgtagccttcctccttctcttgtgctcccgggattcgaatgacgaatgcctagccgggacatgtgagactctctgctcactaagctcaggcctgtgctcaggcctgtgctcaggctcatcaaatctcctcgatggcatctctagaggaggctgtccctgtggaatagtagtagcggaggaggaacaactcagcttatctgtcagaaacttgatcgtcttgaaacacttggcgagcagcttgtcctgcttcttgcacaacttctgcagtttactgttgttcctatgagcttcactcaagctcttgctctccctcgctggaggtacatgctctctaaagtgatacatgctagtgtcgaactccactgctctgtcttcatccatcccatcctcagcatcctctcctagaagatcatcctcatccaatggcggacgttctcatagtagaggcgtccaatctcaggccgaaaatcaatgttatctccctctattatccgtgtaacctcagggctagggagaaggatgttagctctcttatctgtagagtgctcaaacctgaaccggtgcaagtcgccaaccattacgaactctaggaattcgcagtggcgtagatgctcgatatccattgcccatggctcgagtccatcagatgtgattgtgactccacaagcgatcagaatcggtgtcacaacaccacctatgcacagagcgcctagtgttctcttttgttattgccgacagcccagctcttgtatccacacagatggatcagaaaaagtacagagagaggtgtgtcattgatttcaccttggagagacatgccgttcttagtttcgcgaagagttcccttgagagccatagcgatcatctccatatcagaattacttctgtccttgtgatctctcaggagtagagtacattggctatagaacgctggaagtacctgatgacagggctacgtatctgattgctctttgacctggaagaattcagtggtatagagctgccaatggtaatccacaagtctttcaactcttctttgtcatacttgggcttagtttccgttccattgggaaaccaaacaatccttccaagcgcttgattgataacctatactcatgactatacacagaaaatctcaagaatcccaatccttcacaatccaactcagcagaggtcataccttggtagagctccacttgcattgtggagaggaactgaattgtctcttcttcatatgctacatatggatacgccatcagagtgtccagatgacaactctggtacaggtgctgaacatcctccaacaatctgagctgtgcaagtgtggtcgagcatggatacctcgtgctacaaaactcattcagtttgaagagcctaatatattcctcagcaggcaatacatc

SEQ ID NO: 21118 - DNA, 591 bp, Arabidopsis thaliana columbia
gaatgagttttttaattctaagactgagtgggaacagcgagaacttcatttgatgctatgtgtgaagaaattggaagatggaaatttctctgtgcaggaagaacttagcaaagtgaagaatttgcttcatcttaaggaagttgaggcgtgtgcgcaaaagaagaagatgccaaaatgcaaactaatcgtaaggaacttgaggaggagattaaggatctgcaggaaatagttgaagtagcgaaacctgacagcatgaaacttaaagaaagcttggtggagaaagaagatgaactaaagaacactgctgcagaaaacagaaaactcagagaaatggaggtttcttctattgataagatcgatcagttgtcaaaagtgaaggaaagcttggtggataaagaaacaaaactgcagaacattattcaagaagcggaggagctcagagttaaggagattgattatctcaagaagattgaagagttgtcagcggcgaaagagagcttggttgaaaaagaacctaactgttgagcactgttcaagaagctgaggagcttagaagaagggagcttgcttgtctgaagaagatttgagagt

SEQ ID NO: 21119 - DNA, 601 bp, Arabidopsis thaliana columbia
acatatataatacgacaattgactgattatgtatttatattatagaataaaaactgttaaggacgacgaaaatagggaaacattttggtcattattcattcataagtttgacatccaaaataggtaaatagttattttacttaatatgggggttaaagataaatgcaaatgaaaacagtgaaatcttctaatccgacctcttctctctcctttggctaatcacaattaattcggcttcacaatctccacaaatccctactctcctcatagtcatacatagaagagagaaagaataccattagtcataaaacctttgcgtaaatctcgccaagattttattgtttccataagccgaatgcaagtaaattacatttcttaatactctcaacagtaaataacattttctttcatctccacagaagtaaaagagtatgaagagaacaagagacctttatggtgatgaatcttcttcatcggaatctgaagagtttcacgggaaaaaatccgggtgaaggtgaagttacggaagaaagaagtgaagatgaagatgagtccctcagcctcagaggaagcacttttgtgtgatttgtgagaagcagtt

SEQ ID NO: 21120 - DNA, 598 bp, Arabidopsis thaliana columbia
tctatgggtcaagtcaataagtgcccgcctcgatgttttgacatcttcattgtctgtttcaggtagagacccgattgcagctgctgctagattcgcatgttccatggctaattctcttgccctctgtattcccttgctcttcccaagatactctaaagcctgtgtgatataatagtattagagactatgaaaacatattatagattttaggagatttgtttctttcaaacttacaatgtcaacattcctaggatctttttcaacttgatcaacaacttcgcgtagttgaggaaactcttccatggcaaagaggattggggctgttatgactccatggcgaatatctgacaacgatccctttccgagagaggcagatgtgcccgtgaaatcaagaatgtcgtctattaattggaatgctaaaccctgaaaaattagaagttcatcaaagtactgtaagaaaattagttgcaatggagccaaagttttcagaagaagacaacgaaccagattcctcccatactcaaaagctaacacggcaacttctgctgtttgtccagtgagacggcaacagctttgcagctgttagagattagcgatg

SEQ ID NO: 21121 - DNA, 543 bp, Arabidopsis thaliana columbia
ttttaatctgaaaccatgcatttgtgttcgtattctttgttgtttataagctctgtgtttttatctttggtgaatgatctcgctcttaagtcttaacaactctgatccttctctcaaatgggttgtctgatttctcctgtaatgaaactccgtcgtctctcctcagccgactcgcggcgatttgcataccggaatctcgccgagaatatggaagatccagtcataagggtggtggtagggaaggagaagaaggagttcatggtcgaaccgtatgtactcgaagagtacccgttcagagtcttgataggttcagctaaggatcgtgccaagaaccggttaaaccggaccggtagagtggtgtggcttgatcatgtcgactcgatcttatttgagcacttgctgtggcttcttcggaacgatgcctctacgttttcggatttggatgttctcgagatcattgaattctatgctcaagattgttagggaaagaaatggattaacagtgtgcttttacagttttacttttcagtgaagatatgatca

SEQ ID NO: 21122 - DNA, 2220 bp, Arabidopsis thaliana
caaacaaatagaatgcatcagggtcataggacgaaaccaagttcttaaagaaaaataagtggtaaagccatccaggcataggttctatagaaatatggtaaaaccgtccaggcacaaagtcttaagataaaagccgtcctaccacgaatatttactcaagctgttcgatcaggagaactgtacggcaggcaagtacgatccagactgatcgggacccccacctaatccgcaagagtctcgaccgatctattacctcgagggcttagaggagctggttcaggagcaggggctttgagctcttccttcagttcagatgtgagacgaacaaggttgacctctgcatcggcgaaatccttcagccactcctcgacctgttttttctcggtcgccaaagatctgccatcttcaagcgccttgatcagttgtggattagcccacgcttgggacaaatacataaactggtcgttagcatcctcgaagagcaacatcttctcctcggccaccctgaacttggcggtgaaggcctccgaagttctcgccttgctgtttgcatagcccgagccactttcatgttcctaagtcctctcgcctcggcgagaagtcgcctacaacgaacaacctcagagtccatcttcaggtcgcgctcgaccatcttgatggcattctccttattgaccaaggcttctttctcagcctcttctctcgccaattttccctcgatggcctgggagatcaccaagtcactcgcctgctcgacctctttcgccctggcctcagcttcaaccaacttattaaccgcctccagattgttttgcattgccgagttataggactggaccatcccattcatctaaccaacggcctgaaacaaaaagacagacatccacgttcataatagctcggagaacgcgccaagtagctaaaatgattaaggcacttacccttagaaaatgtgacgccgtctcagcgtactttctagactccagtagagtatctgaagccggaagtaggctactcgcgcactttctgaggagattcgccgaagcagccttatcctcaaaaataggaggcttgtcctcccttttcgctgccttcttcttcttcttcttcttcttccttttcttctccttggagtcgtcaacctgtggacgttttcccgaggccttgtcgccggtcggaatcgcgacgatcgcttgactagctacttcaaccggcggatctgtcagagataagccggtatcacccacctcagcaggctccgacgcggcaggcaaaacaacctcaagagtaacttcccaatccctggctgtatcgggatcgacattcacactctcggcagcatgtttctctttcgcgacacgcttctcctttgcggcaagcctcttcctctcataaacctcccttattgtaggtttgctagtgtgcatgtcgatgaagaattggggtcggtgatctgaagattctgagctggaggggcaagaaacgccgtgaaacaatcgaagcgctcgttcaacatgctctcgagagaaatgctttgtccagtggcacttccgggcggataacccttgttgatacgagaggagatcttcgggacatggctcaaggaatcaaattgggcgatctgcgataaagtaaagtatgtaagcaaaaaattatatcaatcacctcgggcacgaataaataaaccataatatctaaactacccaaaagtccccattttgtcggaactttcccgaggagatcatcgagaacaacatcttctaaagccacaaagaaaaagtagtcggtgtaggcatcatctttgctcgggtaaccctcgataatgttcctgtttttagcagaagagatgtagtatctgtctgccatggacttcgagacttgccggatctctaaataattccttagatgtgcaagcgtgaccttggttttggtctcatagccacgcaccaatatccgaatgagatgcctcaaagatcgggccgttatctgagagagggctatctgatacgcggtcgcgtactctaggactagcctcgggatcggcaaccagagaaagcaaagataaaagaatcccttgtacaaagtgaagaaaccttctggaggactgtcggcgcgctcatctgggcttggaacgcgagagtaacttcgtcgccaaattcgaacctagcttttaagtgtgatagcgacgctcggtgcataaagacgagcgatgaggatttg

SEQ ID NO: 21123 - DNA, 619 bp, Arabidopsis thaliana
attgtctatcactgaaactagagggcaaactaaagaatcatttggagatacacaacccgcatggtaagtatcacatataacttctctttaactctctcactgtggcttgaacatttatattgaagaagaagaaaaaacaaatgactgtgttttttaactttaacaatggtaaaattgcagggattcgagaaactgaaggagctgatagatacatacaaaggagtttctcaatgagcacaacagagatcatctttcgttttataattcatgtaatgtaatgtctctgtctgaactgttactcttcggtaactctgatggagaacttgttctcgttttggtttgattttgtaccctcttttttttttttgtttttttggattgctttgtctttgattggataatgaagcattactgtatcaaggctaattagcccatcaataagcctttttaaagctctggatatggaaaagtcagaacctctctctcttatctctctaaattttagagagagagagattttgttcgatgttttgcatgctttaccagcttatgaatccggatgtgatccggttttgtcgatctatctcgctgtcctatctcgccgtccggtgtatccggt

SEQ ID NO: 21124 - DNA, 469 bp, Arabidopsis thaliana columbia
cataactggaacaaaagcaacaagattacatctgaacatgaagaagacaacgaagacaacaacagagagaataaagagtactgttatgattctgactctgatgatccttacgcaagtgatcatttccggatgttcgaattcaagatccgtcgttgcactcgtagccgaagccacgattggactgattgtccttttgctcatcccggtgagaaagctcgccgtcgtgaccctcgtcgctttcaatactccggtgaggtttgtcccgagtttcgtcgtggtggtgattgtagccgtggagatgattgtgagtttgctcatggagtcttcgagtgttggctccatcctattcgttaccgtactgaagcttgtaaagacggtatacactgtataaggaaagtctgtatctttgctcattcgccacgtcagcttagggttctcctccggagaacgtatccggtgtctcagcgtc

SEQ ID NO: 21125 - DNA, 312 bp, Arabidopsis thaliana columbia
acaagttcaggtcgagatacgactgttgttttctatgggtggacgtggcacttcccgttttgcacgggttcgtgtctgagagagttgacaagatggtggagagtggaatggttgaggaagtcagagaatttttcgacttttcgaactctgattactcaagagggatcaagaaagcaatcggatttccggagtttgacaggtttttcaggaacgagcagttcttgaatgtggaagacagagaagaactggtaagtaaagtgttggaagaaattaaggaggattccatttgagtaacctggtagccagggggaa

SEQ ID NO: 21126 - DNA, 616 bp, Arabidopsis thaliana columbia
  unsure (1)..(616): unsure at all n locations
nnnnnnnnnnnnnnnnnnnnnnntaaagtagaaattgttttacaaaaatggcgatgcaatctgcggcgcggggtgggatgatagcccactttcgaaagccgattcgggacaattgtcccgaaatcgcctctggttcaggtatactgacagaccatttttatctatttgattcacccagggggaaaacttgcagggtaaagcactccaggattttgttatcgacaaaattgatgacctcaaaggtcaggacatcatcgccttagacgttcagggcaaatccagcatcaccgactgcatgatcatctgtacgggtacgtccagccgtcatgttatgtccattgctgaccacgttgtgcaggagtctcgcgcacgggccgtgttaccgctcggcgtagaaggtgaaacagcgccgactggattgtcgtggatttgggcgatgtgattgtccatgtcatgcaggaagagagccgtcgcctgtatgaactggaaaaactctggagttaatgcgtgaagctgcaacttgtcgccgtgggaacgaaaatgccggactgggtacaaactggttttaccgagtacatgcgtcgttttcgaaagatatgccttcgagctgattgaa

SEQ ID NO: 21127 - DNA, 570 bp, Arabidopsis thaliana columbia
taaagtcatgaaagtatcatcataatagagagattgtttaaaaaactttacaagattgtgaaaaactaatcaaacacaattataaaaaactctttaacaataatttataatctttcatttctttaatatatatgattttatcaaagtcatcaaaaattttggtaaattaaaaaccaataacatttgtaaaataacaaaatacaaaattagacaaaaaaatatgattcaaaattcattacttttattaatgtttttaaaaggggaaaataacaacaacaattgcaaaacaaacaaagaagcttaaaaaaacaataaattcaaatgatacaaagtccaaatcaggtaaaagagccacgacatttgactgaaccacagagacaggtcttcttgcctttataaagaagtacttcatcttcttcgctcctctccacacatgaaactccatagtcatatgttaactctgtcatcggaggaatatgcttcatagcaaaaagtccgataagaagatatacatcacctctgttttcatactcaataggctgccagaaaacattcggtgaacaactgtga

SEQ ID NO: 21128 - DNA, 1135 bp, Arabidopsis thaliana
atctaatagaaactctcgagcaagttctggactttttgcatgcttttgtggacgagagcattccccatcgagctcattcccatctttgtccatcatgtcttcatccttttataacataggaagcacagcggtatcgtttataaagtggaaagaataatattcatgtagtctgaaacatttgagaagtttaagttaaaaagtgtatgaatccggaatctacctcttcttcctcagcctcttcagcatgctcaaaaaaccttcggatgctttcacctctcttgattgaaacaaagccatccccaactactagcctgccgtgaacacagttttgaccttttaatgcatgggctttggcggatacttcagaccagcggccatctaatttataagctctaagggtaatgtagcatgaatttaaaccacgaaggtttaggccattgacttgaactctcccattcatgccaacattttcaaacttgaggatatcacattttccttctccggatccaattgcccactcaaagtgatggtactttccagcattctcagaaaaagtttcccgccagtctgctttcaccgaatcaatggatacctttaatattgcaattatatttgtagtcccatctcgcaattagtcctcataagagaaatagtaatatacttttcgaaaagcataacgctagactataggaacccacaaagatgaaaaggttaacatagataaatcacctcatattggaatgttgtattggcaacacaaaaccatgtggtacaccgaggttctctccgcattcgtttcagttccttaagctctttgaactcacgaataacgtttcgtctgcagtctctacaaaatctcttgctgtcgaatctgtaatttgaaagatccatttgttattaagccgagcgaaaaaagtctcgacatgaccagacaaagaagagtcttgtattgcatgacttggtaagaacatcttgaatagtccagacaacgaaatgcctattcatcttgcaattcaaaatgtgataacttgagtggtaacatatcctgttagccatgacccagatcatgtccaaaaactttccgactcaatttgtgattgacaacaaggaattaatcaattagcgacatacctgt

SEQ ID NO: 21129 - DNA, 550 bp, Arabidopsis thaliana columbia
gttcaccgtccagtcacttgcttgttctccttcaatcaaaagtcgatttccaacatagtcctttgcgttgtgatccaagtgccactaatatcaggtacattaatgttccacattcttctatctttcactctcttttgaaagagtcacattttctgatagataaattgattctgcattctccaggcacagttttagcgagtttgctaaacctgtttcatcgaaagggttatgcatagaagatatacatttaacttcagatgacttagagatgtacatagatcttgctccatctgtgaatccgtctccataagttgttcccgaagacatgtccttgacaaaggtgggcagaagcttcgattatgtgttatctgagacaccaatatccatcatcatttgttgagaatttgatatgtttcgattagggtatcaatcttttccggcaacttgggttgagacatctattcgttgtccccgtcctcccgtgtgataggcttgatcacagaaaggatttactgattgaggtaagtagatatcacacatcgacctgttg

SEQ ID NO: 21130 - DNA, 492 bp, Arabidopsis thaliana
gtactatgaagtcagttattgagtatttccaagagatgtatggattcacgatccagcacacgcatttgccatgtctccaagttggaaaccaaaagaaggcaagctatttgccgatggaggtaaaccgtaaactgctggtttgtttgtttcaagacttcacatttcagctcttggctattttcgctgattcaatttccaatgtaggcatgcaaaattgtcgagggacaacggtacacgaaaaggttgaatgagaagcagattactgctctcttgaaagttacatgccaaaggccgagggacagagaaaacgatattttgcgggtatttttttagtcatgtatcttatatggttctttgtgagttagaacttagaagtgaggattaatcttgttgtcaaaaatgttttatagactgtccaacacaacgcatatgatcaagatccatatgcaaaggagtttggcatgaacataagcgaaaagttagcttctgttg

SEQ ID NO: 21131 - DNA, 928 bp, Arabidopsis thaliana
aaaagtatcaaaagattataatttttgtgggacacaaaagaatcataaataaacgtttataccactccgccgtaaccctaagcaaaccagtggcaaaaccgtaaatccgagattaggcagagaagaagaaaaagacaagaagagggaggagcacggcggcgacgaatgagaattgtgaccgggaaccaccgttgggaagaaaagggtaagagtctggaggaggcatgacgcaattgtctccattaaagtaaatccttcgtggaaaagcccaacctttctcgaatgtgaaggttgattggtctttacggaacaaaatctctgattgaacattcccaagaggacctgcttctgataagaaatcgttgtagaacttcactccccataacatcgccgtatcgtctgcaaaaccaaaatgttaaatctttgagataagctggcataaagagaagagaggggctttgtgtgtgtgtgtgtgtgtgcattacttagtccagcgtaaggagtaagagatttgtagttgaagctgaagatttgagtgatgttgtcgagatttggatgttgagcaacaaggttccattgtgtgtagttcaagcgatagttgaagtttgtgattgtgatcttcacacgccaatactctttgtagttctgctttacatgccaatgcactctgatcgggcacatgtgtctcgtgcattgcactaatggtggtaaaaccgttcctttctttgttggtggtgacacaaccgaggctaagtgtggtgtgtccgggctgcaaatacataaaaagtgtgggactttatgattgaaaactgaacagagaacaagaggaggaaactgaatattggtttgaactacttactcgaggcaggcaccggattctgttctgttgttttgacatccgcaagcacaagttggacatccaacaatg

SEQ ID NO: 21132 - DNA, 577 bp, Arabidopsis thaliana
ccataaaccaaactgaatggttgccagctttcctttgtccctctgcaataactgagcagagcgcggatccccagcattctaaagagagttagggcaatgtttgaaaaggtaagatctctctgtgcacttatctaatcttgtgccattacaggcatttgatattgatgtgcaaaacttcttccttgtatcaggttggtctggactacgacgagtctgttgtgataagagtaaccggttgtccaaacggctgtgcaagaccgtacatggctgagctcggtctagtcggggatggtcccaacagctatcaggtacggttggagcacaagctcttgttactagtgatgagacagtatagtagtaagcaagcaggctaatattctgagttgttgtcggttgtgcaggtttggctaggaggaacaccgaacctgacccagatagcgagaagtttcatggataaggttaaggttcacgacttagagaaagtctgcgagccattgttctatcactggaaactagagaggcaaactaaagaatcatttggagaatacacaacccgcatggtaagtatccatataac

SEQ ID NO: 21133 - DNA, 612 bp, Arabidopsis thaliana columbia
  unsure (1)..(612): unsure at all n locations
nnnnnnnnnnnnnnnnnnnnnnctaaagttggcctgggcgataactatcaacaaatcaacgtagaagccgcgctggccgatgattcctcggtgttttacacctaccaaaagttaatcgcactgcgtaacgaggaagccatcctgacatggggcaattaccaggatctgctgccaaacagccctgtattgtggtgctatcgccgtgaatggaaggggcaaaccttgctggtcattgccaaccttagccgtgagatccaaccctggcaggcagggcaaatgcgcggcaactggcagcttgtgatgcataactacgaagaagcctcaccacaaccctgtgccatgaatttacggccttttgaggctgtctggtggttacagaagtaaatcttccctaagccccggtaatgccggtcattccggggttttgtctgtcagtatgttgtttttgttgatttttcaacagcaaattcattaaaaaatttacatatcgctgtagcgccgtcatccgtacgctctgctttttactttgagctacatcaaaaaaagctcaaacatcgttgatgcaaacactatatatagactttaaaatgcgtccaacccaatatgttgtat

SEQ ID NO: 21134 - DNA, 543 bp, Arabidopsis thaliana columbia
gtaaccatgaactgcaaattaaagggctaaaaaataaaggctaaactgaatttacttaaaatagaagaaaagaagaaagtttaggaaacatttaaacatgctacaaatccctctcctttattctcatcaccaatttcttcctaaggtaaatttatcccttgaaaccaatttttcatatatttcaaagatgccagagacagaatattcgtttggaaggtcattccttagtttgcgccgagaccaagcacacttaatggatccaacatccttctctgagcctatgaccatggaggtagagttagattcttttcaaagacaagttgcggaaaaattcatcgatcttaatgcctccgcggatgaggctgagatctctcacttgaatggatagggaaacttcttgattcttttctttgttgccaagaagatttcagagttataatattcaaccacaaacctcagctcctcaaacaaccaatggaccgcatgatagaagaatcttcgagaggagtgtacagctcttgatgtatgaatgcgatacgtgat

SEQ ID NO: 21135 - DNA, 573 bp, Arabidopsis thaliana
acctcgttgagcaatagtgctagcagctaaagcttcaagctcagttcctatctcgtcaatgatgattgtctcaggcatatgattctcaaccgcctcaatcataacctgcataaagaacttgttaatacagcaagatccttttgattccatcctacaccatattattacaaggttataaagttgcgagacatacatcgtgctgtaaattcacatttggaacttgcatccgcctggcacgaccaattccagaatgaggaacatcaccatcacctccaatctcatttgacgtgtcaacaatcactacacgtttcctgtgttcatcagctaacatccgtgcaatttctctgtacaaaacaaaccaatcttgtcatataccatttatcaatcacagttttaacagaaagatcatcacattataagttcatattgatgtacctgattaaagttgttttgccaactccaggagatccaatgaccaagatggatcccctccttcaatcaagtctcttataatttctgcacttccagagactactcgacccactcgacatgttagaccaattacttgcagtt

SEQ ID NO: 21136 - DNA, 562 bp, Arabidopsis thaliana
ttctcaggtggacattgattctgtccgagcagattggagtcaatattttacagagaatgctggatatcatcatttcgagtgggctattggaacaggagaaggcgaatctgatatcctcgagttcaaatatgtaggcaatgatcggagtgcccgagtcaatggcctagaccttcgtggattacatgaatgctacattactcttagggcatttaaaaaaaatggccgcccctcagaaatatctgtcaaagcccatgcattgagaggccaacagtgcgttcactccaggcttgtggttggggatggctttgtttcaattaaaagaggggaatgcattcgaatgttttttgagcatgctgaagaggctgaggaagaagaggtaaattgaagatttataagctttgtgactgaaaagcgttcagatatttacagttttgcagatatgatatctccttgctgaaatataattattttgttccaatgcttctataaggatgaagtcctgatagacaaagatggaaatgaacttgatggtgagtgcttgcgccacaaaagcatgctaaga

SEQ ID NO: 21137 - DNA, 539 bp, Arabidopsis thaliana
ttctaaattaaagacttctattttcttaaccccgtatggttttaaaaccagtaaaagataagaatgtgtataaatatttgaggttataagggtcaataaacaaatctgatctatcccgtccttgaatctttactctccccaaaaatattcaaattacaaaaaacactcgttgtaattaccgtctaaggatcatatacttcccaagaatattactcgctgtatttcggattgaaagtctccatgcggttgtcctcattacaattctttctttcatttttttgtataatcgtgtaattatgttgtatctaatgtatcactttgatttgtaaaaacattaagaaaaaaagagttttcacacattgtaagttatgacttgtagagaagtttataagtctatagtctctactgcaaacgtcttctaaacaaaactagtaaatgaagaagtttatgaagtcagtaacataaactattaataaataaacaatttattaattaaatatccttactgattgtcctatataacatctcttgtttttttt

SEQ ID NO: 21138 - DNA, 474 bp, Arabidopsis thaliana
gtaacgtccgccagtgtgctctatagttatattgaaatatacacaatctatttaatttatacaaattattttgttatattgatatatacgcaatctatttgagtataatcataacaaattttaagctcgaagcaatggtgaatgaggagacatcaactttggtgacctaacatgttcctcgtacctcatcgaagataaactcagcttgagattcttttgaaaactcttacgtttcttgttctcccttttgttgttgcaaatgcagttacagttcttgttcttgttggctctgtctccaaccacaaagtctttgattcgttcaagtgcaatttggagtgtgtcttcgtccatattagcaaagcagactcggaaccaaccaggctcagagcagtgaaacgacgagccaggagagacattaatcttgaccttattgataataactcgccaaagcgccatttcggaatcaaatgtctg

SEQ ID NO: 21139 - DNA, 591 bp, Arabidopsis thaliana
gtaacgtaagggccgccagtgtgctctaaagtcgtagatcatcgtcatcatgagacatagaacgaacctgtcgttgcgcgggacctgtccagcgtgccgaaagtctatttgttgtgttgttgcgtttatgcggcgatggtcactgtctcggtggcctggcggacagcatcgacggcggggcggcgaacgataccaccggtaacagggagctgagagctgatgccagaaaggaaggtatcaacctcgcgagcgcactggcgaccttcgttgataccccaaacgatgagggactgtccgcggcggcaatcaccagcagcgtagacaccgggaacgttggtgccatagtgaccagggggggtcttgacattcttacgggcatctcgctcgatttcttctccaagaaggcggtcttcagggccgaggaaacccatggagagaagcacaaggtcggcagggaagaactgctcgctaccctcaacggtcttcatgtcccatccaccagtggcgctcttagtccattcaacacggacagtgttaatgcccttcacgcggccgttaccgtcgtcgacaaactccttagacatgatgcag

SEQ ID NO: 21140 - DNA, 1792 bp, Arabidopsis thaliana
gggttggcgtcttgccatcacagctttttctacttcgacttcgataaatcggatagcgcgatgtagggcatcctctagtgttgccggctgggtgattaccaagtcttccctgaatcgcgattcgtatgagacagcgttccgcagggcagcgattgtggcatcatcggttatagcaatattggaaacaacctttttgaatcgttcgttaaactctcgcaacggctccttgtatttttgagacatagtccacaagtcagcattagaggcacccttaatcatgaatatggaatggtgctgcaagaagacggccgtaagttggtgatagttgttaatcgtattggcctcaagtagcgaaaaccagttgaacgcgtcgtcaatcagattttctatgaatatctggcagctgcccgtgtcgcattcttcgggagagaaatgattgcggttgattgccaggctaacagactttagaaaaatcttcgggtcggtgagaccgttgtagggaaccagcttaacctttgttatgtgtcggacgcgaacttccgaaatgcgtgccgtgaaaggagatctttatgtttcttccaatacttctccagttccggggcagagctaatggcacggtgcattttggatgacatgactttgatgaccgtgttcatgcgttcgatttccatgttgcgtgtttggtcgacgttgtcggaagatcagttcagcaaacttctgttgctcggtaggatgcggtcgttcggtagattctcacggagttgcccttcaacagatcctacgataactgatgccggtctttgtcgccagttttcggaacgttccgcagcaggaatttggggagatggcaggcgttcatgatcatcgcgaggctgagagtcacgtcttcggcgtcgtaaccgttcgatctgactttgcgaagcaacttgcgctgcaacaagggcatcgattcgttcggttgttcgtgcgtcttgaccgttgagtcgatctaagatggtttgcacgaggtcatccaaatgggaaccttggtttgaaggtgcagcgtcgccgccaagcgcggtgtctcccactgcggctgctaccccggcaggacgtggttcggcgcgtgcgggattcaggcaagcttgagcgggtgctgggttctctggtggcagttgcattgcgtcaggtgccggctgttgttggctggcgtcagatccgttttcgctcgatgtgtctgtcatgtcgtcttcggttttgtggatcgctggggacatctacgctgctcgccgttctcgttctgtgaaagaaaagctttgaactgtcccacggtgggcgccaattgtttgtaccgaggttgtaacaatgaataagtaagggattttcgggaagacgaagtatcttttattagctgacgaacgagaaaggtaaacaacaggccggtcgaatagttacaagtgatttctatcgatcggcaacgtaacacgactcgaattgagaacaaaacgaaccgtgaattaaaacgaaccgagaacaaaacgaatcgagaacaaaacgaaccgaagacaaaacgaaccgagaacaaaaacaaaccgaaagacaaagagttttagtccgaatattgctctgattctctgggtattatcttttgtatcactatttcgccaatagtgcattatttataggacaaacctcttaacctaaagattcttctactcctcctgtaaattaccgttttgcctcttgtgtttaataggctaatttgttggagacaacaagcccattaaacacttaagtctctgtttgagtcaaa

SEQ ID NO: 21141 - DNA, 2226 bp, Arabidopsis thaliana
ggtgcatcttctcggcactcttttgtagttgtgtcgcctgagcttgaagagctgcttcagcgtgtgcaagcttctccgcaagtagaacatgatcttcagctggaggtggaggacccgctatgggcagaggctgcttcttgctgcaaagaaccaacaccataaattctatttttctttctcggagcaacctgccaacaaaacaatccatgtgtaagctttgattcaaaactaacaatctttaaatcgatggagcattacaacaagtaaactgctaagcatacatcctaactatttgcatcatcatcatcaaaatcagccaattaaatatgaagggcaataaaaatctgtgaactaactagcaataataatctatatatgcaagtcaggtcaacacagctacttacactagttttcagacacaacaaagactcaaagaacaactgtttttcagacacaactagcaataacaatctctatatgcgagacagaagaacacaactacttacaactattttcagacacaacaagactcaaagctcaagctgtttttccagaaacaaaacaagactcaaagaacagcaacaatagttattccagccagacaacaaagactcaaagaacagccataatcttaactttaaattttacctctgtgtagatcttgttctttgtatgaatcgacagcccaccagacccactactttcattctccccagcacaaagctcagattccagctcttgtatccttgatgagacttccttgtatatggactccgactttccatcagtaaaagaaccatcaggctttctatgagtctcctctacgacttgaaggaaatcaggagttagttcaccggttttttcagactgcaaaagagagttcagagttaatcagtcaacattagtggacataagttcattgtctgaaaaagtaactgaaacaacttacatgtttccgggcacgagctttaaaagatgtttgccctgagcggtgtttagatatgccggtaccatcaggatcatgatacctcgctttacgactgttgatactctttgcttctgatttgggatcgagccaaaacttaacaagtgcagcccatacctcaggatctatccacttcggctttgcatcatcacctatttccctccactttcccttccagcgacacacttgatcacacatcctagacttcagcttgctatcaaactcacttctaactcttgcatttatagatctgccccagttgtatgtttgcttaaaaaaaaagaaaattacttagactgtgtcaaagcaagacaaagagaaaagacacaaatgactagtgacttaccgcaaaggtttcaaaccatctgtctatcactttactaggggtctgtgtccaattggcatgaggctctttgaaatctttttcaaaaatgctgcgaactgtggcagccacttccccatcttcgccaaacctagaaagaaatcaacaatacaattagcatataaaagttcttgaggttcacagctttaattgaaggttagagaaacttgagcattctaagtgttttagtattctaagtaaatctgcagtttagaaaaacctctttatcaacttatacaaaaacgactacctttctcaaaacaataagatgagtatttatagctttacatctacaataatattttacagccctagttgtaacattgagtttaacaagcattcaacaaacaagcataacaatcatttactgacagagacagacaaaactaacatctgaccaagcattcaacaaacttaactagctcaacaaacaagtttaaacttaactagtttaacaagcatttactaaaaatagaagttaatatcttaccaaagagtgcctggaggacgctttggatgcagtttttttaaatgctcacgaacaggactaacgagtaactcatccaaggttagattgttgagccgtgaagatggtggctgagacgtttgattggccggtgaagaatgtgaaccactggctggtgtagaaggagatcctgtggctggtgacgacggagaaccactgaaaagagcaggtgaactggtggattgagcaggcgaaccggtggattgagcaggcgaaccggtggacatagcaggcgaaccggagtgtcgacgggaatggcgagggtgggcttggcgattatcttggaccgccgatgtgttacatggagaagtagcatcacacccacaggatttg

SEQ ID NO: 21142 - DNA, 2586 bp, Arabidopsis thaliana
caattaatgtgtacctggagagaaatacattcgatgattctaagttgcaagtacctgagcaatttcctctatggtaggctagatatccctgaggaagacatccttatctttcttgttctccccaatatactctgtctcaaagtcaatgctaacctgtgaaatagaacacatacatatattggacttgtacaatcgaataggaaatatattggacttttaaattttttccaaattgtgtactgttccaaaaaggacataggtgttggtgtcggatcccgcaccagtagtccaggaccaaccaaaaattgccacataagcatgagagaagcccataagggatacggcccatgagaacctcgaattgagagggaagacatggacgaggtggccgttctgcgggatggtgacaaggtcgaaattaaggacagttcggcttaaggttctcgggccgggtatcaaagcccacgaagtccaaagtcaattcaaattcaaacgtttgaacattaaactcgaagactgaaacagatgcagttaagggagaaatattatgtataattgagaattaaatgttatgtactagtataagtaagacgttgtgagccatgtaggacacatgcaatttttctagcaaagatactatagccatttttataccaattcgtagctttatacatttgatttttgtcctcaagaataatccatctcactaaataaataaatacttgagtgtgtgaatccgacattcatattttggcgccgtttgtggggatggaggattcttgagtcatcagattttttcaccacattttcgagacaagcagcaatggccggagaagacgctctcagtacatcgttggccgaaacactcaaaactatgcagcaaaccatatcggacatgacacataagttctcggatgtggaaaaaactgttaccacactacaaacaacccaagtatctcttagccaacacgttagtactatactatctcgtgttcgttctctaagtgcaggaaaccctattggagtcctaagaagaatgctcaattcgtcgagttcccttgcaaggaatggaaccagtggacagacaactcttgatgctgctaacacagtaattcatctggaggatgtggagacgcagcttggagacgatgaccaattagcacatcagcacgagcaagaaagtcttgaccagttcgagaccatgagaaaggttagccaagaattgaaagagatgaaatcaaagttccatcaggccaccagttcggagccagacatcgatcgagtcattgaagaaactacgcgaacacctttcactcctcaaatcgcaagcttgagaattagagattctcggaaagctcaatcttacaacggattggaagacccaaagagttatcttgcagctttcctgatcgccgctggacgagtcgacttagatgaaaccgaagaggatgcgggatactgcaaactcttttctgagaatctatgtgggcaagcactgatgtggttcacccaattgaagccatgattaattagcaatttcaacgaattgtcagctgtgttcctgaaacaatactccatacttatggataaaagcaatttggacaccgacctttggaatctatcgcaaggaccgaatgagtcacttcgagctttcattacaaagttcaaaggtgtgctttcgaagctcccaagagtgtcgcaacagtcagctttgtcctcccttcagaaaggtttgtggtatgattcaaggtttaaggaagatctaatacttcacaaaccggacacaatccaagatgcgcttttccgcgctaacaactggatggaagtaaaagatgtaaaagagagcttcacgaaaaggaataagcaagcgacgcatcggtcacgttcattacaaagaaatttgagcctagggataacgaagggcctaaaaaattcagggcacaacctttcaacaacaacgtcggaaagtaattccaaggaaaaagaatgtcgaacacttgggtccgagatgaaagtttgtactgcgacatacatagagtgactgggcacttgaccaaagattgcagtgtcttcaaaaggcatctcgcggagttgtgggcaagcggagacctttccatattcaacatagaagatttcatggaaagatatcatgaggcaagacacaatcctgaagctcaaaaccctaccgtaaaaaggccgaggtcatcagacaaggaagaaccaagaagttcaaagggaaatgtcaatgtgattcttggaacttccaaactttaccgatattcgatcagtgctatcaagaagcatagacataatgttttgcttaaagcaagcttcagcgaggaagttgattttcaaggcgcttcaatatcattcaaagaggaagaaacccgacaccttgaaagaactcatgatgatgctttggtcattactttggatgttgctaattttgaagtttcgagaattcttgttgatataggcagttcgttggatttaattttcctgagtactttggaaaggatggggattagttgagctgatgtggtgggacccccatctcctttggtggcatttacaagtgagtcaacc

SEQ ID NO: 21143 - DNA, 2022 bp, Arabidopsis thaliana
tactgctctactgcagcttcacacgaatcctcttgctcatcaaactgctctgctagactgaattcagactggcatactcggcctgccatactcggcctgctgaaatgtactcggccgagtatgttcttcctgctcgacttccgcttggttgaactccgcttcttcttctggtgactcactccctatgctcggctcatcgtggaaaggcacatggacattgactaagattgatggaggaggatcaaagtcaatgttgtttccagttctaacggtggtgtactccttgcatgtaagtgctagcctagagaggcgtagcttggggtgcttaaacttgaactgaaattgatcagctggagctgacctatccaggaagcctttcttcctcaaatgctccatattaatgtaattggttgtgacattgggagtatgaagagggacttcagcagctatgaggatgggtgtgatcactcctccatcacacaagctgcctccataaccggattggtggatgccggttgcatattccctaaagcttatcaaatgatcaatcaacaccaccgaaagggatgtatcggacctatccccttccatctctattttcttcattattttccccaaaatgaagaatagagtaagatcaagcatcttcagctctccctcattgacatggccagttgtcttctttgggaagaaggcatttgcaatacaaaggtgaagatacctaagcacatgactccttattgctgaacttttggccctagctgacttgtagggaagcggaccggctattgttaaccacaaatcatggagctcttccttgttgaagttctggcggattccatacttggtagggaacttgaaaacagcacttagctgcctaatagcaagggagtagtggtttccatacaccatgaatgtgatataccccactcctttatgtagttctttctctctctcatcggcataaaagtggagcttcaaggtggctaggaactggcagctctcctccttgtatccttcacaaaagaatgtctctagcttggccatctccatgagatattcaatatccctacagatccccaatgcttgcatggttggtctatggggatatcttgtcccttcaaaactcagctccattaggtactggtaactcttcaatggttggctctttcttccttggattgttccttctccttcttacatgaactggcaaaacctcctcaacaatctcctcatcttcttcagatgcttccccctctaacacaggcacttcttcttctgtaactggttcagcttcccaaaccattttcccctatgcaacttcctctctggcagcagcagaacaacccacagaagattctggagtcatactcggccactgtactcgacctgtcaaccgagtaaaaccaggactcacagcttcctgattcaaaaccggacctttctcgttgatcatggcaaatcctctagctacagcacgagcagaggctattcttcttgcttcttcagaatccatggtcttgtggtgagttactacagatagtcacccaaaacaacccaaagcaggtcaaagtagaagagaatttgaagttttaaactgatcaaaagctttaagagaggttttgaaatggattgtatgaaaaggaagtaagaaattatggatcagtttctgggaattctaaagagaagtgagagtaaaatcttgaaatatctagagagaagtagcaaaatacgaaattgattgagtaaagagagagagtaagtgacttagcttgttgagggtggtttatagacaagaagattttatcctagcccttcaaacaccctagatcttcacccttcatttggtcaaggggacaagctttcagtatttgcagaagaatctttgatggcctttggagagcaggattgacgtgtggggccaagtagattcgaattcagatttgaatttaaattgtgttgacctcgcacatgtgaactcggccgacatactcggcgcgcgtgtcgagtacaatgttgggc

SEQ ID NO: 21144 - DNA, 1810 bp, Arabidopsis thaliana
tttttgtgaaatcattttctgaaatttttcaaatttttttttgtttttctatgccttagatgaatgtagactcaaaaatatacacaatgcaacacacacttcctgagccctcccccaaacttaaatcacacagtccactgtgcgaataaacttggaagagagtactcaggacaaatccaatcacagaaacaaaatgaagaaacaaatcacaacagatgatataatacaatggtgaagtgaggcgcttacctcagtcgaagaatgaacgtagttgctcgtcaatagcagcctctgattgctaccaggctatagacgaacccccttgttccgtatcagctccagcaggtgggtactcgaccccatcagctctatggcggccagcaccgctctgaggatactcgacctctctccttctatcgcggtcgagtgaccttctcgagtgaatgaggcgtgatctgctgctagattgtgtgagtgtagccttccttcttctcttgtgctcctgggaatgacgaatgcctagccgggacatgtgagactctctgctcgctaagctcaggcctgagctcaggctcatcaaatctcctcgatggcatctccagaggaggctgtccctgtggaatagcagtggtggaggaggacaactcagcttatctgttagaaacttgatagtcttgaaacacttggcgagcagcttgtcctgcttcttgcaccacttctgcagtttactgttgttcttatgagcttcactcaagctcttgctctccctcgctggaggtacattcaccaaagtgatacatgctagtgtcgaactccactgctctgtcttcaaccatcccatccgaagcagtttcttctagaagatcatcctcatccaatggttgagcgttctcatagtagaggcgtccaacctcaggacgaaaatcaatgttatctccttctattatccatgtaacctcagggctagggagaaggatgctagctctcctatccgtagagtgctcaaacctgaaccggtgcaagtcgtcaaccattgcaaactccaggaattcgcagtgacgtaggtgctcgatatccattgctcgcggctcgagtccattagaagtgatagggactccacaagcgatcagaatcggtgtcacaacaccacctatgcatagagcgcctcgtgctctcttatggttattgctgacagcccagctcttgtatccacacagatggatcagaagaagtacagagagaggtgtgtcattgatttcaccttggagagacatgccattcttagtttggcaaagagttcccttgagagccattgcgatcatctccatataagagttagtaaccgtccctatgatctctcgggagtagagtacattggctatagaacgctggaagtacctgatgacaggggtgcgtatctgattgctctttgacctggaagaattcagcggtacagagctgccaatggtgatccacaagtctttcaactcttctctgtcatacttgggcttagttcccgtttaactagggaaaccaaacaatccttccaagcgcttgattgataacctatactcatgaccatacacagagaatttcaagaatcccaatccttcacaatccaactcatcagaggtcataccttggtagagctccacttgcagcgtggaaaggaattgaattgtctcatctttgtatgctacatacggataagccatcagagtgtccagatgacaactctagtacaggtgctgaacatcctccaacaatccgagctgtgctagtgtggtcgagcaaggatactcgtactaca

SEQ ID NO: 21145 - DNA, 2354 bp, Arabidopsis thaliana
ccaagcacaaccaaggaatcactcgaccgcgagttcaccaaaccaaaaaaaaaacaaaaaaaactttggtacactcgaccggtttactctgttggtttgtgtttttggttttgttgggactaacgtattaacgtttatctttgagttaaattttgttttcaggtttcatcatgagtaactacagtggagaatcttcaatggatcctgactataatgtagaagaagctgagtcctggtccactagacaggagagagagcaacatgtttacgagagcttcagggatgaatttgaacgctctgcagctcgacgtaatcagagaagagctgaaatcgccagaggaaagagggcgatgtcgagtagatatgcgctgaatgattaggacattgaaactgagtatgagccagagtcatggcgtaaggagacgatttgctgaacaaacccgacgaggttacagtggaggagtatataagattctttgagatgaatgacttctggggaacgaggtatccgtgctatgagactttagcccagctggggttactggaggacgtgcagcatctgttcgagaagtgtcatctggatacactcatgtcttacccttacgctgcttataaggaggagacaatcgagtttctttccacgctgcaagtggagatgtatgagggactcacagactttgagctggataccatgagtttaggcttcttgacgttctcagtgaatgaacagcggtatcagctttcgatcaagaagttagaagaactgtttggtttccctagtggaaaggaaaccaaacccagatttgacagagaggagcttaaggatttgtgggccactatagggaacaatctaccgctaaactcggcgcggtctaagagcaaccaaatccaaagtcctgtgatccgctactttcagcgatcagtcgccaacatcttttactccagggagtctacaggcaccgtgtctaacacggacatggagatgatagattatgcgcttacagggattctccgccagacgaaggggaagaatgtcttgagaggcgatctcaacaacccaccaccagtaatgcctctgttgatccatctgtgtggatacaggaagtgggcgttgacaaacgggaagaagaaggtgagaggagcactatgcgtgggtggcgttgtgacgccaattctggaagcttgtggagtccccctcaaggaaccaggtttagcaccgaggatgatggacttggatcatttgcgcaaatgtgagttcttggagtttgacatggctggcgactttcaccgctacaggttcgagcattcatcgattagaatcgccaacattcttctcccctgcattgacgctactaggattcttgagggcaggaacattgacttcaagcctgcgcttgaagatctttatttcgagggtagtccgccaaccgaggagtttagtcacaccgaaggagctacaacagaagatgttgatgagacggatgatatagatgaggcggagtttgacacgagcatgtatcatttcagtgagcatatacctcctgcgagggaaagcaagagtttgagcgaagctcacaggaacaacagcaagctgcagaagtggtgaaagaaataggacaagctactcgccaagtgcttaagggctatcaagtttctgaaggacaagctcaactgctcctcttccactacagctattccgcagggacatctccctcaggacatgccttcgaggagatatgacgcgcccgagccaagtcggcgcaggcctgagcctagagagcaggagatttcgcatgtccctgcgaggcattcatcatttgagcctcgtgaatctgggaggaagaggaggaccacactcactcgatctagcagtaggagcggacgacttctgcagtctcgtagtttacgcgaccgcggtgctggccgcaacagaggagagaggtcgagtttcctcagagctgtgctggccgccacaaagctgatgaggtcgagtacccacctgctggagctgatacagaacaaggcggttcgtctatggcctaggagcaatcgcaggcagccattgacgagcaactacgttcattcttcgactgaggtaagtgcctcacctcaccattgtattataccgtatgttgtgatttgtttcttcattttttgtttctgtgattggatttgtcctgagtactctcttccaagtttattcacacaatggactgtgtgatttaagtttgggggagggctcaggaagtgtgtgttgcattgtgtataattttgagtctgcattcatctaaggcatagaaaaaaccaaaaaaatttgaaaaatttcagaaaatgatttcataaaaaaaagagtg

SEQ ID NO: 21146 - DNA, 912 bp, Arabidopsis thaliana columbia
tagcatgctatgaggatcccctgctaatgtattagccatcgcagaaatatctactatgcgctccaattcaacaacgtattgcggctttctttgctttaacgtgcagctgagtcttggtttgccaagattctgaatgagcatccatatgaataaatgtcgcaaaactatacattacataattgtataataattaaacattggtaagtgtagtcatgtattgcttacatttaaccctcttaagatcagtataatactttcttttcccaacaaaattgctagaaaaaacttaacccaaaagatttcagcgctttatccagtcaatgaaagtagtatccactaaagcactcttataaagcttgcataaaggtttaatgtcattttctgccttttgttttacacctgaagtagtcgatccaattttaaactcgctctcattcgcattgcttgcacgtctcgaattggtaaatgttattaacaaattattaacattctcctcatcattcgaagtattaatattatggagattcatgaacttagagtagaatcccttcatggctttatcatcatatatcaactctccaaggcattcatagccacaactggagtccccaaccaacatgcctaatgactcagggtaacttgattcggagaactctgaggggacatcgcattgatcctgatgatatcagtgttggtccgtttattagactttctcggcagtatagtgttatagatggagttagacctagtgaccagaacccaatgaggcaatggagagcggattttgttaaacccataggaagagtctatgtcaccacatgtgctgatggagaagtgtcttcaatgggatagaattatgcggctacgatggagatgactcaccggaaaatagagtaatagcatggatggttg

SEQ ID NO: 21147 - DNA, 553 bp, Arabidopsis thaliana columbia
ttgcagtatgttaacatttctcaaaattctttcagtcgctttgaaggaccagcagatgttattcaaagatgtggagaattacttatgcttgacataagttcaaacacattccaagatccgtttcctttgttaccaaactcgacaacgatctttttaggctctgataatcggttttcgggagagattcctaagactatatgcaaattggtttctcttgatacacttgttttatccaacaacaacttcaacggctccattcctcggtgtttcgagaagtttaatactactctttcggttttgcatcttcggaataacaacttatccggtgagtttccagaggaatctatcagtgatcacttgagatcacttgacgttggtcgcaaccggttatcaggagaacttcccaagtctttgatcaactgcactcgtctcgagtttctgaacgtggaagacaacataatcaatgacaagtttccattctggttgagaatgttgccaaacttcagatttttgccttcgttctacgagttcatggccaatacttccttggaga

SEQ ID NO: 21148 - DNA, 496 bp, Arabidopsis thaliana columbia
tattaagccaccttcaacttatgaccttttgatctttaggtcggtccacaatatcccaagtaaagttcttccataatgaattcatttcatcattcataccaccgttccacttttcccagttttcatcttctgttgcttcatgaaaataactcggttcttcactttctacctcttctgttgtgtacagtgcaaaggcaaactgagagtagtcagagaatcgtgtaggaggtctaatctgtcttctaactcaatctctagtcagcttgtagctactcaaactttatgcacttactggtgcttcaccttcaggttcaaagtactcaggttcagaatcactgacatcgagctctataactccacctagattagaactttcccctttctctatttctgtttctgtaattgacttgacaagtgcatttccatcatcgtttccttcacagacttgagtacttagatccttatacactgctgcctcattaaagataacattctt

SEQ ID NO: 21149 - DNA, 1913 bp, Arabidopsis thaliana
ttcttcttgataagtgagatgagtcaagctagatactttaaataagctcacttgcggaggaagtcccatgattatccttgtaaataatttttactttcttgttattttttatttgttttagttgtgtttgtggttctcaggattagaggaataacgtgaagctagagtagaaattcaaaacttttactctacagatgacttagagatcgagtacattggtcgagtatgagtgaattttaaaacccagaaaattttaaatcatcattttactcgacaaatagaagctacagagtcttacagggagtgtatcaagtttacagtagatttcctgcagttttcccagtcaacagagtgtaaaccacgcgctaaggataagatggagagagaatctcaaactcaatctcagccattcctttcactcgaccttactctctcctgttttcaaccactcgaccaaaacaaccaactcgaccttactctctcctgttttccaccactcgacctaaacaaccaactcgacctcataagccctagccgtactcgacctctgccgcatccacacagttcaacgattcactcgacccgcagaaccactcgacctccgaggaccactcgacctaggcgccgccgtcaccagttcatttcctccttcactcgaccggacctctacactcgactccgttgggatactcgaccaattcatcacatcaaccgccgtctcttccaaaagaagctactcgacctcgttactcagtctcgtagccgcactcgaccgacgccgcctcagccgatttcaacaacgcactctaccgacgccgcctcagccgatttcaacaactcactcgacctttccagtgccgccgctatcgagtactcctcctcgttcaccgtcgaattctcagggttcaagatttcactcgacctcgagttttaactcgacctctgtaactgcaactcaacttcttgaaatcaacagagccctgaagcactgtaatagagattactcgacctcaagacttcaccggctgaactcgacatccacaattcactcgacctccaggaacagctcaggagaatcatgagcaattacagtggcatttcttctgttgatcctgactacaacatggatgagacagagtcgtcatcttcaaggctagagagagaacagagaatatgaaagcttcagaaggaaagctgagatagccggagggaagagagcgatgatagagaggtatgagcttatagacgaagatctggaagacgagtacatgcctgaacagactcgcagagctaccaaacttctacacaagcccgacgtattgcctgctaaggaatatgttaggcttttcaagctgaatgagttttgtagcacgaggtatccttgctcgacctcacttgcacaactcggattgttggaagatgttcagcacctgtaccagatttgtcatctggacactctgatggcttatccgtatgtagcgtatgaagatgagacaatacaattcctctccacgctgcaagtagagctctaccaaggtatgacctctgatgagttggattgtgaaggattgggattcttgcgattctctgtgtatggtcatgagtataggttatcaatcaagcgcttggaaggattgtttggcttccccagtggaacgggatctaagcccaagtatgacagagaagagttgaaagacttgtggatcaccattggcagctctgtacggctgaattcttccaggtcaaagagcaatcagatacgcagccctgtcatcaggtacttccagcgttctatagccaatgtactctactcccaagagatcacagggactgttactaactctaatatggagatgatcgcaatggcctaaagggaactcttcgccaaactaagaatggtatgtctctccaag

SEQ ID NO: 21150 - DNA, 512 bp, Arabidopsis thaliana
cagatcgtatctgctcacatcttctatactaaatcgttagaggttgtcctcttaaaatcttgacctcttaatctattttctcatcttaaatcggatcttctcctcctcatagcttacctttaccctcagaaaatcgtcctcttgtgatgatggtgataagtgtgtggtttgcgtttctttaaaagatcttgagactagtctagtcttatccgtgggatcttccttgattacttgtgtttcactggaacagcttgagctgtgactacacgaggaaccaggggactttgcaggtggtgaatgtgaataggacaagaatgtagtaatcttggattgctgttgtagggatgatgcttctggtgaagcagctagatttgggaaactcgcgtagaaggagcctataggaagatgatgacccgaaacaccttcaaccgagtcgatgaccctttggattttctgaagcgaatgaccaactttcttgatttttcttgaaggccatctctgtatccatgctg

SEQ ID NO: 21151 - DNA, 560 bp, Arabidopsis thaliana
catactcctttactgatggacagttatgattgtcctgttggttaagaggttgtcctcttaaaatcttgacctcttaatctttttatgtagaaaattgatgagaatgcagtcaatgaggttttcttaaaggttttggacaactacatcaagtggtgcaaatacttgaggatacgcgttgtgtacaacaagtaatttttgaatctagctctgatatggaaatacaggctttcttcatgtgcatttattgacgttgaagttttctattaggttagaagccattgaccgggacaggaagctgtttcttgtttctttgtacttcctaatctggggtgaagctgctaatgtccgctttcttccagagtgtatctgctatatatttcacaacgtaagataccatattgttgttgattatacaccaattttccgctatcagtatactcatgttttgtttattagtttgctaagtgattgttttgtttcgtattctttactgtggaaaaatctaaatgtctaggtttacagattttgttgttagtgttgttttgctgttcatatatatt

SEQ ID NO: 21152 - DNA, 458 bp, Arabidopsis thaliana columbia
gaactatgtagctatagacatcagcttttgtagttagtcactgtaattacaaagaggagtcataaatcaaatatattggtgatcagatgtaaatattgacatattaaagaagaatcttacatgcttattttggtgcaatgtaaccagctgttccaaaacactttgtcctgatcgattctctgccctctgctgtagaccatgccaaaccaaagtcagaaatttttctaatttgtttttggaaacaagttaattcgtggtttgaccaaatactaaaaaaacgcataggttaatcaaaaccaaattgtacatttgcttatcttttacttatattttacttatattttgcataaaaaaaaaaattgtgtttgttagttccttgtattgttcttctttttttttttacttaattagtaacattttgtataattattgcagtatcattcaactttaagaaatta

SEQ ID NO: 21153 - DNA, 542 bp, Arabidopsis thaliana columbia
caaaccaactttccttctctaatcaaaacaagaaagacacaaagatggagatctcaaaaacccttttgctagtgatttctctggtggctgcaacttgtttcttgcaagccaaggcagctggagtttattgtagtaacccttacactcgatgttaccgcaagtacattaggtgtccagaggaatgtccaagcaaaaccgctatgaactccaagaacaaagtgtgctacgccgattgcgatagacccacttgcaaatcccaatgccgcagtaagaattttttcgattcctataatcataaagctttcacatatgttttgtgcattttcaagtaaagatgatgttattgtacagtgaggaaaccaaactgcaacagacctggatcagcttgttatgacccgaggttcattggaggagacggcattgtgttctacttccatggaaagagcaatgaagagtttagcctcgtctctgactctgaccttcagatcaatggtaggttcattggtcacagactcgctggtcgtgccagagacttcacatgg

SEQ ID NO: 21154 - DNA, 480 bp, Arabidopsis thaliana columbia
gtcgtaaagttgtgatctttacggtgaggttagagtatattcgaccggaaaaaatctcgatttttgcgcaaattccaccgagaaaatctcaaagtattgttctttatgatgtggtcttttgctcgtctatgcacaaatttcattggacaaatctcatggtcgtaaagttggctcgtaagtgtgtttagtatttatatatgagttttaatttgcagccaccaagcagagctagcttgaggaggcaaattgcagcaactgatgattatagaaatggtgatctgttgcaacctatctctcctgcaagttgcagcagcagcagcagttcattgcaggtgaagaaaacaaagttttttgctctttgttcactcttaaatttaaccaaggaatgctttttaacaatcttgttttgagctggatttggtgtgtgttggcttaatgtgcttgtaggttgtggtgcgtaaccagcgtttagtcagacag

SEQ ID NO: 21155 - DNA, 643 bp, Arabidopsis thaliana columbia
  unsure (1)..(643): unsure at all n locations
tnnnnnnnnnnnnnnnnnnnnnnnctaaagtcggagtcggtcgggttaatcagcagaatttttgtgccgcgaacggttaagtcctgcacgttcgccagctctttcgccgggttgttctgggagtccagcaccaccaggttatagccaagtttatccgcctctttctgcgcgccatctttcagcgatacaaagaacgggttgttaagcgtggagaccaccagcgcgatggtgtcttttgccatcgcattcgcactgacggtggcgcttaccgaacagcggaaaccagggtagccagttttttcatgttcatattcaagatgtcctgtagtcgttattactgctttttgttgtctaccagcaccgccagcaaaatcaccaccgctttgacgatcatctggtaataggaggaaacacctaacaaattcaatccattattaaggaagccaagaattaatgcgccgatcaacgtcccaacaatgcgaccttttccgcccgccagactcgtaccgcccagaaccaccgcagcaatagcatccagctcatagccacgtccccgccgtgggttgtgcggaggagagacgcgccacttcaatgatccgtgcagcgatgcagcagacacaaagagaatagacgatgatttgat

SEQ ID NO: 21156 - DNA, 511 bp, Arabidopsis thaliana columbia
gactcaccaaacttcacaagggagacccattctatcccccagctaaacagcttggcaacaaagatatttctcttacccttgcctctttcgttttcattccttctaggcgtagatgcacaatccgataactccataacacatccaatcagagaatgagcatcgctggagacaactttgatgcacctgtacaaactgtttacactgacattgtttacgggcatatcagctcgagatttttcatccaaagcagttggatcagatgctacgagacaattattgtcatttacattaccatcctcaggcatattatccttcggaagtatggagttgtcttggaaaagaagattcgagacaggtaaatcagtatttaatatgctgaatgacacaacctctgcagaacccggaaacgctgacttctcagggaacctcgactgtcttgtaccatcaattacagtagtttcaaatcaatcaaaaaagattgcatcactgctttgagcatcagaagaagaga

SEQ ID NO: 21157 - DNA, 640 bp, Arabidopsis thaliana columbia
  unsure (1)..(640): unsure at all n locations
tatcttgtttggtttttaaagagatttgggctttcgttagattctccattgcatctgctgttatgctttgtcttgagatctggtatatgatgagtatcattgttcttactgggtgtcttttcaataagttatcgctgttgattccctttctatatggttagttttctgcaacattttacatcaataagcttgagaaacttgtatctgactctttaacgttttcactctttggtttttaacatttcagcatgaatatcaacggcttggaggctatgttattcatcggaataaatgcagctataaggtatcatcactatctgaccttttttcctgttattcaggtaactagtaaactcatgtgtatatttgtgtactattagtgtccgtgtatccaatgagcttggcctaggccgtccacgagcagctaagtactctgtctatgtcacggtcttccagtctctcctcattggtcttgtctttatggtggctatcatcatagccagagaccattttgctatcatcttcacaagcagtaaagtacttcagcgtgcagtgtctaagctagcttatcttcttggtataacatggttctcacagtgtgcagcggttgttctggtatanaactaactgatatatatat

SEQ ID NO: 21158 - DNA, 879 bp, Arabidopsis thaliana
ctgaccattgttgatgataatgatgaggtgaaatagtcacttaagtttttcagtagctgcctacatgttgccttgcatacctcctcctgcatttgtgccacccatgtattgtccttgtggctcactcataagggttgggcagtttgcagaaacatggctgttgctgcgacacacgttgcagctagtaaaaccgccaagagaccttgcatcactactgtactgatttccatattgacccacttggtttgctgcaggtaatccaaattctctgcgtgcatcgactgatgcggtgtctctagttcctgaggttccaacaccggaattaaatgcatcagacctgtaattggaactctctgcctttatagggagagaatttgcatctcctatcttgagtttatctattgcctctagcatgaacctggtatttgaagaataattcagcttttcagctttcacaactgttgctttaacccgctgctcatcgctgtaagtttcttctttaatcttcagcttgaaaatgtacttagtaaaagcgacactgcggatgatatcttcaaatttctcctcatcctgattttcatacttcacataatacaaatcttttgcagacattcccattatctcttcaccagcttcttggaatgcagttgcccaggttaggtctgtatggtcctgtaactggatctgtaatatatacctgtagtcacattcatccacgcatttgtcacacttctcacaacgccatgtcccatctccgttatttgtgacctttttgctgcatggacgatctccattcatgataggacaagccgtatagcagaaattttcaaccttcatgaatgaaatggtggcacagactgtgatccagtccggcttctc

SEQ ID NO: 21159 - DNA, 577 bp, Arabidopsis thaliana columbia
gtcaattcccattcaaaagatgaaactttatggtacagaagatctatgcacttggagggaacccaaaaaattcgatctttaatcctcaaatatatacaagtcttcaggaacagagtatggtaatgaacaatcccaacaaggaggaggcaaattacgaagaaaacatgaattgggagcattacctgagttctcgatactctccgaactagattccgcgcaagaaactgcatctcttccccctcacagactcgcagactcttgagaggatcgaattggacctcgtatgatgttctattggtctgtctctggtctggtaagcttcagggtttagctgttttgaagttgcgttctctaaacgtcgcgtttcagggttttaaaacgctaccgcactttccgaatcgctgaatcatataaggctcaatgtctttctttttttttttttttttttggcctaactctggctttgagagagacagagaggtagagagagtaacgatggctgctgtagaagaagtagacgatgttggaagaacaatagaggaagagactgtgtgtgaaaaaagagaaagaggagagg

SEQ ID NO: 21160 - DNA, 461 bp, Arabidopsis thaliana columbia
gaagaaaagaataaaaacatatcaaaacagaggaaagacctttctcgggtactgatctcgatacattcatgagtgacaccaaattcaccacggcctagttcttttcccaaatcatacttgaggtgaattccatcaccgataggctcggggagaacgcggcttggtggctggaaaatcaatctccgggaaagattagttgaagaatcgaaacgaggaacagaggatgttctgctattactactgtgtcgccttcttaccggtctctttccaaaaggagagcctttcaatggcgacgaaacacaacttcccatgggattctctttttgggttgttttggaataatatccaacggtttgaatcgattaatcgatttataacaatcaatcaagcgatttcaaggaggagattagttcaaatgcaccccatgggaaggaagagagaagctttttgcactcgagttc

SEQ ID NO: 21161 - DNA, 1200 bp, Arabidopsis thaliana
tgttgaacttctgagctcattgttacaacggtgatatctaactccagaactctttagattttctaaccattgattcatgttatgaaaatattaagacagtatcttacttgcatcaggagcggcaaaacccccatgcacagatacaaacatggattctctggattcgcagcccatttatcagaagatgaagctcatctcatagccaagcaaccgggagtactatctgtcttccctgaccagatgttacagctccacaccacacgttcatgggatttcttggtgcaagaaagttatcaaagagatacttacttcaccgaaatgaactatgaacaagaatccgaaatgcatgaaggagacaccattatcggcttccttgattcaggtgagcagtatgaagtgatgaaatatttatatgcgctttttatctacttccagtaaaacaaatactcaatgcagcatatcctgatggagaaaacaggaatatggcccgaggcgcagagctttaacgacaggcacatgggtccagtcccagagaaatggaagggcacttgcatgagagggaagaagacacaacctgattctttccgttgcaataggtaagctgagactgaggaaagtagaacacatgtagagatccgatatatgtttgaatttaccacctcaaacttggataaacaggaaactgataggagcaaggtattacaattcgtcattcttcttagaccccgattatgagacaccacgagactttttggggcacgggacacatgtggcatcaatagcagcagggcaaataatagcaaatgcgtcctactatggcctggcaagtggaatcatgagaggaggttcaccaagttcaagaatagctatgtacagagcgtgctcactcctgggatgtcgtggctcgagcatactagctgcatttgatgatgcaatcgcagatggggttgatgttatatccatatcaatgggcttatggccagacaatttacttgaagatccgctttccatcgggtcatttcatgccgtggaaagagggatcactgttgtttgctctgtaggaaattctggcccatcgagtcaaagtgtgtttaatgctgctccatggatgatcactgttgctgccagcactattgaccgtggctttgagtcaacattcttctgggaggagatgaaacagattaatcgaggtaagaagga

SEQ ID NO: 21162 - DNA, 665 bp, Arabidopsis thaliana columbia
  unsure (1)..(665): unsure at all n locations
tcgccttaaaaacaaagacctgaatcaatcgggtgttggagcattcatggagccagcaatggctaaagaagaggctaagaagcaggaggcgaggcgagtaaaggtgagtctataatttcttcactgattttttcatcaagacagtgtaaacaaagtgataattgtcttatttgttcctatgttatgtgcttatatgtgcaggaacgtatgactttaaagcacaaaaacacaggacaatgggccaaacgcatgctaagccgtggactgaataggaaatacgatgtgactcaggcagctctatctaaacaacttcaaattcatgctactttgtccagaaagatgaactccacaaaagatgaaagtagtagtgatgaggaagatttgaatgatggttcagatcaggatacttctaaactgatagcggaacgaaaggagaagatactgaaaactgtggacgatgatgaagtcccatttctcgtcttatgtcattacctttcatggtaattcttgctttgtttcgcaaaacacttttgaatgtttttattctggttttctttcccgctcattcatgtttttggtttggttaggctcgtgctgtgaaaaagannaacgaggaagctanagaagaaggtaaacgtgatattgaggagtttggagaattggtg

SEQ ID NO: 21163 - DNA, 605 bp, Arabidopsis thaliana columbia
  unsure (1)..(605): unsure at all n locations
ggacatctgttggtgtctgatatcggtctgttcccatctgtaagctgttggaaacaagacgatgtgctgcgtttcccagatgccttccagatacacttccaggtgggttttgcctaaagaaatgaggagaaagaaaaaatgaaaatttgatatacaacattaatgatatgagccaaagcctttgacgtgtttatagtaacaggtgcatgcctctagaggaggcgtattatggtaattaattaattaattaaaacgtcctaaccagtgacctaatcaacctaaccatagtctcgtatcaattagcaattcaaacactcgtttttccttggtttgatgattttattacctcccctgattattatgcatcccatgattattatgcatcccgtgattattatgcatcggtctccttccattgtcttcatgccacagagcaggtgggggtttcaagtcccctatgtccacagtctgaacagacaagagaaaacaaccaacttaagctaccaagacgaattatccatagaggtcctcagaataagtcttcttgacaatgactagctanacattaaaatccatagaggtgccagtccagcaagcaaagtggt

SEQ ID NO: 21164 - DNA, 1095 bp, Arabidopsis thaliana
cggagctgttgcaaagcaaatacattcaggttaggtcttaccgttcttagtaagtaagaactaatcgaactttctcaaccaaaagctataattaaagctttgatcaaacattatcacataaaaatcgaaaaaagagaccagaagataaaaaaagtgtatcaaacatcttaccctctcagcgatgctatgtggatcggtagcttgacctcgcctagccctaactctaggccgaatagtagactgttgatgcggcattggtggagctggctgtgacattggctgcccatggaaaatcttcaacaaaacacaaaacaatgccgtaataacattaagaaaagcttaaaaaccgcttctcacaagaacggtcgccactagagtagttatagcaacaattcaaactatgacggaattatccacatgagaaaagaaactaaagagcaaattttcttacaatataatttggacataaaagaacactcttttatactaaagtttcttgcaaaactaattttagtgttatgactttaaaacacatcaaaatcttcaacttgggtttcttcaaaaacatcaaatctcaccaatctgagccaaaaactctcggtaactatcaaatttagacctaagctgggttttctcaaaaacgacaccattttgaaaccctaaagatttgaatttcactttattttctcgagaacacaaaagaaaaagacaaagtgaagattctgaagagaaacttacaggtttcatagaggaacatcgattatcaagaacatcgtcttggaaacgtttaccagtttcatcaggtttaagaaagccatgtcctttcccttgatcgagacttaatcccaacggaaacatctgattatgaaaccctacaggtccacctcctccaatggcacccatatgattatgatcccttcgttgcctgaaccaagctgaagcatcatcggaggtggaccacgccgccgattccagagagaccagaacctgaagaaccggagaagttggaaagccgaggatctctcgaagaaatcgtcggtaggagatggatcggagatgctatcatgtgggatgttgttgttatagcgatgaagg

SEQ ID NO: 21165 - DNA, 510 bp, Arabidopsis thaliana
cgctcagagtgcacttaagaagatgacaggagaggttcaagacgaggtccccgtgctaatgagtggagcaggacatgatgcaatggctatggcacacttaaccaaggtaattgactttcaaaagtcatccacatgtttgtttcaggccttataagctataagccatgtgggttttgtctcttggttcagacactaacttaatgggagatttcttttggtttcggaaggtgggaatgttgtttgtccggtgtcgtggaggaataagtcattctccggcagaacatgtattggatgacgatgttggtgcagccggtttggccatcttggagtttctagagtctcaaatgtaaaacatgacaaatatatgagaaacagagtggagtcttgtctcatagagactccatgaaaaatgtatagtatcatttgttgttatttgtcttctctctgtgtactctttggaactgcatttgtatagaattagtccgatttttaaaaatgtatgatatatta

SEQ ID NO: 21166 - DNA, 500 bp, Arabidopsis thaliana
tgcaaccatttgagccatttgaacacgagatagcctctcgggtccaccagcattcagaactagccgcatctgtttatcatctgaaagcagcaacaacatgttgttatgattctacattttatgtacaatgatgcagagcgagagaatgaaactcagtaaaaaagaatctaccagagacccatctgtctattaatttgaaagtgatattcacaagatccttaacgtaaatggggcaacgaaactcgtcatggaagaagtctaccgtgtcccctttctttaaggagctatcaatccactaaaacataaaagacgaccagtttcatggctaactcaatgaactcaagtgtgtatatatatctctgagaaattgtgttaagaagcacctgaattgggagagtcttggggagaggtgatacagtttgaggaccaaagatgatactacttctcaatattgcaaagctttgacacttatccttgatgagaagctctgctgcaacttt

SEQ ID NO: 21167 - DNA, 580 bp, Arabidopsis thaliana
gaattgcttggattttctgtaacagccacagacagtagctacacctcaggtttctgctcctactgcctcagtgtaagttgccttcctctggcattgatttacctccttttgaaagagaaattgtcagcttcttatgtagttgccggtttgctgattctctgttctttttacttgcgttctcagtccagttcctacaagtggaactgcaaccgctgcagctccagctactgctgcttcgtaagaacttttcagaagtatactatattcattttcgaatatctgttcattgattgtgtaaatgttgcccactttcttggttgaaacagggttcagacagatgtgtatggtcaagcagcatcaaaccttgttgctggaactactttagagtccactgttcagcaaattcttgatatgggtggaggtagttgggaccgtgacactgttgttcgtgctctgagagctgcgttcaacaatcctgaaagagctgttgaatacctgtactcggtatgattcattcacttcttgatttacgttttctttgatatattgtatctactttgatttgcggtttccagaattt

SEQ ID NO: 21168 - DNA, 952 bp, Arabidopsis thaliana
gagagagtcttaggatccaagacagagaccaaagctaagtgattgagtggcatctttactcctcccgtttcaacaacaatatgatcaagcattcctgcaaatgcacacaataagcacagacacagagaggcttaacctaaacccgaaagaaagaggtgagaagtacctggagcggctcttccggttcttaatttagttaaatcccgggacaatgcatcaatggctgcctccatttgagaagaggctgctgctttcacggtaggtccgatatctggagctgcgtcgaccatccctgttcctgaatcgtcctctgaagaagaaggcagaaatgccgttgttcatacaacaaaaaacaaaagacaagagaaactcttttgataccaactacaactagtacaagaagaatctatcaatccctctacttgaaaagtctacaaatcatgttaataagattcacgagcgagtgattgataaatggaaatgaggaataaacaacatacttgattttttgccttttgcaaagcctcgacgagaatctctgaggaaatcgggcatggacaaatcgaattgcagatctcggcctcccatcatcatgagattgggtgaagaaatgaaggagaaatcacgagattgaacaacaacggagcttcttctgagaaacccaatcgcgttacgactagatagagctcgtctcacgaacatagccatcatccctaaagacttcaactttcttcttcttcttcttcttcttcttttctgaggtttaaggaggaagacacgcaagaaaaacaagtaccttttgattgattccgtgtatagagctaaaaccctcgacctcgaatcgacgactgaaatgtaataaaaaaaatttagtttccttcatatataaagtcatttccttttcttttaatgagaaaataccaaaatagccctccgcttctaaaaccctttg

SEQ ID NO: 21169 - DNA, 544 bp, Arabidopsis thaliana
tgatgaccaaaccaaccagagtgtttgtagttcatatgaatcggttccttgcttcaagagtgttttcaaaagccagggaaactggtctaatgaaacaagggtatgcctggatcctcactaatggagttatagatcatctggttttgatgaatggaacagatattgaagcaatgcaaggggtaataggcataaggactcactttccaatatcggaagagcttcaaacatttagatcaagattggcaaaggcattcccagtttcggagttgaacatctacggattgagggcttacgatgctaccaccgcactggcaatggctgttgatgaagcaggaacaactaacttgactttcagcaacatggatggaagaaacatatctgacctggaagcacttagtgtctcagaatatggtccaaagcttatccgctcgctttcccagattcagttcaaaggactttctggtgataccatttcgttgatggcaactgcatgcatccgtgtttgagattgtcaatgtgatagacggtggaggaatattggtag

SEQ ID NO: 21170 - DNA, 946 bp, Arabidopsis thaliana
cctaagtcatagcattgcggaaagtaagacggacatcagcagaaaactctgaagggcttgaatacgtgccggaagttaacttgcttttaacagttcctaaatccataggatgtttgataatggtgaaataatcaggaatgttgagcttgacgacgtccacaggggtattaaagagccaacaatgctgctgcgacatcaatcgtttaaggaggctctcacattgcttcatccgaagcatagtggaagtggtgactggctctggtttggttgctgtgaaggggagcaccctttttccagggccagtagagcatcgtgacattccaaaactcttggggcgagacacattacttgcaggtgtactagtaacaatcttagatataggaagaaggtccccaacactcttctgaaaggaccgtagttgttccagctcctgacgaagcgtatgaatccactttctcctttctgatgatgacaagtcagacaagggtaaaactattctcgggacaccaaaagtttcatcatccttggaagcattggggctatcatcacagccgccgggagagtcaaaactgttacgattataatctcctgggaaaccaccgttcctcacagtcatgatatcgcccaccgaagtgcgaacctgcacaaatcaaaatatttaagtcagttttgagaaaccctaactatgaaaacctgaaagcaattcaattcttagagccctatagtattgctggaggagagcagtgaacactcaatatgcataaaaaaggaaattcggaactaaccaactcgaaacacttagcaagcgatcgaaccggagcagaagtaagagaaccgaggaacaagcgtaaatcttctccagcagaaacagattaacgctagagattggtgtagaagatgatgatgaagaagaagatagagtaaaccctagagtggagacgaagaa

SEQ ID NO: 21171 - DNA, 1517 bp, Arabidopsis thaliana
gaatgagtttaaactcatcttcatcaacaccattgaagatagcgctcatagcccttgcattaaactttcacagattcttctcttctctagtccaattcgcctttggtttggtgattttgaacccatcttcagtaagatcaaatggaggttcccatccttcctctactacagtccatgcatcttcaccttgacctctaatgagttgtgtcatacgaactttccactatccataccgcttagtatccagtaagaatactttgcctgtaccagtactaacatccgttggttccataactaggatctaacctgtttaaatatactaatctcatattggttacccgctctgataccaattgaagtaaaagagccctaagtactttgactagaacaagaccaaaactccaataaacacactttattagaacaatcttcaaactaatcaatcacatataagttttgaaaggccccgatcagtcgttcctttcaaggaatcccgactcatctataacgcatcctagaatccttagactcgaggtctaggattccctcaccttccttcacgttgttcggtcgatccgacgcttcttcttccttgtcggccacagtccggctaccgaacctccgactatttattctcccgagagggcgagagtttattggtgagtttccggtgtttttctgtgtgttgtggtatcctaaatgatcttgggcgcccttccttaaataggggacgaatagatgcttttcgaatcaacacatttgttccttgcacctttccgaagagttgcacctttccgaagagttgcatcttttcgcccgtaactgctcgcccttatcctttggacaagcaaccgttcgaccataaccgcctaaataaccgtccggataaccgcccagttggtcggacagtcgaccagctacctcgagctcaatcgtcactcgtccagctgcctcgagctcaactgtcagtcgtccagctgcccaagctagaatgtcactcgacctgagtaaccgtcactccttcagctgagcttgagcttcgggcgagctgacccaactgatttccttatgattctagcttagcccgcatgatttcccctttgtccgagcttgtggccagctacttctcacttgtctgagactccaccttcttctctcggaccaagtcctagccaacgatcttattgaggatcacgggcattacaagtctccccccttgaattggattcgtctccgaatccgcatcaagttgatctttacccatctccttgaaccactccggaaaattggccttcatcttattctcggtttcccaagtgtattcttcacggcctcgacaattccacaagacttttaacaaatcccatgattttccccgagtccctttcttgattcgatccatgatccgtaccagccgtgcttccaccgtcatgttttctttaatcccgggaggtacatcttccatgcttttttcttgatcacttaaacacttccgtagttgtgatacatggaagacc

SEQ ID NO: 21172 - DNA, 2244 bp, Arabidopsis thaliana
caggtcgagttgcaaaatgggctatagaactaagtgagtacgatatagaatatcgcaccagcaccagcttgaaagcacaggtcctagccgactttgtaatcgagctcccgttagcggacctggatggaaccaactccaataagaaatggctcctccacgtcgatggctcctccaaccaacagggatccggagtaggaatacaactcacctcccccaccggggaagtcagcgaacaatcgttccaactcggattatacgcatcaaacaacgagtctgagtacgaagccctcattgctggcattaagatagcttaaggaatgacgagcgcatggaagcgtacctcaaactagtcaaaatccccaaaggagaaaacacctctgtagacggcttggcagctctcgcctccacgtcagatcctttcgtcaaaagaattatcccggtcgaaggaatagaacacccgagcatcgacctaatggtcaaacacgctgggacgaaaacacgctgaagcaccaccccgtggctagagctcttgcagcagccgcggagataggtgcagcggaggaagagccggagcttggaacccccgaacaacctacctcgtacaaacctgaaccgtacaacgacttgagaatccaatcatcgattacatcgaacgagggatcacacctcccgacaagtgggagacaagaaaactcaaagcccagagcgcagggtactgcatcatggaagggagacttatgaaacgcaacatcgcaggtccctatatggtgtgtacctacgggcaacaaacgaaagacctcatgaaaagcaagcgcgaggggcaatgtggtagccactgtagtggacgtaccctcgccctcagagttaaaaagcaaggctacttctggccaacaatgctagccgattgcatagctcattcactcaggtgcgataaatgccaacgacatgcacctgctcttcatcaacctcccgaggaaatgtcctcgatatcttctccttacccgtttatgaagtggtccatggacgtcgtaggtcccatggaagcctccggtgggaagaaaagactaaaaaacctgctggtcctcaccgactactctaccaaatggattgaggctaaatccttccaacaggtaaccgagaaacaagtcgaggacttcgtatgggaaaatatcatatgccgacatggcataccttatgagatcgtcaccgataacgggactaacctcacctcgggaaaaatcaaagcattttgcgacaagtggaagatccgtcttaccacatccaccccccgttacccacaaggtaggcagaagccgccaacaaagctatacttaacaacatcaagaaaagacttgattccaaaaaatcaatgtggtccgacgtgctccacggagttctctgggcctaacgaactacacctcgcaagtcaacacaagaaacactgttctctctcgcttatggtttagaagcagtaatccctgtcgaaaccatagtaccaagcgtgagaaggaccgccagtcctgctaacccggacctgaacatgcaaatgttacaggacaacatggacttcatcgatgaacgcagagatcaggtaatgatccgagttcaaaactatcaacaagctgccgcccgctactataactccaatatcaaaattcggagattcgaagtgggagagctcgtcttacgaaaagtgttcagcaacacgagagagctaaacgctggaaaactgggaactaactgggaaggtccctatcgaatcaccaaggtggtacgtgacggcgtctataagctcgtaaaagttatcaacggagtacctgagttacggccttggaatgccatgcatctcaagaaataccacgaataggtactcaaaaacaatcgaactacgataaggcttgatctcttggcagggtacgtaggcagctccccccaagagcgcagccaccacttcaatcaaatcacaaaagggcttaatcccctaaccaggtatgcaggcagtcacctccgcaaacgcaattaccatctcaacccttccatttgaaagacgaaacttcaacaagggaaacaaacatcgcatcttccatcaacgaagatcagctgctcacctaacagttcaatctcccctctgtatcgaggaggtccctgctcgatgaccaaacgccagattgtcgcttgctttacctctttttgtacttaacaatttcgagataagaataaaagaaaattttgatactcattatc

SEQ ID NO: 21173 - DNA, 2356 bp, Arabidopsis thaliana
catcctcaagaaccctaatcactactcatgcaacattctcaagaacacaaacccagaaattactaaaatcataccaaaatgtagatctaaacaagctaaacaactttacttaaacaatcaaatgcaaaaacaaaatagattaagagtaattaaggtttcaagattcataaacacaaagaaaaactgaaagataaagcatagatcctttggacaaatcccaaagtgatctatttatactaaaatgttggaacccctagattcactagaagacaagagacttgaggcggtttgggcgaatactcgatcttggggatcgagtaaagagggtgctgcaaagtctgcgcctttgtgtctatgctccgagtgatctattggtcgagtagatgcttcatcctctcctatccgtatgctcagatgtctggttgagtggggaatgaggaggatccgaagacgctttgatagctcaacaagtcttgtagagttggtcacccttggtcgagtaaatggatcgagtagtggatcgagtaggaggggcgagtagatcaatctgctgcttcatctaaggctgccttgatcgagtaagaaggttgagtaaactgcagcctcctttgtagcatcctggatcgagtaaagaggtcgagtagaatgatacctctgctgtagctgcctggatcgagtgaatggatcgagtagagtcctttttagctccttctgcacctgaaaacacaccaaaacatgcaatgcgaatgcaagacgatcctagatgcctaagtatgcaaaataagctaaaatgacatgatataatgagcaaatgcaaagctaaatgatgatatacatatacctaaaatgagtaaaatacagtgtaatcagctgcgttccgtctacaacaacgactttcctcatatatttccaaccttttatagatgtcgagagagaaacgaatacatatttgaagcgctggcgaccattagattcaggagtggagtggagatgacagattgtaccgggatttgctaattgtagaagatacagatatgtaggtaaaaacctgtaactggccatatcatcaacccttatagagtttactgcaacctctctagctctccatgctgtagaatatgagatccaaaattaagatcatttaagtccaattgaggtaaatctacagctctcggacccccttgcgtagaactatatctattcttcataacctcgcctaaaagcttgtaagtagcatgtttacgataatcattttgactctcgatcttgcaaacatggatagaatcataccctgtgattttgaaacatttggaattgggtatgacatgtgtagtcaaatgccatgaacaattgtgatctacacaaaccatctctaatcttttagggcatgaccgagtttgtttgtagcggaagcaccttttgattgcaacaagtcgcatagtctgctgtatgacttgcctgtttttgaaaacacttcccacatacaagagatgacctgacgtactcaattcaacttatttcgcatcgactcgaacattggctaaatcatcgaatacaggagcagcattggtatcgagaaactcattctcaccattatgcaatgtagaaaaccttttatacacttcgtaggcttcacctgttgtcactagacggtcgtcagattcaatatttaacccacttgcagaaaccccttctaggacgactataccatcatctccagttacgttctcagctatatcatccacatttgcagccgtgtacttaactaattcaccttcgcatcttgtctcctctacacagactctagtgtacgtacattggtacaaatcatgttgacacgtcggggatggagcagaggttggtgtactgtcaaccaaaacagcagtgggttctacatgatgtacatgtttatctgttgacgtacacaatgccaatagacgagtgaattccctgtgggttccacggtttgttgagtgttattcacgacgtcctcctcaacatgaccatttccatattcttccacaatcagatcaccccatttattgtaatcgtaatcttcgcaactactttcactaccgtctattgtagggtcgagggtacttccacgacattcactatcggtgtcatcgtcatgtacatccatatcttcgtcctcttcattatcctcgtcctcatattcatcctcatcactttcatctatgtcatcctcatctacatttatatcttcgtaaaaattatgagatacatcaacatttgtaacctctgtctctgtatggcctcccttgccgatagagtaaaaagacacaaacaagttaacagaaggatcgccattacgaatcaacataaatgtatccag

SEQ ID NO: 21174 - DNA, 433 bp, Arabidopsis thaliana
ttgataatagttgaacaaagatctctgagcttttaggaacccctagaaaaactcataagatctcataaatattacaaatgatcattaaccctcctactttttttttttttttgaacaccgattaaccctccttctaaacataaatattttgcttggaacattgttcatcttgaaactgagctattttgctagctgatctctgaatatattgcacataatcaaaccctttggcttcaggttcagagtgattcagaggagctcctgataatcaaaacaaggcaatcccttctagaacctctaaccgagcatgtcaatgcaaatcacgaatacgagtaagcattgttctatgacgtattctgcatataacaacatgagtaatgcgagtgtcttgccttttctttagcaatcacacaagctaagttactaaatatgg

SEQ ID NO: 21175 - DNA, 3137 bp, Arabidopsis thaliana
cttatctccattcttgtcccaatccataaaatacctgaaaaagctctaaaaagactctacaaataacaaaaagactctaaaacttatatataaaccgtagctaaaaatagtagaaataggttatatcacttagcaacgggtggtggtgggtttcaatgtaagaagtgatatctcgagaagcaatgtgtgtagatccttgttcctctttgttaatgatggaagcctcaaccaatttttgcgcttagtatccgtgatctttgttgtaagactcgtgataatgttgttgattagtaccagtgctttgccgggggatcttgtcatgaagttgcaataacttgctgcgtctagtgacatatgatacgactcatctatccctcagaaaaatatgttgatgagcaggatttcctggaaaccatgttgtgggcagtccctctgataggatttgaatttgatccacgcatatttgaaagtttatgttggatcctgagtgaacaaagaaatcttcaatcgaagtgcttctgtcattgattcatcaaagaagtgattcatgaatgcgttcttcatattagtccaatttgtcaatgaaccagtttcgagctgtcgcaatcatgatattcctctgcccattagagagtgggggaagagtttgcaaagatgataatcagctggtacaccatctcgacgacactaagtcctcaaagatttccaaatgatcaagtggtgattcataaggagcacctataaacttccatcttgaaacaaaatcataataggcagggtgaataacaaagtcttctcttgcaaaaggggatagctggatcgctgatcgttttgagtagaatagatcaactctgttgcaatagattcgtgaatcaaattctctaggtacgtgaaacacaagagactaaaagaagaagaaacacgtgagtaggtgaagtaaaagaaatgttcaaacttaaatctacacctaagtctgatggtgacttcggcaatggcgccaaatttgatatacctcaaattatccttaagcttactccctcaaataagagatcgtcgttagcacttaaggtcaaatttcactaaactctcgttgttcacataataaatctatgatgattatttacctagacaatgtagatgaaagtaaagacaagaaaacaataaatcaagttgtaaattcaggagattaaagcgtcaggtctaggaatagtcttagaaaattgataaattgtcgatctagctatgactaggattattattgacccgttctcaaacacaaaccacttttatcgaataacccagtgttggcttcccattactccccatgtctaacctaaggattcccagcgttcgcttgacaaatccctaatcctaaacatgcaatcaaaacgactttgataaattcacttaagtaaatggctcgattcttattagacacctataaactcggttcatctataatggttctgatgacaaatgcctttctaggttcacgtattatctaagatcaagttcaaggtgatcaatctaaaactagcattaagaacaattttatatgaagaactctaaaaataagcctaaggacttgatcaacatgatgtaagtgcaggaattagcacctccgacaatactagtctaaaccaaaggaattaagaattaaagtaagaattcagtcaaaccggggtactttggtttagtctgttaatgggcaagagtaaagagatcagttgccaacatcaagccaaaataaggagattgcctggctgatattcgttcctcaaagaaaacaaaaatagtttcacctagtcaaacgcaaacctttggggaataagccttgaagtaacctctcacgaagtaaacgttgatccgacctatcgcccactaaaataaaaacgtcataagctaggcaccgagagtgccaaagctgtgaacgatgaggtcgaccgactactaaaaattagatcaataagggaagtaaaatatcccgattggctcgctaaccccatcgtagtcaaaaagaaaaacaggaagtggagagcatgtcctaaggacagtttcccactcccacacatagaccgactggtcgaagccaccacaggtcattaactactatccttcatggatgcattctgtgggtataaccaaatactcatgcgtccagatgaccacaaaaaatggctttcatcaccgatcgaggcacttacttctacaaagtaatgcctttcggtttgaaaaatgatggtgctacctaccaacgcttagtgaacagaatgttcgccgaccaactcggaaaaataatggaagtttacatcgacgatatgctggttaagtctgcccatgaaaagaaccatgtctcgcaactaagagaatgtttcaaaatcctaaacaaatttgaaatgaaactaaatcccgagaaatgatctttcttggtcccgtcaggagaattccttggctacctggtaaccaaaagaggtatcgaagccaaattaaagcagattgccgccttcattgaaatgccatcacccaatacaacaatagaggtccaacgacttattggtcgtatcgccgccctcaacaggttcatatctagatccaccgataaatgcctcccgtactatcaactcctctgaaaggacaaaaaggtcgtttggaacgaggaatgccagtaggccttcaagcaattgaatgtatacctagccgaaccacccatacttgcaaaacccgaagaaggagaaccaatgtacctgtacacaacggtttcttgaaccgcaataaatggtgtcctggtacgagaggactacgaaggacaaaaaccaatctattatgtgagtaaaacactagtaaacgtcgaaacccgttatccaacaatagaaaattggcactagctgtcattatgtcagctcgtaaacaaagattgtacttccaattgcaccccatagtggtgatgacatcccaaccaatccaaaccattttgcaccatcccactcaatcaggaggtctcgctaaatgggccatagaactgagcgaatacgatatagagtatcgtaccaggactagcttgaaagcgcatgtcctggccgacttcgtaatcaagctcctgttagtggccctggaccgaaccaacatcaataagaaat

SEQ ID NO: 21176 - DNA, 501 bp, Arabidopsis thaliana columbia
tttatatcaataaacttttccaatgtgaaaaagatttgatgcgttagtaaattcagataaattaggataaaagtactttacaacaaaatatggtaatctttgtaaaaatattgcttcacctgataagagtgttctctgctcgacatatcggtaaattgtgtttgacatgctccgtgaacaaattttgatttctcaggtaacacgtcaggtggtggtatctatttagagttataaaaatcattctctgattgagaagattctattaaggaatatctacagaagcaagaacatcttaccaaccactctcctgcagatgactttgcgactccccaatggagaactgttggacctgccatgttcgtggcaatccataagcgacaatctcccttaacatccctttggaggacctagatattatctagaagttgttaaaaaactaccaataatgaaaatgactgtacgaagtagttgtattataaaatcttgttggagagtacaata

SEQ ID NO: 21177 - DNA, 1686 bp, Arabidopsis thaliana
gaataagaagcgctcgtagtcggacttaatttagctcgggggctaaagatagagaaaatccgagctttttgcgactcacagctcgtcgcgaatcagttcaacggagaatattcagatcgggacgaaagaatggaggcctacctgactcatgtacaaaatctggcaaagaatttctaggaattcgagttaacaaggatccctcgtggagagaatacatcggttgacgccctagccgctctagcctcgacatctgacccgagcctgagaagagtcatcccagtagatttcaatgaaaaaccaagcattgaccttgggaaagaggaacacgtcctcccaatacaaatcggcgcggatcaagacgacactccggaagacagcccagacgactgcaactcagaatggatagaacccatcaaaagctatatatccgaaggaaaattgccctcggaaactcaaagctcaggctgcacgtttcgttctagtagatgaaaaactctacaagtggcgattatccggacccttaatgacatgcgttgaaggagaagcggtttgcaagatcatgaaagaaattcacggtggctcgtgcggaaatcattccaggggaagagccttagccatcaaaataaaacgccacggattcttctggccgacaatgatcaaagactgcgaaaagttttcaaaacgatgcgaaaaatgtcaaaggcacgcgccaacaatccatcaaccagccgagctcttgtcatcaatcgcctcgccgtatccattcatgcggtggtcaatggatataattggacctatgcatccctcgaagcagaaaaagttagttctcgtcttgaccaattatttctccaagtagatagaggccgaatcttacgccagcataaaggacactcaaatcgagaacttcgtgtggaaacatatcctatgtcgccacaggataccttacgagatcgttacggataacggctcgcaatttatatcaacccgcttccaaggcttatgtgataaatggggaattcgacttagcaagtcaacaccgcgatattcccaaggaaacggccaagccgaggccgctaacaaaacgatcctcgatggcttgaaaaaatggctcgatgctaaaaagggctcgtggtccgacgaactcgagggtgttttatggtcgcatcggacaactcctcgccgagccacaagagaaacccctttcgtcttagtctacggaacggaatgcgtaattccagccgaaatgatagtaccgagcctacgtcggagtctatctcccgagaacaaccccgataatactcacaggctcctcgacgaactcgatctgatcgatgaacgaagagattcagccttggttcgcatacaaaactatcagaatgaaacggctcggcattacaactcacacgtccgacaacaaagattccatgaaggagatcgaattctccggaaagtttttcaaaataccgccgagccaaacgccaggaagctcgggacgaactgggaagggccatacttaatctctaagtcatccgacccagagtatatgagctcgccaacttaagccaaagccgttctaagatccaggaacgcaatgcacctaaggaaatactacaactaaatccaaggtgactaaacttgaacaacgaggtggcttgatccttgaaaagggtacgtaggcagctcatc

SEQ ID NO: 21178 - DNA, 2790 bp, Arabidopsis thaliana
aggcttttcttctaatcttatagcatagagggcgttttaccttttctatgaattacaatgcctaactttcttttctctttgaactccaaaccatttactagactaacactttcttttgtatcccccttaagaacgctaaactcctactctctttttttcttctttttttttcattcccattctctttccattcattccatacacaatcccaatcccatatacaactctccacctagttctagctaacccaaaaagcgtgggctaggtctacatgaaagactgcttttgtcggttcatatctaacacgttataccacgctcaatcgaaaaaaaaactcacaatcacacacaaatgatctttgacttgaaataaggttaagttcagggtatgtgaaactgctctaacaattagagtcagctacttggatttataaagtgtggtgaagtgaataagataatccaagtatgtatatggtaagcatgagttcaaaaacaatgcatagacacgataattgcaaattaagttctagttctaatagatagggaatggcatcagattagcgagttttgaattaaggcaagatagtcaagatgtaaattcatagcagggtgcggtcttacttcaaagatacaatcggttatgcaacagagaactaacaacctgggcattgaacttacttcattggatcaaaacatgcttatcggtttgaaatcatcatcatccccaatgcaaatgagcaatcctaaatgcaaacactctatatacaatcctaaaatgatatgcaatctcatgacactctttttcttatgaaatcattttctgaaaatgtttcaaatttgtatgggtttttctatgccttagatgatgcaaaaattgaaataagaaaagagaacacaatgttaaacatgtcttgaaccctcccccaaacttaaattacacagtcccttgtgtaataaaaatctgaaagagaattcaagatcaaagcacaaagcacacaaagaaaaataaaatgatgctatggtatatacaatggagaggtggtgttacgtcagttatcaggtgaagtaggaggagacgaaatcgtccatactctcctttagtgtaactccaaggaatgcgttgtgctgaacttggattagctggatgctcaaccctttgctcgggttgttgaccgagtggctcctcaagtggtgcagtagagtggcttgctccagcgtctgatttccttgttcttcttcgctttttcaacttgctcctcttttccttttctctaggttcgaaggatgattgccttggtggtgaaggtgcagcatggtgttcccttggctcatatgaagactgtcttggtggcgaaggcggatcgaaatgcataggttcgtgacgagtggatccgcttcttccaaaaggcatgttctgtagcattgctgtggttgaggaagaacagctgatcttgagttggagattgttaaacttcttattgagtgccgcgatagccgtgtcttggaacttacaccagctttggaggaaaccaaggcgcttgtgaatctcttttgagtctttactatgccgtggtgctgagtactcctcgaagtaaaactgttgtgtagcgtaagactcgtccttaggttctgcctcattatcagaatgatggattggagtctcatcatcattcactccttccattggcacagcttcatcacctgaaatatagaggttctccacaggtgggcaaaactcaatgtttccaccatctctaattgaagtggaagcggggtttgggagtagaaaaatggattgccctgctgtggggtgatcgaacctatacttatataggccattcttctgctgtgaccaaaaactcttggaatttataaggtgttgcatatcaatccatcttggaggaatcggcgttgaatgtagaggtacattgcaagctctcataattggtgtcacaactcctcccacaaccattcttcctggtttcttaagtcgcttagcccatcctctgtaactcagcaggttctcgattaggtagaatcagaccgaagtgtcagtctgatctccagctagaactgtaccatccgatgctaaaccaagcaactcttgtagtgctgtctccatcaattctagttcgccattgacaaaggttccatccgctctcttgcaaatagagcacttgccaaggacctatgatagtatctaaccaccagactccttatctcgttgctcttggtccttgaggatgaaaatccatgcttagaaccaagtgttgccaagaatgactgaagctctctcttgtcaaaacgatgacttgtgtcttttccgcttggaaatctatacatcagctcgagatgctctattggaagccgatactctacatcatacacacaaaactccaagtatcccaaacttccgtctggcctgatttcatcgtcctctggctctccatataagagcaactccacggatgaaagaaactgaatggtctcttcctcatacccctccattggccgaaacatgtgaatattcaggctgcactgcttaaacatgtagtctacatcatcatagatgccgagtctctccatggtcccgggatgagggtaccgagttcctaaaaactcattgcgcttcagcagcttgtagtactcatttcgagttgcacatttccccgattccaaatcatcatcgcctcctttctccgtttgatcatcttcctcgggtgaagccatatcttcctcggagtcttcatctaccagctcctacttattgattatcgaagaacacactggc

SEQ ID NO: 21179 - DNA, 1979 bp, Arabidopsis thaliana columbia
tgaggtcataggaaacattcttacccctatacactatctgaaagtcttctcaatctctcattatttattttcttattattttaatttttgtttttatttgggagaggaacactttctttttatcacagtagtcgacttatcaggtatgaacaaggagacaagtcccattaacactaaccgttttgatgaggtaaaaggaagagcagtgaaattagctccagcctttgtggattatgttaggaatggatatccttaagtttgttgattggctttctggattttccattagtcggattgatttacatctacagtacttcagcaatccagggaataaactagagagatagatcataatttctgacaaaagttttgacttaatataacaactatctaatttaaaatgacacaactgactcataagaaaagaaaagatgaagttagtaactgactccccagacttagataacactgtccctagagttattaagatagaggaatcgaaagaaaaataatcagaagttaaaagttagagaaacgtgagttgccacctgagagtggtgtcgatcgacactctggtcgttttgcttagctttgcaaattcaggtcattgttgtagagccttggttagtgttttcacatggatcctccagttagacagttaaatcacaaaaacacacatcaatagttccaacaaagcataagaaaataggagaaacaagttccaaaacagataacaaatagtctgaaataaagcaaaaacaaagtttgaaaagaaagcaagatagtgaggatggctagtcctcatgctctgagccggaggtgggtgcgggagagtaacgacggcgacgggtgggagcaacataaccacaacgagagagtgtagctacggcattccagacgttcttgaagctgtcgacgacgtactgctgaaagacctgtggctccatcgggctgggaggaggagaatgcagctgataagggagagcggaagaggaagatccaactctcggacccccagcagggtcaatgaactcgtcctcagtctatgtatgcacagatcctgaagttgaacctctctatcgcctggtgcgtggtgcaacatgcaaaaggaaggatcgggacaaaaaccgagctcctcatgctcgccattaatctctgtaagcgcggtgcaaggtaactgaatcatatggtgccatgtcttgtctctgaaacaccaaaggaagttgcctttcatccagtgagagtttttaagataactctcatccatagtgaatctcgtggtgttgacctcttctccctcaaagttgatgcgaaaatgctcaaatataggagtagaagactgccaactctctcagatttcttccctctaactataaaggacttggtcttgagtgagaccaagtgatgagcaaatacagtgccaaagttgacatcacggtcaacctcctcaaatccaaagctgtctggaaagaaatcatgaacagcatgatagaacaacaacaactcagaaagtctcatcttgccaggttccatcttgcacaacagtgtgctactaatcagcctaaccaaatatctcagaacatggtgacgaatctctgagtgtactgcgtccttggaatcgtaaattccattgccaaacctgctccagaaaatctgagcatccttaaactgtccaagtagagcaactctagtgagatcattgtctaaaccatataggtcacataactctctcaatggtagactgtatctgacaccgcgaatgaagaagataagagctccttcctaagcattgtgtttcctctcattcacatagtagaccctaacagaagccatgaattgtctaactagctcaggatacagatcgtactacctacaatagatggctccaaaccaatatcatctagcaaacctataacagatttctctatctgcaaacgctgcatcaaactaaaatccgcaacatgagtaggcaaaatttt

SEQ ID NO: 21180 - DNA, 569 bp, Arabidopsis thaliana
tgctaagtcttgcagaccttgatgcttcctttgctaagaagactggtgcagagttatctgtgggtcaagctcaacgagtagcacttgcaaggactctagccaacgagcctgaggtgttgctgctcgatgaaccaacaagtgctcttgatccgatatcgacagagaacattgaggatgttatagtgaaactgaagaagcagagagggattactactgtgattgtttctcacagtatcaagcagattcagaaagttgctgatatcgtttgccttgttgtcgacggagagattgttgaagttcttaaaccaagtgagctttcgcacgctacgcatccaatggcacagaggtttcttcaactcagttcttgagaccattttctcattgatggttcctgcaagttatttgctattttgcttgaatcttaataatctctttcaagagaggaacaaatgctggttgaatgtacaacacctttcatggtttatgtctttttatctctctttagcatacgaaagcatatatatgaacacaacctatcaaagatttagcgagatcgattggttgatgag

SEQ ID NO: 21181 - DNA, 780 bp, Arabidopsis thaliana
acctctcctttccctactttttggtatcaatttcttgttattagtaaaacttcagacaaaagcatttaaaatatatgaacttgaatgttttaatactaaccagttacaacgtcgagctcaaggacgttactaatttgaggaccatggtgaaaagcttgaccactgattcctgcattggagagtgtacctccaacggttagataccagttattccgtccatgaattttggtgctaagccatgctccaacgttttcttcaacacatcgacccataactctccaccccatacatccacatacatttcatccggtcggacgagtggcttgggcgtcccggttacgccgtggttcatttcaaccaccacaccgttcctccccgccgcggcttgtccgtttatggaatggccgtggcctcgggctgagaccggaaacgccgtggctgaaccgtaagctgttctgacgagtcgtgccacgtcttcggccgatgatggatgaagcacggccaatggctcttcaggtgacttcagcataccgaagtctgaggagacggaggctaagtcggaagggtggacggtgaagtggccgtcgacatctatggctccgatgcggaggagctcactggggcccacgtttagacccacggctatgatcagtttacatatggcgaacgtcaggagaagaaagcttgacgtcatttcacgattcatcaaagaatactcaagaaacaagaatcaagattgaggaggaagaatatatagaagaaaaaagatacgggggatcc

SEQ ID NO: 21182 - DNA, 1336 bp, Arabidopsis thaliana
caaaaaatccttcgatagacaaaatttcgcgctaacgattctcattttcctagcctgccatctattctttgggagctctcatgtaacaatgtaatgtatctattggctccctccaatcagccccccaatctttagccggaatttggtcgatttcatgaaatattgagcttctggctcgggatgctcatttggttcgaagacgtcttcgtcaacccatggttcggtcttggcttcaacagtgttttccggggctatatcttctaatggttcgacaatttctttgaccctattaccttcttgcacggctggcttatgtacggctgccccttttgactttcgtctcttgacaggtggtaattcaattgcgggttcaccgcgatcccgggctgcagctcgagaccttatagtgacgagtgttttttttcttccttaatgcttctattcgaaatacattctaccggaatgattctcttgactttgggatctgacgttgaagccagagccgcgagtgcatccgcggttgtcttttctcctcgtggtatgtgaatgagttcaaacttcttgaaatttgtagtcaaatctttgaccacctcaagatatgcctccattcttgaatctttggcttcatagtctccattgaattggttaacaaccagttgtgaatcacattaggtgatcacttcatcagctccaactccctgtgccaacctgagtccggcgattaatgcttcatattctgcgtcattgttagatgcaaagaataataaccggaatgattgctcaaggatttttgaggtgggagactccaatttgatccccaccccggatccattttttgatgaagacccatcgacgtgtaacttccaagtctgatattctggttgctcccgtccgccaagtacctgcaactctgttaaaaaatcagctagaacttaagtctcatggcgactcggctcttgtactctatatcatactcacttaactccaccgcccacttcgccaacctcccagattggttctgactatgaaggattgttcgaagcggttgatttgataacacttcgattgggtgagattaaaaatacgggtgaagcttccgagctgaagttactaccgcaagtgcaagcttttccatcatcgtatacttggtctccggatccgtcatggatttgcttatgtagtaaattggtttttgttctcctcggtcttctcggatcaagactctgctaactgcatggcccgagaccaagacatatagataaagtttctcatccgcttttggtttcgacaatataggtggagtggtcagatatgctttgagctgtccgaatgcttc

SEQ ID NO: 21183 - DNA, 1496 bp, Arabidopsis thaliana
gtcaaactcaccttcctccatctctaaactctgtgttttagccacgcgtgtaatcgcgtgagtagaaccaccaacaatgggaccaacttgcttaaaaagatttatgggttttcgcttttattacacactctcccaaatccaaagaagcgtttgtgtttagatacgtggtggtgggcaaagaaaagaaccaaacacgccactaggagctaccatctctgttttattgctgcttctgcttcctcttccattactcgtcttaaaacaaaggagaaagagtcaagagacatgcatgcgaagacagactcggaggcaacaagcatcgacgcagcggctttgtctccgccgcgttcagcgattagacctctttactatgtacagagtccatcaaaccatgacgtggagaagatgtcatttggttctggttgcagcctaatgggttcacctacacatccacattactaccattgctcaccaatccatcactcccgtgagtcatccacctctcgcttctctgaccgtgctctcctctcttacaagtccatccgtgaacgtcgccgatacatcaacgacggagacgacaaaactgacggcggagatgacgacgacccgtttcggaatgtgcgactctacgtttggttgctcctctccgtaatcttcttgttcacagtcttctctcttatactctggggtgctagcaaatcctaccctcccaaagttactgtaaaggtaataactactttcacttggtggtgactctgctctgagctgagttaactcgtgtagtggacgagtgttctgtttttttttccttaaaagaaacaactttggagaaaagccaactatgaatataataatataatttgttttctagtgaagaagacaaaaatatatatttgagacaaatgtgtttggaatgtgattaggtgtcagactgaaaatgtgttgttgttgttgcactgtgcaggggatgctggtgagggacttgaacttgcaggcagggaacgatcttagcggagtgcctacggacatgttgtctcttaattcgacggtcaggatatattaccgtaacccatcaactttctttgccgtccacgtcactgcttctcctcttctccttcactactccaacctcctactatcctccggtgagatgaacaagttcacggttggtagaaatggcgaaacgaacgtagtgacggtggtgcaaggccatcagattcccctctacggtggtgtttctttccatcttgatacactctccctgccgcttaatctcactatcgtcctccattcaaaagcttacattttgggaagactcgtcacctccaagttctatacaaggatcatctgctcattcactctcgacgccaaccatctcccaaaatccatctctcttctccgctcctgtattccttaacactgattacacgtgtgtggatgtgtgttcttgtatcttttgccatcaaatattttaatccatcaagtacaacatcaac

SEQ ID NO: 21184 - DNA, 3045 bp, Arabidopsis thaliana
tttaatgattctttgggataaattatggtcaaagaccatgtaaaggacacgcatttttggcaaacacactataggcattttcctacaaagctcatagttttctcgatagtcatcaatctattttctagtacatttgtcctcaagaataatccttctcactaaataaataaatacttgagtgtgtgaatccgacatccatattttggcgccgtctgtggggacggaggattcttgagtcgtcagattttttctatatattacatttccgaagtgagccgtaatgtctggagaatatgctaccaaggcttcattagccgaaaccctcaagaccatgcaacaaactatggccgatatggcgcagaagttttcgaatgtgaaaaaaaccgtcgaaacactgcaaacaacccatgtatcactcagccaaaatgttagtactattcagtctcgtgtccgttctttgaatgcaggcaattcctctggagttcgaagaactatcttcggttccccaaattcccttccgcgaagagcagcaagtgatcaaacaaccccggatggtacaaacgcggacatacaaccggaagatggagaaacgcatcccgaagacgataatcagttcgcgaatcaacacgagcaagaaaatttcaaccagttcgaaaccatgagaaaagtaagccgggaattgaaagaaatgaggtcaaaattccaccaagctataagctcggaaccggatatcaaccgggtcatcaaagaagctaggcgaacacctttcaccctgcaaattgccagcttgaggatcagggattcctgaaagcttaacttagaaccgtacaacggtttggaagatctgaaaggctatcttgcagtttttctaattgctgctgggcgagttgatctgaacgaggccgatgaaaatgcaggaaactgcaagcttttctctgagaatctgtgcggacaagccctgatgtggttcacccagttggaaccaggatcgatcagcaacttcaatgagctattagcagtatttttgaaacaatattccattcttatggataaaagcatttcggataccgatctttggaatctatctcaagggccgaacgaaacaattcggactttcatcaccaagttcaagaacgtactttcgaagctcccaggatttcacaacagtcggctttatcggctttgcggaaaggattatggcatgattcaagattcaaagaagatttgatactacacaaacctgatactattcaagatgcattattccgagcgaacaattggatggaagtcgaagatgaaaaagaaagttttacgaagagaaataagcaagcaaaaccagcagtcacttttccacccaagaagttcgaacctcgggaaaatcaagggccaagaaagtttggttcacaaccattcaacaataatgtcgggaagcaatttcaaggaaaaggaaagtcaaatacttgggtccgagatgaaagtttgtattgtgatatacatagagtcactgggcatctaattaaagattgtagcggtccttaaaaggcatcttgcggaactatgggtaagcggagatcttttgaaattcaacatggaggatttcgtcaagcaataccatgagtcaagggataattccgaagctcaaaattctaagagaccaagaccggctagcgaagaagaaccaagaagttcaaaaggtaaaatcaacgtaattcttggaggttccaaagtgattccgttagcgcaatcaaaaagcatagacggaatgttcttctaaagtcaagtttaagtgtagaggtagattttcaaggcgcttcaatatcattcgacgaaaaggaaatgcagagcagatgtagtaggacctcggtagctcggtagatctaattttttttggcactttggaaaggatggggataagcagagcagatgtagtaggacctccatctctagtagctttcacaagtgagtcggcaatgttcctcggaacaatcaagttaccagttttggcgggaaagatgttgaagattgtggactttgtcgtctttgataaatcagcagcttataacatcatcctcgaaactccgtggatctaccagatgaaggcggtcccctctacgtatcatcagtgcctcaaattcccaaccccaagcggaatggaaacaattcggggagaccaagaagcttcaagaacatgttacttagctagccactgattgaagatccaatagcaattaacgaagcccatgaagaaagggatagtcgcaagatttcctagcgggcaaaaggtggatgatgttgtgatcgaagtgattctagaagaagataaaccagattggaaagttcgaattggagtcactttgtccagcaaaataaaaggagctttaatcgagctgttaagtaggaacaaggaatcatttgcttggtcaggagcagatatgcccggcatagacccaagtataatctttcacgagttgaatgtggatccaagcttcaaatgtgtaaaacagaaaagaagaaaactcggggtggaacgagcaaaagcggtaaacgacgtagtagataagctcttaaaaataggatctataagggaagtacagtactcggattaggtggcaaataccgttgtggtcaaaaagaagaatggaaaggatatggtgtgcatcgatttcacagatctcaacaaagcttgtccaaaagacaggttcccactctcacatatagatcgtcttgtggaatcaactgccgaaaacgaattgctaaccttcatggatgctttttcgggatataattagatcatgatgaatccagaagatcaagagaaaatgtcattcatcacgaataggggcatctattgttataaggtaatgcctttcggattaaagaacgcaggagcaacctatcaacggctggttaacaaaatgttcagggagcacctcggaaagacaatggaagtctatatcaatgatatgctagtcaaatcattgaaaaaggaagatcatgttaagcatttagagagattttttgcgatccttaccaatattaaatgaa

SEQ ID NO: 21185 - DNA, 545 bp, Arabidopsis thaliana columbia
gtcgactctaccacataatgtttcagacaactaaatcttaccaggttgtgaaaaaaaaaaaaaaaactaaatcttaccaggcagattgcacattttctttgctcctctgtttgatatgatggataatacattgttgctaacaagcaactggagattgcgctgtcggatagaccagtgttgacactcccaatcctttctccaagatcaaggagttcctgcatatatatgtcagtaccaaaacttttcgttttgcctatgtgaggcttcaaaagataagtgtttggctattaacctcatagctcatgttatcgatgtcaagcctcatgtctctgtggtgatcaagcatgtttctggatccgtagtattgtggttggcgatcttcaaccatgaattcctattattacatacaccccaaaaaataacagattacagttcagcatgcagcagaaaatgataagattgcaaatctatatcttaatattcgatatgcactgtatcatatcggcttgatctttatcttaatactaaatgtaatttagacagac

SEQ ID NO: 21186 - DNA, 506 bp, Arabidopsis thaliana columbia
gttaccaagatgagcttctacaaaagaagctttcactctttccttggccaaaccaacaccaaagggatgccgtttgaatccggtcttggccatgatgagacacaatcacatggcttaatgttgtgcacagagtatctagggtttgagagttacgacatgaggatgtccgataacgaggtggagaacaagatgacttgtcatgcggaggtggagaccgaaagggttgaagcaaagaggaggaagacgaaggagaatgtggtggtgcaagcgcagaaaaaacagtttcctccgcctctctcgtcattaaacagccgtggacagcgatatttttatctccgtccggtgagaaaagacggtagattggaacttacgcaagttatggtcgatcgaccagagattttccacgtttctagagtagatggacggttgagattacattttgtcgatggtgtcgagaacccattagagcttattctggtcctcaagaaattgtggccttagaagag

SEQ ID NO: 21187 - DNA, 654 bp, Arabidopsis thaliana
gtagagtttgagtcttagatcgtaccataagttgagtaagaggagagtacgatgatgtaagctgaagctcgtttgatttagtaccaaagtgaagatgtactttgtgaggctctgtaaggaacgtggtaacggttcttgtacggcttgaagggttgagtctcgctgtgcaagcagatttaatggtttaatattgaacttaaaaatgtatggaaatagatatatagattggatcttactatgctctcggcgtaatctatctcgtggttccctgcagcccaaatccaaggctgatacgcggcgcttggttccacaaaccggccgtatgaatcccattttctttggtcgtggttaggatggtcatcagcataagataaatctccggcaaaaagaaccgcttggccttttggattcgacatgtagttatacaatgtctagttagaggcaaaggtttgtccaagatcaccttaaaaaaaattaaggttactgaattaggttcagaaaatttaaactcatagttgaaacttaaaactcaaagcctatttactgaaataagaaacacttgtctatggcctctaatattgaatcacatatagcaagtctttagcgaaatgtgataattagtaatttagtagtgtgataatactaatagaatac

SEQ ID NO: 21188 - DNA, 533 bp, Arabidopsis thaliana columbia
  unsure (1)..(533): unsure at all n locations
ggtagcgatcggtaacggtacagcttcccgcgaaactgagcgtttctatctcgatgtgcagaagcagttcccgaaagtgaccgcgcagaaagtaatcgtcagcgaacaggcgcgtcggtttactcggcttccgagctggctgcacaggagttcccggatctcgacgtttcgctgcgtggcgcggtgtctatcgcccgccgtttgcaggatccgctggcggagctggtgaaaatcgatccgaaatctatcggcgtaggtcagtatcagcatgacgtcagccagacgcaactggcccgcaaactggacgcagtagtagaagactgcgtaaacgccgttgcgtcngatctcaacactgcttctgttccgctgttaacccgcgtggcggcctgacgcgcatgatggccaaaacatcgttgcctggcgcgatgagaacggtcagttccagaaccgtcagcaactgttaaaagtgagccgtctggggccgaaagccttcgagcagtgcgcgggcttcttgcgcattaacacggtgatac

SEQ ID NO: 21189 - DNA, 604 bp, Arabidopsis thaliana columbia
cctggtttcctttgctctgtacgagtttttctttttgtatactttttcataccgaatcaattcttgggcaggcatctggtgaaagtttagttggatcgaggatcaaagtctggtggcctatggatcaagcgtaacattttgtattttcttcttaggaattatatttgatttacaagaaggcaatttgcattttctctgttctggacttctatgtttgttcctttagacagcagaatctggactacctgttattgtaattttttgttttctatgctttcaaatgagtaatctgttttttaccgcaggtactataaaggtgtggtcgagtcatatgatgctgcaaagaagaaacatctggtaagcccaattttatccgtctcccctattttggttcgcctgatttgtttgtggtcaccagtagccttttgaatgttctcctaagctatacatctttgtttcaggcctttttatggtattttaattgttgtatgctgttgccatgttcgtttgcaggttatctatgatgatggagacaagaaatcttgtactcaagaatcagaagtggagtctctggatgaacagaattgcacaggtggggcatata

SEQ ID NO: 21190 - DNA, 584 bp, Arabidopsis thaliana columbia
cgccagtgtgctttaaagagcgatgcggtggccaattaaggccacactgtcatttaaattccgtttttccagttcaaatgcaattgccttcaatgcaccttcgtagctgtggtgagccagcggtgctcgtctcccccatttacggataagaatgcattttccgagttaataccgtcggcaatacctgacattaatacttcacagtcgctggcatcgagcacggaaaacttaatcgaagacgaaccacagttaataaccaaaacaaccggaaattcattcatctcttttctcatcctgagttacggattaaaacagtttgtatacgatgttcaggatggtcagcagaccaatcacggtaacaaacacgttatccagacgaccacggtatttcgccagagacggcgctttacggatggcatacatcggcaacaggcacagcagggatgcgataatcggtgcgcccatggcttcaatcaggtcaaggatgttcgggttggcgtaggaacaacccaggtggacccatgatgaagatatgctgatagtgtcagtttaccagcgacactttagttttgcccctttataac

SEQ ID NO: 21191 - DNA, 455 bp, Arabidopsis thaliana columbia
  unsure (1)..(455): unsure at all n locations
nnnnnnnnnnnnnnnnnnnnctaaagtgagccagtagtgcaacaggaaccggaaatagcctgcaatgcctgcggccagactggcggggataactgccctgactgtggtgcggtgatgggcgacgcaacataccaggaaacattcgatgaagagagtcaggttgaagctaaggaaaatgatccggaggaaatggaaggcgctgaacatccgcacaatgagaatgctggcagcgatccgcatcgcgatatgcagtgatgaaactggcgaagtcgcagatcccgtaatcgtagaagacatagagccaggtatttattacggaatttcgaatgagaattaccacgcgggtcccggtatcagtaagtctcagctcgatgacattgctgatactccggcactatatttctggcgtaacacatgcccgtggacaccacaaagacaaacacgctcgatttagg

SEQ ID NO: 21192 - DNA, 456 bp, Arabidopsis thaliana
ccaatttattccaggactgcatatatttctaaacttgtaaaaatcaatatgaacgttattacttcacgattatactattatgtattaacaaatatgacttgctatatttgatatattagaggtcgtagaagagtgttttttattttagtgaataggccttgagtttcaagtttcaactatgattgaaatgttttgaacctaatatcagtaaccttaactttttttttaggtgatcttggacaaatctatgtctctaaaccataaattgtacaactacatgtcgaatccaaaaggcctagtggtgctttttggtggagatttgtcttatgttgatgaccatccgaaccaagaccaaataaaatggtaatcacggcaggtttgtggaaccaagcgccgagcatcagccttggatttgggctgcagggaaccacgagttgcattacgcttagagcatag

SEQ ID NO: 21193 - DNA, 551 bp, Arabidopsis thaliana
gatatagtgacaagaacgatatctttataatatacttgacaaatccacaaatagaaaaggaactggatgttacataaacgttctcatcagttagattggtgttcttgaagattctagagaagaaaatgtgtctatctctgtttctcgtgttgactgttgtttttccgttgtgtgttttggtgcagccaatctttgggtatggagtgtctagagttatagaatctgggcatccagattacaagaaaggtgacttactctgggggatagttggatgggaggagtatagtgttattactccaatgactcacatgcatttcaagatccaacataccgatattccattatcttactacactggacttctcggtatgttaattaatatatctcggccttttttcctagttttgtaactggaatcactctgtaaatttaggaaatctgcttcttgatatacaaagttctggcttgagacagtgatcatgttgttgaatgtcataaactttatagatgtctaacaaaattagaaacgttgtttgaaacgtaggaaggga

SEQ ID NO: 21194 - DNA, 509 bp, Arabidopsis thaliana columbia
gtcgactctacctattaaagtcggtctctacgtggaatgcagaagaggcgttgaaatctctggagaacaatatgaatcctgacgtacgtgattgttatcattttctcattaacttgtatactggaattgcaaatgcttctgaggtttatcgagtttgggatttgcttaagaaaagataccctaatgtcaacaattcaagctatcttacaatgcttcgagcactgagtaaactcgatgacattgatggagtcaagaaagtctttgcagaatgggaatcgacatgctggacttacgatatgcggatggcgaatgtagcgattagcagctacttaaagcagaacatgtacgaagaagctgaggctgttttcaacggcgccatgaaaaagtgtaaacgtcaattctcaaaggcaaggcagcttttgatgatgcacctgttgaagaacgatcaggcagatttggctctgaagcattttgaagcggcggttttggatcagacaagaactggactt

SEQ ID NO: 21195 - DNA, 494 bp, Arabidopsis thaliana
tacatattaaactgtcaggtttacttctgatcttgtagttgcttttgtctttttttcttccattgatatttgtcaatttctgtgttgagaagacattcttgtgcaacattctttgtgcagtcatatgatggtggttttggattgatccctggttctgaatctcatggtgagttgaaaacaatttttctactatctcacagttgattttttccatgtgcagtccaactaagtggcgcatatgttattactgaattgatcattgaggacactttagataatttagttccttcatctaggtttctacttcaatggcaacccataaagaaaagaagtttactatgttcttacgttatgagggaaatgtgtttaattgactccactcgtgtatgatgcttacctacgttctgcaacttagttatgcaggtggtgcacttactgtgctattgcatccttcggttgatgggatacattggagttgatctgctgtcaaatga

SEQ ID NO: 21196 - DNA, 582 bp, Arabidopsis thaliana
  unsure (1)..(582): unsure at all n locations
nnnnnnnnnnnnnnnnnnnnnnctaaaggcgaaaacggtcgctatgagatgaccatgaaagttgcaggaagagtgacaggcggcttacatcagcgcccggaatataacgtggcgttgagcgaaccgacgctcgacctggcgcagttaccgacggaagtctggccgaacggcgaattgcccgccgatctcgcctcccgcgtgcagccgctgttcagcaccgatttttatcgcgaaaaatggctggtggcggtcgatggtagccaaattgaaatcgccctcgaccagggggaagtgaaagcgggtgaatttgctgaacctatctgtgagctggaactggaactgcttagcggcgacacgcgcgcgagtgctgaaactggcgaaccaactggtatcgcaaaccggattacgccagggcagcctgagcaaagcggcgcgtggctatcatctggcgcagggcaatccggcgcgtgaaatcaaaccgaccaccattttgcatgttgcggcaaaagccgatgtggaacaggggctggaacggcgctcgagctggcgttacgcaatggcagtatcatgaagaactgtggg

SEQ ID NO: 21197 - DNA, 466 bp, Arabidopsis thaliana
gccagtgtgctctaaagctgcaaatgttcaccgctgtcgaggtcgatggtcttgatatgaaacgacaggcctttttcctgcaacgccacccaggcggataacacataaggggagaaaaagtgggcatctgaccaaagcgtgatagcgggtttactcattatgtcctcggcaataaagggggctggctatcaaactatagagcctttttgtcactgtcacgtgacgaatactcacgtaagtcgccgcgctttctatacttgtggtgttcagatgattaaacaaccggagctgcaatgatcgatctctatttcgccccgacacccaatggtcacaaaattacgctgtttctcgaagaagcagagctggattatcgcttgattaaggtagacctggggaaaggcggtcagtttcgtccggaatttttgcgcatttcgcccaacaacaaaattccggcaattgttgatca

SEQ ID NO: 21198 - DNA, 612 bp, Arabidopsis thaliana
ggtagaactcagagaagtaatctccgcttaagtggttgatggctacagcgagttttgggatctctagggtttcttcgttggttagggttctaatgaatcttgctggattgcctccccatagttcacctgatgggatccttcttcctggcggcacaactgaacccgcttccaagattgaccgggtctcaaccagtgagccttccattagtattgagtgttgaccgatgatgcactctggttcgatggtacatgatctcagaagactgtaggcacctactgtcacatacctgtcgattattgtcgctgctggtaatcctgaaattttaaaatagataccccagaatcaaatttgtgatgtaaaaaaagaaccaagatataaatttagccttgaaagataaacaaatagtttcatcaatgtgacaagttgaatagatactgttccgggtcaaataaaattcagcagaccctatcaaaccagaatggtcactcttcaaatgtttttacttgaaaacttcccttgtctaaaccttggagcaaaaacaagttcacatccatgtgatacagctttatcacattgcacccacttccagtcacgagtgccagaaaccaaat

SEQ ID NO: 21199 - DNA, 551 bp, Arabidopsis thaliana
ctagatcacggtggctcgcatctaacaacctttggtcaccagtgtatgagtgagtagttgtcattgtaccctttatgatccctaacaagtttaacacacaacacaatattactcagatttttacaagattgcaacatagcaacatttgactttcaatgagacgcttaccaaatttctggtcaagaaccttgacgaatggagcgagacagttagtagtacaagacgcattgctgatgatcgtatcttcatggctgtaaagttcagcattgacaccaacgacataagttgggatgtcaccttttccaggtgcagtgataagaaccttcttggctccagcctgaaggtgcttccagcaccgtctctgtcaacaaacactccggttccttcgataactaagtcaatgcctagttccctaaacatcatcaccaggtttagatctaactgggttgattcaattcaaatgatatgagaagtgttgtttaacttaccccaggggagattagatgggttacgatcagatacaatcttgatgatctttccacaacagagag

SEQ ID NO: 21200 - DNA, 509 bp, Arabidopsis thaliana
tttgctctttccgcatcgttaagtctcttcaacgtatcagggttacggtgctctgtaagagcttctggaaagcttcaatggcaggttcatagtctttcgagcatttggccatcttagtcaaagcagtcccttttctagtcaaagctctagctaccatcttgtaatctgacctaagctctctacccctttccacagccttgttacaatcctcaatgcactcattgtactgaatcaaaacacaatgacattaaaaactaatcaccattgtagcacataacaagcaaatcatcattctaggcttctagcctatcagcaaataaagggacaaaacaaaagagcattacacatatgaaaatcatacctttcccatctcaagatacacagcagcacgatttgtgaggtacgagatgtcttcatcatcaatctcaatagcagtagaataatgctgaatagcagtttcaaagtccttctttttatacgcagcattcccaagctctttctccttttta

SEQ ID NO: 21201 - DNA, 884 bp, Arabidopsis thaliana
tcatatacataacttaggcacacgtcaatctccaataagagctaaagaggtcaaaacaaaccttcaagattgtggtgagaggacttccacatggaatcttgttcctataaaatcttgatccagagagaaagatgagaatagagacgaagatagcaatggtagaaacaccgaatccccattcccatcctttgttgtcttctaaccaaactacaaacgtgacagcaactagtgctccacaagcaagacaaaacacgaagtagttaaagaacgttgacctttgtttccgacctttaggtgtactctcatcaaactgttctgctccgtgagatgctaatgaacctttgatccctcccacacccaaagctacaaggtacaaccccacgaatagcatcgctgccttcgaaccactcacttcttcacatgtgggactatcgcacgatggaggcattaaggatggtgtccgagcttgaattgtgagtatgatcaatccctgcacgtttcccaaataaaattttaatcctattgatttgttaaaatcattaactagagacggttatttttttgggattagcaaagaatagtatgggaatgggaccaggggcacgtgagagattttaacccttgtggttcgtgagagtcagatcagcgacgtgatacaaataattgaaaccgttatgaacgatgaaacgtcgttcgttattaaatgaggtatggacaaagcctaattttcgtgtggtcgcctcattggccactgccttttcttgaagaaataacttcggttacactgacgtaacaccagggttttaaaagttttggactctagtatacattatccaatcatatattgatatatgttgattctagatgaatgtatatggaatata

SEQ ID NO: 21202 - DNA, 557 bp, Arabidopsis thaliana
gagataactggaaaactttggtataaattcatattttcttacagctagtagatctgtctttctcttcaattttattacaaggtttgtaggggactaaatatcagtcaccctgggtcatgtgaaaaaagacctgcacattgaatattctcagtattggtttctgccataatatttgttttctgtgtgtgcttctatattgacattttgattttgatgttttagtcaacagttgattgtcctgtaaaggttttgtaaaaagttcaccgttaaaaaactgtgtataaaaactatggcatttctttgcagatatgaaacaggtgaccatgtaggtgtatatgctgaaaatcatgttgaaatagttgaagaagctggaaaattgcttggccactctttagatttagtattttccatacatgctgacaaggaagatggcccccattggaaagcgcagtgccgcctcctttccctggtccatgcacacttgggactggtttggcaagatacgcagaccttttgaaccctcctcgaaaggtgaacgtctgtttgtttggagatta

SEQ ID NO: 21203 - DNA, 2336 bp, Arabidopsis thaliana
tcgaagacgcaacttattggtgttttgaagatttccaaattcggcccacaactttctcctatttttaatgaaggcccaacacatttttaagacatatatatatatatatatatatagttttcaggtcattgtttagacctaagcttggagtggctattctccttttatcttttgttcttgggagcaaaaccttgtggagactccctttagagaagatctttcttactctttctcttgatatattgactattgactagagaatcaatcatgttttgttcttctatgatcatgtttgagtagttctcttgttgggtttagggattctcaattagggatttggatgaattagtagatcgaaaaccctgttaggataatatttttagaattcttaatcttagattgttcttaatgctagttttagagtaactaactagaacttgattttaggataataggtatgcacaccataggtatctattactggaactatcttagatgagcctagtatttagatgcgtgctagcgtcgattacttaggtgaacttatcaaacctgattataatgcttgcttagttctaggaatttacaagagagttgggatcaatactattaagcatagtgagtttggcggaacaccaccggttactttatattagtgatttgtgttctagaaatgtttgttaataatcctagtttactgctagatcaactattctgatatttcctgagaatttccctaaacccgacgtcttaatcatatgaatctacaaccaattttaattgctttcttgtcttttacttttataatattttctatttagctttattcgaaactgttagtctattgtgtgatccgagaactttgtggaattcaatccctaagtgctataacaacctctttatttgagagaatagtcattagggtaatttgactcatatcaaatttggcgccgttgccgaagttctcttcgatttaccaatagattaggtgtagaatttaggctaagcttttcttttcttttgttacttgcgtgttttttttcttttttttcttgtgtttcaggagtttaagaaattcaaacgcaactcacgatgttgatagtagtacctgatgctgttggagtgttacgcgacagagctggtcaggcatacaatgaagagggtcagaaaatagataacagggaaacctgataccagaaatcgccgatggtgtcgatcgacgacaacttggaaagcaataaaggttacttttctcaacaacttttataatgatgcaaggtccgaggagctgataatgaagatctctaccttctctcaagaagcagctaaagcatttaaagccgcttggatcagattcaaaggatattagagagattgcccgcatcattgtttcactgaggttcagttgttaggtatcttccttagaggagttgattgaaagctagtaatgggaatttcatgtcaagatatccagaggatgcaacaatgttgattgaaagcttatcttctagtattagtaccaacagcgttgacattacaaggaaaacgcaagttcaatatgttgcacatgttgacagttttgccattttagagaagatggatcaacatggatatatgagctacaatcagcaatctacacatcagaaaccggttcagcaatctacaagcttcactccgacttatgcttcttcaacccaagcccactgataataggtttttagtcaattatcctaaaacaccaatcatgtcgttgtagtattttaggttgtcaatccaaatgggtgtgatgctagcaattaagatgcaatcagagttcacagagtcaagccaaacaataacaggttttggggtttctagcagtcctaagtgaacatgcaggaaacagaaattcaagcagaacagtaaaatcactcgaccaacacagcttgttgccaagcgctggatgtggtcgagtgacaagtcgagtaacaggcaaaaatgctagcagagatactcgactgcacagtctgttaccagacaactgggtggtcgagtatcaggtcgagtaacaggcaaaaattgcaaaaactaagcaacaagttacaagatgcagtaaacaatagcatagtaaacaagaaatcaattagatgagaaatttccgaggatggggtaattgagtagtttcatttcctcaatttacaggtgagtgacatgcttaataaattatccctagacaacaagttcgataaccaaatctaagtgccaccgcaacagagaccctcaagataaacaagtcccagactcaatcaccattgacgagagctaacctaacatgcattacgaatcggggatcctgt

SEQ ID NO: 21204 - DNA, 481 bp, Arabidopsis thaliana
cttcagctgaatttgaagtgaaggtagatcctcagtattaactgcacttgaagtgatatcctgcagaactgcttttgtaaccgtaaagacattaaagtttatcccagcagagatccacattttaacctcaaaatgttcggtcaccctgtagtcattaaaaactatctctgtcaaggtagtctttccaacccctggcataccaactacggagataacagctggtttcccaatgcttatttcatcatcagaaagcagcaaattgactaacgctagcttatcttccactcgcccgaccaatctgccttgtggaagatcatcaggtcttgaccgtgatgcttgcctccattgtggttctcgagtctcgctatattctttcaatccaataacttcaatgtgtttcacatgatgttccagtagtctaactactttttccatctttggttctatctttttctgaatggcttctcgaccagccatgaga

SEQ ID NO: 21205 - DNA, 510 bp, Arabidopsis thaliana
cccaactttctccatggctcttgcaattagttcccctatttcacgctccccatttgcagatatagtggcaacctatcaaaggaacatatgcagtagcagtaatagatcaacctttggtatagcattcacaattcctgacttatgaatatgtttctaaattcacctgtgtgatctcttctggggtgctaatcataacagctctgcttttcaaatcagagacaactgcagcaattgccatattaattccaacacgcaaatccatcacatttacacctgcagccaccgacttgcagccttcgatgagtatcgcctgagtcaaaacagtggcacaagtggtacctatataacgaaaggaaggcaagcagaaattaagactttactattatctcttcaccgtatgttttcaataaaaacttatccatgattatgaactcaaaacgagaaatattaccatctccagcaaccttgttagtggcacttgcgacctgtttgacgagttcggcaccaatg

SEQ ID NO: 21206 - DNA, 543 bp, Arabidopsis thaliana columbia
agaaaatttagataaaaagtaaagaggactgggagttgtgatttataaggattttgtaacccttgaagatcgcaatcccattctagatcatattgattcccggaaaaactcacgccttccaatctgccctgcatttaaaacatgtttctaagacgagtatttaaaaaatcaaagaaaataggaaagttttcataaattaaaaatgagcaggagcccatagcaagttcaaaagaaaatagaaaaaaaactaaagtggcgagttcgggagacatttatggaagtggctcaagaataggctccttcatcgccggttcgcgttcaaagtggacgctttgtttttgtcgtccgcttcaaagtcattgttgacaagtttccaagggttgctgtcgtcctcctcagttgttgtcctcctcgctgtcggacgggaccacttcgactggagcatttacgtgaccaggaacttgaccacgagcgcaaaggtacatacggagcatagtcgggattctggcacacaattgaagtcctccactccattgaaaggga

SEQ ID NO: 21207 - DNA, 592 bp, Arabidopsis thaliana
taatggatgaccgggaaatggcggcagggatatcagctgacgtggcagtggtccttgcttcggtggtcccaggtgtgctacgttgtttgtcacgcggatcaccgaagacggcggcggacgacaactcgagtaccgccgtattagtacggtcaagtaaatctgacggaagcatgtcttggccttccacatgggggtttatcagaagaccggaggactctgtgtctagggtcagaatgctgaatgccggcggttcttcttcgcgcgctacggccgaggaagacgaagagagaaagaacgcgacggggaaagccaatttgggcctgttgggctttcaattcttactaattgactcgtcgatccaactcggtcgtgctaaataaattcatgggtcatatcacagacttgctcatgaaattagtacaactaaattattttgtgattttaaattttcctcttcaattaccgatttattatgtttacaccaccataccataaaatgaaaaaaaaattacaaaatgatggtatttattatgagacaaataacggtatcccaatatgtttttggacgataaatgacttattgaattgagag

SEQ ID NO: 21208 - DNA, 212 bp, Arabidopsis thaliana columbia
atacgcccaagcctgcaaccttcatatttccatttacgatctgctgctcactcttttctctcatgctaatcaaaagctgaaaatttctataggtgccgtaccggaagtgctgaaattcttgtgaattttgatgatatatgcccgtcaggcgaatgctcgtatgaccaggaatctggagcgaaagattcccttcgaaacttccatatatgtgg

SEQ ID NO: 21209 - DNA, 2340 bp, Arabidopsis thaliana columbia
tgaatcacttcctgacacacttgctcatgtagtacaaagttaacaataatattttatttttttgattgatattacgaaactcaaaaacaaatacttaacacgaaataaactgaatttgattttctttgtttttttttaatttaaataaaacagaaactagactaatgcagaaactaattcagaaagtaaggcagactaaaagaaacgatgaaacctggcaaggaagcgcaactgccgtctgataccaagatgatacaagactcggtggtgagctttatatctgatagagatggtggcttcacaagctggcggtcgcttctctcttgtgaaggaaagatggtcgatgatggagatctaacacgatggcgatcgcttctctcgtgtgggatctaatggaggggaagtgctggcggattgaagtacaccacagagatgtgataagtctctgatacagtacatgaacttggccttggtgaatcacacacacaagacaaagaacaagcttattctcttaagaacacttaaagagaagaagtgagaaaatgcggttctttattgataatcaaaggtaaaaatcgtacaactgctgtatggggaccttataagagtccttcagctagccctaaggccgaaattaaatgtaaaaacgcaacaaggaagcaaataaaatcaaaacacaaaaaccattgtttttagaaagaaaataagctaaaataaggaaactaattaagttctcttgcggagcacgattgagggcgactctagccgttgtctgggctgtgtggacctgcaaagataatataaactgaataaaccttacctagatgcgttttaggcccatgtcgcctgagtcacttcctgtagtacttcttgaggtacttctggagtcaagtcttgtgctcgtttgttggttggttccttgaagtaggggtctttctggagttcctcttgagtagcttaatcaacgtcttcgagctcttccatgtcctttatgtcttgttcttgatcttgactctctcgatcacttgcagatgtgacacttgaatcgttcgtctcttgaagctccaaagtcttctcttggtttctagaggtccttgaacctgtcaaatgatatttcatacttgggggagtagttcgttcaagactcatttgggtgaatgcttcaacaagctcttgttcgcctattagatcatatccggtatggggtgctacgaaccagtttactcctagctctagggagctcaaaatatcttgcacaactaagttgaaccttttcttcaattgtttagcctttgaacgtgtcatgataccctccgggacttctggtacaggatgtagtataagatgtggtacaggatgtagttcaacggtttgtgaagtaaggttgatgtccgcatcaaccatgaaataatagaatggtccacatggtgggtgtataggtccacaaatgtcgtcttgggctcgttcaaggaattctggtaattgtttagtaattttacttggcgatagccttataatcaattttcctagagaacacacaacacatgttcttttattcccttgataaatctcttgggatttcattgaatgtccatatgagctctctataattgtttgcatcatcgtggtgcctgggtgaccaagctgatcgtgccacaatgtgaaatcgtcatgatctcttttgataacatgatgtgattctatgtatgatgcaatcctgatgggagtcttgttaatttctccaaaatgtgtttttttccccaaatttttcagaagtgatacacatgtacttcttccattctcagttgcagactgagtgtcatatccacgaaggatatccatgaaggtatatatttttgaaactcaacaaaagtttttttgaatttggagaaaataatgcattatttatcgagaactttgtcttaacaggtaatccaaaatttgctttactcgtcccttcaattaagtctgtgggacctgatatgttaactccaacttttgttgatttcaaatcagagaaatattttttatgttttagaatagtgtgcgttgttctactatctggtatgcaaatatctccaaggtttgccttggatattgttccatttgtaatgtgatccatttcctcaatatgttctgcgaggttcacttcctttccttttcccttggcggattctttgtatagagcacacagatgtgctggagttcggcatacctaagaccaatgttccttagtgttgtggatgtcggatctcgtcagtttgccccgacccaagatccatcatcatcaatcagtgggctcaaaacggtgggcctgaaccacccgtgacgaagtgggca

SEQ ID NO: 21210 - DNA, 1813 bp, Arabidopsis thaliana
cggtcttctcacactgaaacacaaacatataaagaagttgtcaatataacattgtagattaaataatggtaaggagagaagaatacttatcttacatgttttcgtgcacgagctttctatgaggtctggccggaatggtgtttatatatgccaaggccatctggatcatgatatctgactttggatcttgccaaaaccgaactaaaccagcccacacattaggatcaatctattttggcttggcatcatcacccttgtccttccactttcccttccattgtgacacttgatcagtcatcctatcctttagctttgcttcaaactcaatccttactctttcagtcttttgttaattaaacggtcccagttatatacttgctacaaaatagacagagcacatatcagaaatgaaaccaaacaacaaaacaagcagaaacatcaaaagagcacataacttactacaaacgtttcataccatcaatcgatcacaacatttgctgtatgtgaccaattggcatgaggttctttgaaatctctttcgaagatgcgacgcactgttgctgcaactgcagggtcctggtcaaacctacaacacgagcaatcaaacgttctataaacctacatgaaattaatatttctttaaacttccaaggtactataatgctaaatccattttacaagttgttctataaatctatgaatttaaccttaccaaaaagttatcggaggacagtttgggtctagtcttgtcaagccagcacgaccgagactatcaagcagctcctccaatgtcaggttgttgagttccttaggtggaggagcagaatgattgacagaaggctgagtggttggcgttggaggcgatggtggatggcgtgaaccctgaactcctaagatattcccatcactgaaaggagcattggcatgcaacggttcacgctgttgttgccctaaaccgtgcatgagtattctccgacgtgggcatcttgcacaaaaaaaaacattgaattagatcgattatgtagaagaagttagatcgggaaaaaataagttagattggagaagaagaagaagttatattggagaagaagaagttagattggagaagaagaagttacatttgaggagtttcagatcgaaacaaaaatagagaagagtcgcggcggctgctgctggagaagaagagtcgcggcggctgctgctgtgagaagaagagtcgcggcggagaagataaatcggagaagaagagtcgcgacagagaagattgatcgcagaagaagaagaagttagatcgagaagaagaagttagattgtagaagaataacttagatcggagaagaagacgttacctttgaggtgtttcaaatcgagttgcggtgggtgctggagaagaagagttgcgaccgagaagaatacatatcggacaagaagaagagaggcagcgacgaagaaatcagatcgaagaaggaagagagatttgttgcagaagaagagaggcgtagaagaagaagagaatcagagattagggttaggattttctgagatgcggctggtttgagcaaaatcccataaaaagtgctttcgccttctagaatttcctcgcaaatttgcgagagattggtgaggtatgctactcgtctcccaaatgaatcgcaactccgtcgcaattgccacgcaaatttctctcgcaaatcggctgtattcttgtaatatatttatttatttattatccgagcaaaaatatgcatcgttttcggccatggatggataaggagcgatttgcttctaactcattgttgacgacagagtaggg

SEQ ID NO: 21211 - DNA, 2542 bp, Arabidopsis thaliana columbia
caaaacaaaaccctgatatatctcttaatattccctcaaatctcaatgttcctttcatttctctcacacctcaactctcccgcaatctctttgaaatctctctcaacctctctaccgtctccgtctatctctttgaaatctctctcaatctacaacaatacaggcaatttgcgagggaaatttgagatggcgtaaatccctcgcaaattgctatagacttgcgagcactttgcgcgggaaaccaatacgtcgttaatcagtcgcaaaatttgcgagggcagaattcccacgcaatattgcgtggcaactgcgagaaaattgcaacgacggaagaattcctcgcaaactcatcgcaaattgcgagggatttgctgtacgataagagtctcgcaaactgcggtaaacttgtggcgtacaaactttttgtagcaaattttgcgtcggagttgcgactccttggcaggttaggtcagcacattttaaataatcttcctgctttggttggtagttgaacttctctcgcaaattcatagcaaaatagcgatgttcctcgcaagttcctcgcaaatccctcgcaatatgttttcgcgcatctataaataaccaacgtaacatgtacaaaattttaatgttcaaaatacaacaggatacacctcgtcagaaccacctaagctaagagatacattccataccccaaaatctaacataaacatataaaaaaaaatcttacatgttttcagaaattgtagagagaagtaagaaaaattgcaaaataattgagagagtggaagtgagagaacaaaatagttaagtaaaattcaagttaaatagatattcaaagaaaaaaaaaattacaacaacttaagcttttattaaattaaataaaataacaatcaaacgagtattatttaaatttagaaaaataagtttaataggatttactcaaataaaatttgtggataataataaaaagaaaaataggatttagcatccccacatcttctcaaaattatatattgaacaagctatagtcgccttcttccgttcttagctcatcaaaaaagtcatagtcgtgatctgttcgtcgccttcagttgttagctcatcaaattcatagacgtagtcgtcttttaataatagcatccacgtgaaggggtaaacaaatctctctccaacgatttttggtttttatttgattatctttgatctgtttttatttttcctctataggttgaaactactaaacccacgttgagttcatgaactctaatataaattgtcttcttcgttgacttagatggagcctctcgtcgtcaccattattgatcaaaagcttcattaaatttctatctcaattcagcactattattgtgtggttagagttatcgatcaaatctaagtggagaactcgtcacaagcagtaacgtcccgccataatcatcatctgagatctttgattctttatctgaaccatccactctgtaacatgttataagtcagacttgaataagctcctagaagaatgcacatcaatgcatttttgtgcatcaatacacacacataactatcataaacttagaaaatttgccttaagttgaagttttgtgagctagtactcaagtcaaaccaagcaagattatatcaaatctaattctcaatgcagattcacataaatttcactccaaggacatggaaactagtcacgaaaaggaaatgatcgatgttataagtatctcaagagcgtgtttgtaacgctgagttcactcatttggaaatgagatgatgactttatacatgtataagaaaaatattttatattttcgacggatttgggagggtaaaagtttcaccgttggaaaagcatcgggcaccaaactttaccctccaaaacgaaacaattatgcgggacttgtttctcttttccaaatcagttttacgcttatttctctcaaaacaaaacccttaaatatctcttaatattccctcaaatctcaattttcctttcatttctctcacatctcatctctccctcaatctctttgaaatctctctccacctctccaccgtctccttctatctctttgaaatctctctcaatctacaaggaaacaggcgatttgcgaggcaaatttgagatagcgtaaatccctcgcaaattgctatagacttgcgagcattttgcgcgggaaaaccaatacgtcgttaatcagtcgcaaaatttgcgagggagaattccacgcaatactgcgtggcaactgcgagaaaattgcaacgacggaagaattcctcgcaaagtcatcgcaaattgcgagggatttgctgtacgataaagcctcgcaaactacggtaaacttgcggcgtacaaactttctgtagcaaattttgcgtcggagttgcgagtccttggcaggttaggtcagcacgttttaaataataatcctgctttggttggtagttgaacttctctcgcaaattcgtagcaaaatagcgctgttcctcgcaagttcctcgcaaatccctcgcaatatgttttcggacatct

SEQ ID NO: 21212 - DNA, 2041 bp, Arabidopsis thaliana columbia
caaacaaactaagaggatccctgattgaaattataagaaaacaaagtaagaagacaacagattgattggttgtaaacgattaaataaagaggtaggaacagggtattctcagaaaaactattggttagtagatctaatgaaagctaggttgttatcgaaccattcttaaactcaaactctaattatggaataaccggtggtgttctgcgaaactccctatgtctatagcaaagaataaccggagaagccaagagagctttaacctaaacatgcattctaaacgagttcaattgttcaccatagtagataggccgattcttattacacaaggctcatcaaataatagatccaactatagatacctatggtgggcatatctattgtctcgattcaagatctagttaattactctagatctagcattaagcataatcaaagatgaagaattctacaaatatcctagcaaaggggggaatctactaaaccatatgaatccttaatgagaaaccctattcctaacaagcagactactcagacatattgaatgaaacaaacaacataattgagatagaaagcataaacacagcaataaagataagggaaagaaaggatctcttcactgtattgaaaactgaatgaatctctgaagaacaggggatgaatagcttatgtctctcaaaataggattttgcaaaaagcttgataaaagaaaaattaggtctaaaaacaatataaaaaccctataaaacgtgcagggactaataatgcaattaggaaagtcttctggggcaaatttcctcttctgtaaacttgaaagcgtcatggagtttgctgggccgaaactggtgtcgatcaacactctctctgattcctgaatccaaaatcgtccttagcttccttttccttagcttttgctccaaaatgtctcattatctccattgttgtcctattgcatagaatacctgaaaagatactaaaaagactcgagaaataacataaagactcaaaatcctatatctaaaacatagataaaatcagtcgagatatatcagatcacaacctagctatttctagatctactaatcatttatttcttgagaataccctaagtttgacgcttttattatcttgatttacattctcataatctattatttgctttcttgttttattttattttcttacttatttgtttagcttaattcaaaatcattagtctattgtgtgatccgagagctttgtggaattcgagcctaaagtactataatcgatctcttatttgagagagtggtcttaggattaatttgaccgacatcaaatttggcgtcgttgtcgaagttctatacgattcactattagattaggattagaattttgtctaagcttttgttttttctttttctttttagttacttagtctttttcttttctcttgtgtgttttaggtgtttgtctaaccgtagaaccggaaacaagcaaagaacatgaacgagcgtaagattgattgattcatggctaagcttaacgcagaccacaatctagttgttgaggatgtcgattatgttggtagaagaagttttcagaataagagatttgaacaccaacaaggcgacaaaggattttgtgggaatggtccggctagctacactcaaaagtctcagttccagcagcctcccccccccccctctccacccgcaccaagaagcaagatagaatcaatgctggaacagattctcgaaggtcagcagaagatcttaaaaagagctatccctatatgaattgagagtagcctaacaacttcttggcatgctgcttcgatggaaagtgaagatgagatcccgaaagttgaggagagtgatgacgaatttgtagttgcaaaggcagtgtcgaccgaaaccaacccatggtattgatcgacaccaacacatatatacgagacatcaagctgtgatgaagcaaaatcaaccagactcgacattgatctccagaatcgctcgacacacattgatagtgtcgactgaacaatacgaaactgagccag

SEQ ID NO: 21213 - DNA, 1208 bp, Arabidopsis thaliana
ccctcccatcgctagacctcttctctgtctgaccattccctataagccgggcttttatagattcaatcatattagcagactcagagatagtatcatctgacaattgcagcatgagaggagaacttattcttaaactatctgaagaagcattcattctcaaaagatcaggagctccatccacagatatcttcttttcggattgtggacattgatcccaagatggagggcctctatccacaaaactcaatagtttagatttctgcaggaaaaatgacatcattaagaatgatgcagaacaaaatttcctcggagtatatgtttatttaaccttaacagtcgcatattatagcatcagtcatgctaccaacctggagaaaaatcaagaaagaaacggggtctttggaatctgggtcatggcagagggagcaaacttcacggacagctatttctgaatcatgttccatcacagaatcacttgtttcaaattcagatctcggatcatcatcatccatgctggaactcaaggtagacaagaactttgactgttcagctttcatttttgcctgcatgcaagttatatataagcataactaccatatcctggaacttattaattctaactacagataacaacttgaataatgagcataaaaacaatttagacagtcttatacaaaaatcttctattaccacagaggtaactatgtctacgttctgcatgctccttgttgatgcttatcaacaaggagatacattaacagggagcatgcaggacccagacaagtcagggagcgaacagcagccatcatatgttcaagtgcatgatcagacatcaatggctaccggttccatgtcaaacttttgcactagatttgaaataaaaggatcttaccataatagcagcctgcctctctttagctttagccttgcgcttctcatcagaagtagaacctgacatgactttatcgaagccagattgaccaaccacctcgggggcaagactttgcaataggttcatacaaacagaatcaattgcactgaacttcttcagcagatttccaatccaggacgaaatattgcaactgcctggctctggaaattgatggcggccatctcccatacgagtcttcattaacgaaacaagaagagacaataaactttctttttcagtcccttgagctataccaattatttccagcgcgatcctc

SEQ ID NO: 21214 - DNA, 1929 bp, Arabidopsis thaliana
cgtcggaggaaatcggtagtcggactgtgaccggcaaggaagaagaagggtcggatcgaccgaacatcgtgaaggaaggtaagggaaacctagacctcgagtctaaggattctagaatacgttaattgagtcgagattccttgaaaggaacgactaatgggctgggtagaatcgggtcatgtgcaacctacacaagactcagtccgggcaagggatcggctagggcggggacgcggctcggtggaggaccggagggtcttaattgacctaccgagaatcggctggacttatgcgcgatcttcccctctccaaatcctctccgcggatccgagtagtgtaaggactatggagcattgcatggacttgcatatgactaagtaaatgagattacttatggctctatgactttcaggaaccaatggtgatcgtgggaaggacttggcttaggcgcgagagactcaaggccgggatgatgggtggtgatagtttcggatagtctagggatcaattatattacttgtaatagcttatatgcaaactcataagttgtatcgaatcctttacttaattaataaagtatctgattgtttgtttactctattcgtctcatatattgaatcacagaatcgtatgaaacggattacactagggaatgaacctcataaatggttagggtccattcacttagtgacttgggtcgagagatttgcgagcatggcccaacccatgactcaattgaccggaaaagacaccgcattcaactggtcggaggaatgcgagagaagcttcctggagttaaaggccatgttgactaatgcaccggtgttggtcttaccggaggaaggtgagccctatacggtctacacggacgcatccatagtaggactaggatgcgtattgatccaaaaggggagtgttatcgcatacgcctcgaggcaattgcggaaacacgagaagaactaccctacgaatgatttggaaatggccgcggtagtatttgcgttgaagatttggcgatcatatttgtatggtgccaaggttcaaatctttactgaccacaagagcctaaaatacatattcacccagccggagttaaatctaaggcaaagaaggtggataaaacttgtggcggattacgacttgaacatagcgtaccatccgggcaaggccaaccaagttgtagatgctttgagcaggctgcgcacggtagtggaagcggaaaggaaccaagtgaatttggttaacatgatggggacattgcatttgaatgctttgtctaaggaagttgaacccttagggttgagagccgccaatcaagccgacctacttagtaggatccggtcggctcaagaacgagatgaagaaataaaagggtgggcacaaaacaataaaaccgagtaccaaagctcgaacaatggtactatcgtggtgaacggtcgagtatgtgggccgaacgataaggcgttgaaggaggaaatcctaaaagaagcgcatcaatcgaagttctcgatccatcctgggtcgaacaagatgtatcgcgaccttaaaagatactaccattgggtaggaatgaagaaagatgtggccaggtgggtagccaaggaagagcatcaagtaccaagtggaatgttacaaaacctacctataccggaatggaagtgggaccatataatgatgacttcgtcacgggactgccgacggggatcaagtccaaacacaatgcggtatgggttgtagtagaccgattgactaagtctgcgcacttcatggcaatctcggataaggatgcagccgaaatcattgccgagaagtacatagacgagatcgtgcgattacatgggattccggttagtatagtgtcggaccgagacacaaggttcacgtcaaaattttggaagccttttcaaaaggtcttagggactcgagtga

SEQ ID NO: 21215 - DNA, 1662 bp, Arabidopsis thaliana
ctaaacaataagaccggtaccaaacctcgaataatggtacaatcgtggtgaacggtcgagtatgtgtgccgaacgatagggcattaaaggaggagatcctaagagaggcccatcaatcgaagttctcaatccatcctgggtcgaacaagatgtaccgcgaccttaaaaggtactaccattgggtaggaatgaagaaagacgtggccagatgggtggccaagtgcccgacttgtcaactggtcaaagcagagcatcaagtaccaagtgggttgttacaaaacctacctataccggaatggaagtgggaccacataacgatggacttcgtcaccggactgccaacggggatcaagtccaaacacaatgcggtatgggttgtggtagaccgattgactaagtctgcgcacttcatggcgatctcggataaggatggagcagaaatcattgccgagaagtacatagacgagatcgtgcggctacatgggattccggttagtatagtgtcagaccgagacacaaggttcatgtcaaagttttggaaggcttttcaaaaggccttagggactcgagtgaacctaagtattgcctatcacccacagacggacggacagcccgaacgaatgattcaaactcttgaggacatgttgagggcatgcgtcttggattggggacgaaactgggagaaatatctaaggttagtagagtttgcatacaataacagttttcaagctagtattggtatgtctccctatgaggcgttgtatggccgagcttgtagaacaccgctgtgttggacgccaatgggcgaacgtaggttgttcggacctacgatcgtggatgaaaccacggagagaatgaagttcttaaaaatcaagttaaaggaagcccaagatcgtttgaaaagctacgccaacaagcgtcgaaaggaattagaattccaagtaggagacttggtgtacttaaaggcgatgacctacaaaggggcagggcgattcacatcaaggaaaaagttaaggccaaggtatgttggcccgtacaaagtgatcgaacgagtaggggcggtggcatacaaacttgaccttcctccaaaactagacgcgtttcacaatgtctttcatgtatcacaactacggaagtgcttaagtgaacaagaagaaagcatggaagatgtacctcctgggttaaaggagaacatgacggtggaagcatggccggtacggatcatggaccaaatgaagaaagggactcgggggaaatcaatggatttgttaaaaatcttgtggaattgtggaggccgtgaagaatacacttgggaaaccgagactaagatgaaggccaattttccggagtggttcaaggagatgggtaaagatcaacttggattcgatttgtcgaatccaattcaaaggggagacttgtaacgcccgcgatcctcaataggatcgttggctgggacttggtccgagaaaagaaggtggagtctcggacaagtgggaaggagttggccataagctcggacaaagggaaatcatgcgggctaagctaggatcgtaaaggaatcagctgggtcagctcgtccgaagctcaagctcagctggaaggagtgacggttactcgggttgagtgacagtccagctcgagcagctgggcgagtgacggttg

SEQ ID NO: 21216 - DNA, 2551 bp, Arabidopsis thaliana
tataatcgagtcactaattgtgttggatttgtgattgtattttggtcgcataatataacgcgacaatgacttaaaaatatgagtagtaataatctgtgacaagtatgttacgattttatcgccactagttgtggcataattgtgacagtatcgtccgccacgaaatgtgtccatttttgcgactatattaacgtcgtcacaattagtaacgaattgttactattgttaatcgtcacatttgtttgtgacttttttgagaccttcatggatttgtgacgattttattgtgacattttaaatttcgtttcagtttcgtcataaaaaaattattgtgaccaaatatttttttattgtgacgttaatcatcgtatcaatattcagtttttattgtagtgtaagtggatcccaaatggggaaatgggtaaccttgagtgggtaaagggtcggaatgtgtttttgaacctcagctactctatgggaattcatttccattgtggcgtctccgagccgtgccgactggccgagttctagcgcggaccgggggcgttagaatgggtggtatcagagcatggttttagggcttttgggatccgttttttttttcaaacgttttatcgagtaaatagtcgcaaaaggcacttaggataatccgagtcgttcaccactattaggataggggggaaatattagatacctaatatcgttgttggattggatgcagatgtcaaggcaggtgtcggacgagaactagtcgagagatgtgatgtctagtcgtggaaactttgcgcagtatccggagtcggataactagataccgagtgagagtggtgagataaatggagattatattcacttggagccgtatggattacctgaatgggaaacccccgattccacgcccaggcactcgtcgcccgtatcgatgttcttcgatacatcaaatgagagttactttcgttctcgatcacataaccccgtacaatccccatcgatcgagcaaaaccatggaaaccctatccctgaaaccaagaaccaaggagccccgaaatgcagcaaaccttagacattattcagagtcaattgggtcatatgattgaaacacaacaacatcaacaacaaattcaagaaagccagcgagaggaatcaacatccgcaaagttcctgaagctcgtgatgatgatgagagacttaggaattcgcgtgtttaaaggagaacataacacggtcgtggcagacaagtggctacgagaccttgagatgaattttgagatttctcgatgtcctgacaatttcaagagacagatcgcggttaacttcttggacaaggatgcacgaatttggcgggagagcgtaactaccaggaaccaagaccaaatgatatcatgggaagcttttagaagagaattcgaaaagaagtactttccaccagaggcccgtgatcgattggagcagcaattcatgaacttagcacaagaggcaaggagtgtccgatcatacgagcaagctttcacgcgactaaggaggtacttatacaacggacaagacgatgaagcattgatggtgcgtagattcttgagaggactcaggccagagatatggggccgactacaagcagtcacatatggcagtgtcaacgagttaatcgaacgggcaattaatgtagaggagggtattgagttggagaagagtgtaacaaacaaggaaagcgatcgatcgggagggaggaagactaataacacggagaccaaaaacaacgcttctaaattcacactaaatcaggagagagactatgtcgaggaagaacaaaggctagctataacaacgataagggaagaaacgattttgatccaaggggatgttacacatgttgaaagttgggccatttcgcgcgagtttgcccagtgttacccaaccaacggcagtgtatgtcacatgttattcctgcggtgaagaagggcatcgttccaatgtttgtccgagtaagaagacaggccaagtgaatccaaagggccattgttattggtgtggaagccaagaccactactctcacgtgtgtccaagtaaacccacgggacctgacactcagcacaactcacgacccccgccagcatcaggagaaagaggacccccggcgaaacgtcaggccacggttgctaacgtgtacgcgtcagatttagaatcgacagaaaccacaggacctcttaaaggttccgtaataggtttgtatgggttctaactctttttttaaagtagtttttagattttgtgtgtgaattgtgagaatgttttggctagtgtgcgtgaatgcgttgccagagactgtaagtattggtggtgtacccacatgtgtgttatttgactcgggagcaaccaatagcttcattacgcctgaggtggtcgcaaagttcaccacaatttttaaggaaaaggaagttaatatccttatccataccgcgagtgatcaaccaccccttcaaacccgtagaatcctattaggagtacccgtagtaatccataggacaaccttacccgcaaactttttgattatgcc

SEQ ID NO: 21217 - DNA, 2367 bp, Arabidopsis thaliana
catttttggccagaccaattagaagacccagcacttgataacttgatccaagacttacacgaggttaagcttgttaaaggttattgggatgtgaagacgagtgagaagaagaagaaactcttaaaagataaagaagcggaggtgtctgaatctcccgctaagaaacagaaggtctctcacggtgagcatgttgattctcttgagaaagatgcagaaaagaagaagaaggagaagaagaagaagaaggaagtagctgtcgaatctgatgaggacgaggatgttcgttctcgtgagcaggatggtcagggagaccagcagtcgctcgtggatgtggtgtccaacttgatctctcccttaaactctcgatttgacaccgttgatactagcataaaagaaatgtcctcccgtctggatgtgattggatgtcaaatcgaatcgagtgttgaagcaaagtttgaaggaaggtttggatcgattgagaacgacgtcaaacagattaaagagcagctgaaggccatagctgattcaaaatcaagcagctatattagagatatgtttttatccaaaccacagccccaaacgcaggaagacaatcgtaaggcccaaactcaaaagacaccagacgttccaaagaaaattacaaataaccaatctgctgctcctagtcctcctccggtaaacttttagttagttatgatcgagttaatatctgattattattcggctgcgttttaaattttagttagttatggctgagttatcaatattatacggctgagttatctgaatattttacggctgagttatataaatattttacggctgagttataaacgctggttagttatggctgagttgttttcatgttataaatttagttagttagttatggctgagttatatgaatattatacggctgagttaaaaatttaattaggcatggctgagtttagttagttacggctgaggtatatgaatatgatacggctgagtttagttagttatggctgaggtatatgaatttgatacggctgagtttagttagttatggctgagttatatttatacataggtatgagttttcgttgtttaacgcctgagttttcgttacgtttatgcagtcgaaacaagctgatgttggggtatgtaggaatcttgaaggagaatttgataaggtctccattgtgtctgattttgatttcgttgagactgtttctcctctcaactgccgtttacgctctaggaagccaccagtcccaaatgtgccaaagcagaaaaaggagaaaacattaaatgagctaatccagaaaccgccagcgagaagaggaagaaagccttcgcagcagcctaaaaaggtgcctcctactgtgccaaagattacaataaagaacccaaaaccatctgaggaagctaaggaaaaagctgaggaagctaaggaaaaagctgaggaagattcggatgtagttgatgtcacggataaggttgtatccgagtataatgaaatgcttcctgagtctgatgaagatgaggaggaaaccaagaggctaaagagtgtaaaagaaattcggctcaaaactgttaagctggccccggatgggagctcattgattaaccccgaagctatgcccactcacacttttccagttacaggagacaacgggctgagctgcatgagaaagggttgtctgccttcacgagcaatctatgatcctttggcaccggttgatccggccaaactgctgaagcttaaggcttatttgacaagtcccgaatggtatggccctttatacattactaagttgataaatacgacatgcttacactatttgtttatattaactttctttactatttgttagcaaacaacctttggaattggggtggacgaggtgctgttctactctgttctcatggccgaaagaaaggactggccagacccgaaacatggatggctgggtgatgatgtaagttattgttatattctgtctgagtttggctaatgttatggctaagttatcgtgtcgttctgtctgagttaaagtagataatggctgacttacgatgtaagttattgttatattctgtctgagtttgtctaaggttatggctgagttatcgtgtcgttctgtctgagttaatttaggtaatggcagatttatttcggtgttaaggctgagttttacttggttacggctgagttaatgttgtgttttgtcttggttttatttttgtccagcacattgctgggtatatgaaagtcctcaccatgaggctcctgcgagatctcaccccatactacagcgaacacgtcatgattctagacccgtggttcacgtcaatgtggactagggattaccacagtggact

SEQ ID NO: 21218 - DNA, 423 bp, Arabidopsis thaliana columbia
gtgtcctacgattggctcaaaattaatccaatcatcacgggtaaaattgtgtttatatatctttaaaatggcaaatcttattggctcgtggttgtaacagctttttattgtcattcgttcaaatttgctcatattacaatagttacatgaaataatcacaaaagaggagaagatgtcaaccttgacgttaaggtacgttaaatacatacgagaattttctttccatttttggtttttctgatttagttttacgtaattattcttatttaaattcagtctaacatgggataatgttattggctaatagaaaagggggtgaacccaagatttgagcaaatgcaatatttaggaagagaacattccttcggtagcgatgttattgaaccttccatgatctatggcaataatcataaatcaagtgat

SEQ ID NO: 21219 - DNA, 527 bp, Arabidopsis thaliana columbia
  unsure (1)..(527): unsure at all n locations
nnnnnnnnnnnctaaagcagaccgccgtgttcctggtatcgcaagcggtaactcgtcacatcggttgaacgcaaggcaggtaaagttattaatatttgctcgatgcaaagcgaactgggacgtgacaccatcaccccttatgccgcatcgaaaggggcggtaaaaatgctcacccgcggcatgtgcgtcgagctggcgcgccacaatattcaggtcaacggtattgcgccgggctatttcaaaacagaaatgactaaagcactggttgaggacgaagccttcaccgcctggttgtgcaaacggacccccgccgcacgctggggagatccgcaggaactgattggtgctgcggtgttcctttcttcaaaagcctctgatttcgtaaacggccacctgttgtttgttgatggcggcatgttagtggctgtttaacagccccctacgtgcagcgcgaaaggtgtgtctcatggcactaataagagataaagactatgccattaatcattattgcggcaggcgtcgcgctg

SEQ ID NO: 21220 - DNA, 627 bp, Arabidopsis thaliana columbia
  unsure (1)..(627): unsure at all n locations
nnnnnnnnnnnnnnnnnnnnnnctaaagatgggcctgatggaaaccggcatggcgtggttctggccggaccgccgaatcgcccgctggacggaagtgatcggcatggaacacattcgtgacgtgcaggcgcaaaaacgcggcatcctgttagttggcatccattttctgacactggagctgggtgcgcggcagtttggtatgcaggaaccgggtattggcgtttatcgccgaacgataatccactgattgactggctacaaacctggggccgtttgcgctcaaataaatcgatgctcgaccgcaaagatttaaaaggcatgattaaagccctgaaaaaaggcgaagtggtctggtacgcaccggatcatgattacggcccgcgctcaagcgttttcgtcccgttgtttgccgttgagcaggctgcgaccacgaccggaacctggatgctggcacggatgtccggcgcatgtctggtgcccttcgttccacgccgtaagccagatggcaaagggtatcaattgattatgctgccgccagagtgttctccgcactggatgatcctgaactactgcgcgtggatgacaaagtggtcgaaaatgcacatgatggcccagacagtatatgtg

SEQ ID NO: 21221 - DNA, 595 bp, Arabidopsis thaliana columbia
gttggcggcttgagctctccagcagcatatttacccattacaccactacacctgtaaataataagcaacatttttagttgtcagtaagcttaatccactacagaacctcaatacatagacctcagcagagagaccaaaataaaagaaggaggccggcgcatgaacacatagaagcatcagtaacagagtctacttaccatcggaaatagtcacttcttataccaagaggagcagcaagtagtatatcactgatccatggagacaaaggccttaaaggtttcctttcatgctgtgttggtgatccagccttaggctctgaagtcggagaaccactagttgtagctttgctcagacaatttctctctgtatctccattttgctgctcagttttataaatgggacggttgtaatgagtcaaaatgcgaaggatttctccacatgccaaagcccattgctccgaatagtcattctgttaggatagtgaacatgttagcacaaaatggtataggttcaccaaatcagtaagcatgatactagacagctattatatactcactacttgggcaactaaagatatgaaagaggaaacggatga

SEQ ID NO: 21222 - DNA, 486 bp, Arabidopsis thaliana columbia
tgatcgatccgatgagatttgaatttacgcattgtttcgtaattttacaggtgaaagtgtttaagcaaccaaattaccttgaaaattttgtccaggcaacgttcaatgctcttactacagagaaagttaaaggtaaagatctctcttacctctctttgattgttgttcaggtaaaggtcgatgattgcaaattccatctaagaaagagtatttgttaactttttcaggtgcgacacttgtggtttctggtgatggtcgttattattcagagcaagctattcaggtaaaagctttatatgtcctttgaatgatggcaaactgcgttttgcattaacttataattcttagacactttactcttattttagttgttttgaatcttttatttcataaaaaagatagttcgtcaataccactttatttcctatctggacagattatagtaaagatggcagcagctagatggtgttagacgtgtgtgggttg

SEQ ID NO: 21223 - DNA, 398 bp, Arabidopsis thaliana columbia
tgaatcataagaatgtgcttctcatcaagctcatctccgctattctgatatcttttttcgcgttccgtctcttcattctccactccagcgagttttctccaatctttgcgtcggtcaccggaaaattcgaagctcggtttctgccgccggagattatcgtaccggaaaatgaagatctgattcctcaaggtaagatcagttatttagaaagcaaaagtatttgacttctatgtgtattgtccactgtgtttgactgtttgtgactaaaccttgttttgtgagcacaattatgatttatgagatctaagggttttggatctacaagatttaaagctctgtttacgtttttttttagattgtggtgtagagaatagaaaaaaggatatgacaattcatgg

SEQ ID NO: 21224 - DNA, 560 bp, Arabidopsis thaliana columbia
gagtcattaatgagaattcagcatcaaattccaccacatacctcttaaaagaaagaggctctaactgttatgttgttactgttaaatgattaattgcctactatatgcttatatcccacaatctgattcgttgagtaatatgcaatacaaataaatattggaatgaatatatcacaaatggacagaagcagaaaataagacatcaacgctatatgagtttgagagaggatcaagtttgaagacaacattggaccactcaatcttcccccaaatctcacctccctcgcgcctctccatggaaatctcggcagaccaaagctccacacactcagggtctccaatatgtgcgttcccgaagatgacaatgttcccagcagagttactagagatttttctaatatcataattgacgttggtctttgacggtcgtttatcagaggtacgtctgaagatgtatcttgtaccagagagatacaattgtagctgtccaaaccttttactctttccagtcaactcatctggttggcacatagtattctacgcgagtagacgacagtata

SEQ ID NO: 21225 - DNA, 441 bp, Arabidopsis thaliana columbia
cccaaacactaattgcacaaaaagcaaagtaaaaccactagtgatacaaattctataaagataaaaaaagtttatgctcaattaaataacgtaaagaaaactatattgacaaataaagacaacaacgacggaaataaacaactaaaaaccactttctttgatttcacacaattttagtgagtcaaaacgctgtgctgaagtagctactcaccacattctcacacagaatttggagaaccttagcattacttggcttcacacatcttggcatcttaaactgtccagccgatgaaccaagcccgagaaaatgttcttgaacttccggaaagttccttttgcgacaactctcagctccaaggctccaatagtcttgcatttccgggaactaacgtaaccagcatcgatgaatgctcggtctaaacagttgcagcaatcttgaag

SEQ ID NO: 21226 - DNA, 546 bp, Arabidopsis thaliana columbia
tcgactctcgcaagaatttattcattggattatgctctgcatcactactgcatctttttcagtccaggtcaatggagaattggttggtttctttaacagttcaaggggtctgcgtcaaggatgttctctttccccttatctctttgtcatagcaatggatgtactatctaaaatgttagatagagctgcaggttttaagaagtttgggtatcatcctcgatgtcagactattggcttaacccatctcacttttgctgacgatctcatggtgctttcagatggaaaggttcgctcagttgagggaattgtgagtgtttttgatgagtttgcaaagaaatcaggacttaaaataagcatggagaagtcaaccatctacttagctgggagtgcaaatatgtacagacgagagatagaggagcgatttaaatttgcagtgggaagtcttccagttcgatatctcgggttaccattagtcacaaagcgtttctcttctgctgactacagaccgcttgtagaacaaataaaaagaaagattggaacttggac

SEQ ID NO: 21227 - DNA, 623 bp, Arabidopsis thaliana columbia
  unsure (1)..(623): unsure at all n locations
tnnnnnnnnnnnnnnnnnnnnnnnctaaagaatgttattgaattcattctgctgtgctgccgtttcaggtatcagcggtggaaacagtgaacgggcgagtgatgtaaaatagcccgatcccatcatgctggcggtacatctcaccgtggggtggcgagcggtaatccccagtgccgtcatcgcgcccatcgacgcgccaccgactgccagacggtcatcaagcagccagttttcttcggctattgccgcacgtaaagtagtgaattcctgcatactttgtagcaagatttgccagaattgatttaaccgccgcgctgcgtcaccactaaaacggctaccgtgatcgggcgcatccggcatgatcacccgcaaaccagcctgcgccacggcaacggcaaaatagctatacaccagactggatgaagtaaagccgtgataaaaaattacgcacggtaacggggtatctttttgcccgacaggataagcatgaagaacgggaatatctgccagctcgcgtgattctatttcaatcatctgtctctcctttttgtctggtatgacatgaagaaatccttagcacaagtttctgctggcggtattagttcataatgttgagatgtggg

SEQ ID NO: 21228 - DNA, 1427 bp, Arabidopsis thaliana
ccagttgttgatgtccctgctctccctgaccggcaatcccactctcctcccctctctgtggctcccctcaagccgaatgggataagaacctcaatcctctctcggaggcgcttaacctagactggacggccgaggatgaggctgcctatcacgctctggaacctccgttcaccacgggggaagaagatgtggcaggaaaaaacactctgagaattgagtcccatgtttcttctctagaacgtttggagacgcagtcgtcgatctccctcgcttccacgcagcgtccgactccgtccaaagttcttgaaggagcgactgagaacggcggtgatgtggagaacagagatcagcttctgtccctagatgggcttctctctttggaaatagattttgtttctactctcggtgggccaaaaaagggagtaaaaaagaagagggccgaaacccattctcgcaagggtaatactacttctggtaaagtccagtcctctttgggccttttggtgaatctagcttcaaaaaagatacaaaatgtcaaaggacgttctccgagtaagcgtctcttgctcaaaggtggggcttccaagtcaagagctgctaaacgtccgtcttcggctcctcgttcaagcatcttcccgtcatccaaagtcaaatctccggggtctattggtggctcggtggggtccatggaaccccccgacactaacccatgaggatcttagcgtggaggacatgtgtcgcatgtattctccgggttttctttttttatcggaaactaaaaatgatcttttgtatcttcagaatatgcaagtatctctaggctttgattgtctccaaactgttgaccctataggtaacagtggtggattagctctattgtactctaatgaatttccggttacggttgtatttcttgatgatcagcttattgatattgagactattattgatggtaaccgtgtttgtattacttttgtttatggcgacccgaatgtccaatatcgggaactagtttgggaacggttgacccgtattggtattattcgttcagatccatggttcatgataggagatttcaatgaaatcaccgggaaccatgagaaaaagggaggcaaaagttggtccgaatcttctttccttcctttccgatgtatgatcgaaaattgcgggatgattgaaattccatcccatgacaatcttttctcatgggtgggacgacggagttgtggagttacgggacgacgggtccggaaagtcattaaagctcggttggatagggctatggccaatgaggaatggcataatattttttcccactcgaatgtggagtatgttaaattatggggatcagatcaccgccctctccttggttcaatacaaaacagtccccaacgtaattttaagcagttttcttttgataaacgatg

SEQ ID NO: 21229 - DNA, 602 bp, Arabidopsis thaliana
tgagctcagaatgaagtttgtggagatctgttttcctcaacaaatcgggtaaacggtgttgaagcgaatgaagatccacgacactcggtactttcgttgcagtgtatatagtgagtgccaaaaacaggaaaaacccaatcaaatgcctgcaaatcccaaagaacacacacacacaaacacactcaaggtttcttgaactttaaacaaggatacatcaagaaacatgattcaacacttacgtccaaacattcaaagtctcattatgaatggtaaagatgctgagaagaatctgtttgatcggccattcggatcggtaatgaccaatgatgtactcattgtctcttaaataagcaggcaatgaatgaaactccaccaattgatacttgactttctgccataacctcttccctttcacattatgtttcttgtctattgtttcagatgaagcttgtggctttaaatgttccttgatctctgcctcatcacccattttctctctactcataaacaaaccaaacccatcatatcaatcatacagatctaaatctagctcaatatgaatcatccaagaagttaggaacaaagttcaattctgacattta

SEQ ID NO: 21230 - DNA, 543 bp, Arabidopsis thaliana columbia
gctctcgatggcgtcctttactgtaaggtccacttcagccagcttttccttgagaaaggtaattacaatcatgtcctccaagccgcggctaaccaccgtcgctcgacggcttgaggaagacaaaaccgaacccaaagaagatgaagcaaaccctacagaagaagaaacttctgatgcagcagctgaagaacatgaatcctaagaaatatccgggagttccttttgtgaaatatatataatcataaattgttaaagagataatttcttaactaatgcaatgaagtagactcaaattttgtttagtttcttcttatggaactatatattattctgtttgtaaagtaattatattcaagtttatgagtaattaccaaaacatctcataaaagtttttgtgtatctaagagtatatgttcgacattcaaacgataatcctctcattaaattactacatttttggcttattattctcacacaaaagaagattcagaattctgagacttgcttgcgactaaagaaacaaccagaaggagtttcttgatg

SEQ ID NO: 21231 - DNA, 1462 bp, Arabidopsis thaliana columbia
taaccgtaaagcttaatcaacaagtagttgctgataaatatttgtacaaagtcaaaactgttttttcattttttctttccgtgaaggagaatttacttgcgaagaaacaaagaaatgagatgtggaacaatttcactagtcttattcttgattatgatccttctttatccatactcttatctcttcttcctcttcgcttcttttctggtttgctttcttcttgctgcttattatcttctttttggagaattctaaaactgcgtccaagactcacaaatggatcggtgcgttgctcaatttggtacatgttcattggtcgaattctctgttcgaaaacttgcaatttctcataattttctaatacaatgtgacctctctttgtatttttatttgtatttttttgtattcttctcatcttatattcttatctacgacatagtcaacattataaaactatgtatcaaatattaatttcaaagtaactacaccataatccagttctgttaaacccgtccgttttggtgatataaaacaataattgttttttgtctcgaaccaattcactatataaacatcatatacctcttcaaggggggttaccaaccaaacagcttgacacgaaattgtctcgaaccaatgaacccaaacaaaaattgtcctggaaatccggatttccggtttactcaattgaaacaaaaaccggataaacctcaccctaaaccctaaccctccgaaacaaacagagagacacaaacccactctcagcgtatataaacagaactcaagacagagacgctcttaaaccctttcttcttcaacccataccgttttctttcttcttctattttgtcacttttttcctcgccgacgaatgcaagggaaccacgacggttcgtggtctctacacccctccaccaacaatggaagcggcagagccaacggaaacatcaacatcaacaccgttcccggtggaggtaccttcctcaggcaaatcctgtctttcccaatttcaatcaacccattagatacccaattcctcagtttccggcgaatttttaccgccctaatttccctgacttctctctcggaaaccctaatttccaaccccatcaaaatctcaacttccttcatcaacaaatccctcaccaatatgcgtccgctgctaatcacttccttcaaaaccataaccaaaacagcttctctttcccacctcaatctatacctaataatgatatcagtatctctcagaatcacggagctttcgaaaactcttcattgaaacgaagacgacaagaggaggttgtacaagtgactgatgtggttccaaaatctaattttgcttccggtgagagtgctaataactccttcagtgtatctctaccgatccctatagcaactgatgatagtggtgtgtctcgagtccatggagagaagtcatctggaaaacccaagcgcaaagttg

SEQ ID NO: 21232 - DNA, 532 bp, Arabidopsis thaliana columbia
agctcagaatctctagatagcagtatctgtgtgtttgtatctataagccgaccaaattttcctcagattagggattattcattatgcttcatggttggtttcttatgtttttgacaaagccatctaacttcacatctgttttctttgtttttaagattgtattggttcggctttcaatgcaaagggagtgatgcaatgccccaactgtcggaaagtagaaaaaggccagtggctttatgcaaacggttgtcgttcatatcccgaattcaatgtcgaggattgggttcacgaagaagatatttatgatattggagcatactctgaaatggtaagaaactgataacacaatccttcttatattccattgcgcttctgcattacttttcacttctttgtctcatgtgctgagtttttaatttttgaaagattgctgttcattttatttgattgcttcaattatgttccatctcgaaaataccttgtgtttatgtatatttgtagtcttttggagttcactggtgcccatttggaa

SEQ ID NO: 21233 - DNA, 416 bp, Arabidopsis thaliana columbia
attattttaattaattttattaatcaatacatattgatatcattagccataataagttggttagtgtaaaccgaaccagccaaatgattaacattactcatcatattcatatcatcgtaatatccgtcgatcccaaccgtacgatcatcaaaaccacatctgtcgatctggtcaacaccaaatcctgcaccgttggattgaacaagatcaacgatctcgttgagagattggagtctggtgctaagctcctccatctgagctgtgagaacagagttcgtgtcttgtatcttcatggtaaatctgagatgttacggtgaggctgttcaagatctgacagatgtcgtttgatagctgattgatctgagccggtagatcatcaacgtgtttctgtatacgcatccttgacctacgtgcag

SEQ ID NO: 21234 - DNA, 687 bp, Arabidopsis thaliana
cggcattgaaaagctttagagacggatttaaaagcttcttcagaaccaggagctttgttcttatcaggatgaactttcaacgagagtttccgataagatttcctcaaatcttccactgaacagttacttttcaatccaaggatctcatagtaatccttcttcgattttatctccctcacgatcgttcgttgttcttccgtggaagacgaagatgatgacgatcccgcggctgatgacgaagatccacgttgacgaagagaaggtcgatccgacggcttagatgactcgttggcagcagatcccggcgaatcctcctccgccgctggttcatccgattgcttcttcagatccgaaacaagaccatcgatcggaagatttggatcaagacgacgagctttctcaagaaatttcaaagcgcgagatctatctcctgcttctatagcatccttgccgatttttaggcatttcaacgcgtcatctttgttaccatccattgtgattgttcaacggaaaaacaatttcccgatgatgctatcggaaactcccgaggaattagagtttctcgaagcgattggagttcatctaagatgtgaggactttcccaaacgagcgacgattgaaaaatatcgcctcctcttccacaatccgcacacagctttcaagcctttctacagatgaacgacgggg

SEQ ID NO: 21235 - DNA, 499 bp, Arabidopsis thaliana
cttcaactgcaaatggctttactctcccaggaataccagtctccatcctgcacaattccaatcatagtatgtgatgagaaaattttcatttgcatgttgcaaaatttcacaatgacactggagcacttaacaattagcatatttgaaagagtaaaaaagaatatggcataccttggtgcatttttaagaacctcaaattcttcttcagtaggaagagcacgaccaaacacatctttgggtcgtggtttcttcctttcctgtgtgcgttctcccccaccttgtgattcttctggtctacattgcgtcaaagagagaatattgtcaaatttcaaccacaaggatttaacttaatatcgtcctagcaataatttgtcaaaccaaatatctgtttctgtcaacatacctagaaccaacattgtcgtccgccactggatcctgagttgaagaaccctgacccttgtgtttctcatccttgtattctgctgctttggcactttca

SEQ ID NO: 21236 - DNA, 608 bp, Arabidopsis thaliana
gacaaagaagacatgagatcatttatgagtattatagtttccttgtgaagcaggttattcatgtttcttgggaagcaagattctaacatgtctgcaagaagagttagaaggacctcggaggactatggcagtatcacggcgatcgccattgataaggacaagaacagccaacacgccttgaaatgggccgttgaaaatattgttgctgatgctccacaatgtgtccttatccacgttcaacgtaagcatctctcgctcttctcttcatcattgaaaccaaaacgtcaaagagccaccctaattaggagtatgttttgcagtaggagacacaggaggacattttcatcaggacaatccggacgaggcacatgaattctttcttcctttcagaggattctgcgctcgaaaaggagttagtattaatcgatcatttccaatctccttgcaacaacatttcacacttataatgcatcaaatatgatcatgacattcttgtatatacacacttttcagatcatagcaaaagaggttattcttcatgatattgacatctccaatgctattgtcaactacatcaccaacaattattacattgcaaatcttgttgt

SEQ ID NO: 21237 - DNA, 572 bp, Arabidopsis thaliana
cagctgcagtattgtacttccgcttttataagctgctgaacatccaattcactggagtcatcaagaacctgaactagcattctttcccttggccagtcaagcatacacacagctcctatagattgttggtaaacctgcaagtgccacaaaccaaaaatcaacgagatgagataacagaaccggaactgcaaggatttaaatacgaataagcaggcagatcaaagtaaacatatttaaaactatcaataagtttcagatatgaaaccgcataagaaacacttagagattacgggtcaacatagcaacaaatcctacctagagatgcttgattcccaattcaacttcaaacagctagatacaactacggattagagacctacatacatgttcttacctccttttcattgcacataggaatctgaacaatcaccattggataatcttccaatctaactccctctccaaccaatttagtcgggtacccatagatgaacaggcttaatacggcggcgttgatccagaagcaccaagcacaagcccagacggtcaccgattgaacaagaagagactat

SEQ ID NO: 21238 - DNA, 364 bp, Arabidopsis thaliana
aatccataacggtggcaatttactgaaacaaagcacgatgtcgacgggtaatgtccaacaaacaatcgatgccgccgactaccaggtacaggggcactatcagacccccgttattcaacattgtcacatggaaagcgtaacatcgctggcgtggatggaggatgactcgcgaattaccatcgtttccagcacccagatcccgcacattgttcgccgcgtggttggtcaggcgctggatattccctggtcatgcgtacgagtcatcaaaccatttgtcggtggcggttttggtaataaacaggatgtactggaagagccaatggcggcattcctgaccagcaagcttggcggcattccggtgaaa

SEQ ID NO: 21239 - DNA, 485 bp, Arabidopsis thaliana
  unsure (1)..(485): unsure at all n locations
nnnnnnnnnnnnnnnnnnnnnnctaaagttcagccgtatccgtgctgtgctggtagccggtgcgatagaagctgagaagctcgacaaactgccgcgcgatcgctggctggagctggagcctgacagacgaagagaaacaaaatcagctggaacagctggctgagcagtatgacgaactgagacacgagttcgagaagaaactcgaagcgaaacgccgcaaaatcacccagggcgacgatctggcaacgggcgtgctgaagattgttaaggtatatctggcggttaaacgccgtatccagcctggtgacaagatggcaggtcgtcacggtaacaagggtgtaatttctaagatcaacccgatcgaagatatgccttacgatgagcacggtacgccggtagacatcgtactgaacccgctgggcgtagcgtctcgtatgaacatcggtcagatcctcgaaacccacctgggtatggctgcgacaggt

SEQ ID NO: 21240 - DNA, 581 bp, Arabidopsis thaliana
taactcatgacaatagtataaatccttaatcgctcacgtttgaccctgtgaaaaatgtgtattgttgaaaaagcagatgctatttaagaaggctaatctatcaatagaaagaggggagaaaatcgccatccttgggccaaacggttgtgggaaaagtacgttattgaagctaattatgggtttagagaagcctgtgaaaggtgaagttattcttggagagcacaatgtactgccaaactactttgaacagaatcaggtcagttttcacttactcaatcaattcaagagctaaacaattggagacaggtttgctcactttattgacataatttggtttcaaccctttggttattctttcgctaggctgaggtccttgatttggataaaacagtgcttgaaactgtttgtgaagctgcagaagactggagaagtgatgatataaaaggtcttcttggacgctgcaacttcaaagcagacatgcttgatcgaaaggtctctcttttaagtggtggggagaaagcgcgtcttgctttctgcaaattcatggtgacgcatctactttactcgttttggacgaccac

SEQ ID NO: 21241 - DNA, 534 bp, Arabidopsis thaliana
tgactgtcatagtgaagtgagttaaactcatgtcattttatgcacattacaatttcgtttctttgttgttttcttcagtttttttattgaatattgttgagcaggatgtggaagaagaatcaggagatggaagaaaggaagcaggtccatctcgaacgggtttgggttcaaagagaagccgctctgcagaagtgcataatctgtctgaaagggtgagtgagtgaagcccctaaagggtttttgtccattctcaaactcacaaaagattgctatatttggtaacttactgtcctcaattttcagagacggcgtgataggatcaacgagaagatgcgtgccctgcaagaactcattccaaactgtaacaaggtcagcttcttctcctttacaaataccattcatgattcatttttgtttgaaagataaggagcaatgccaaataaactaaaacttgcatcttagaacgaattgctaaaggtttttgattggtttcgtatttattaaccggaaaaacaattgaaccatattgtaagc

SEQ ID NO: 21242 - DNA, 580 bp, Arabidopsis thaliana
  unsure (1)..(580): unsure at all n locations
ggctcggatagatgatctcatggtactatctgatgggaaaattcgttcaatagaaagaattattaaggtctttgacgagttcgcaaaatggtcagggcttcgtatcagcttagaaaaatcaactgtctacctcgcaggactctcagctaccgctcgcaatgaagtagcagaccggtttccgttttccagtggccaattaccagtgcggtacttgggcctgcccctcatcactaaacgcctttcaacaacagattgtctaccgttactagagcaagtcaggaaaagaattggatcttggacttctcgttttctctcttatgcaggtagactaaacctcattagttcagtcctttggagtatctgcaatttttggttagcagcatttcgtttaccccgaaaatgcatccgcgaacttgagaaaatgtgctctgcttttctctggtcgggaacggagatgaactcgaataaagcaaaaatatcatggcacatggtctgcaaaccgaaagatgagggtgggcttggcttacgctcgcttaaagaagctaacgatgtgtgttgtntanagttggtgtggaaaata

SEQ ID NO: 21243 - DNA, 495 bp, Arabidopsis thaliana
tctagaggatcaaagcatgatcggagacgaatttgaactctccgacgaaataatcgtcttctccggcatcatcttcagaaagctattccaaattagggttttgacttttgattgaagaagacaggtctagaaacttacatacaccaattttaaaatcgagtttgggccgaattatggaccgtactttgggctatgggccttcattttaataaacaggtcggatatatccaccggacccggaatgatcgtcttcctcagtgttgtattttggctttcctcattgcttcctcaatctaaggatttccatgaacaaggaactagaatgagatctcttctctttgtactatcactcatttgcttttgctctcaaacagcactttcatggaagaaggaagagtttcgcagctgtgaccaaactccattttgtaaacgcgctcgatctcgtactcccggcgcgtgttctctaattgtcggcgatgtttccacactgatgga

SEQ ID NO: 21244 - DNA, 521 bp, Arabidopsis thaliana
tggagagaaagcaagtgatccatcatagtgttacccttttgtttatgcacacgtctctcatccaccagactctgcaaaaactcatcgacccgactcgccaactccttgacccctttctcaaaatctgtgatccaacgcaaaatcggtatataatcggctgcattcccaacgccagccctgtacacaatctcgtcaatcagttgtgtcactcgccgcgcaacttcatcttgttctgtcccctctccataaaatcgtttcccagccaccattcgaagaatgttgttgatagtcaaatcataaaacaattgtctcatctcaacctttgcaaaaccctgattttaattataatcacataaacaaatgattaatcctcaaactttcaaaatcatacttcacaatcttcatttggtatagaatatttttggcgtctacaatctacattttgcacatgcacatggccaagtataaacctatataatgaaacagtgacggcactatcacaaatcaataggttataatat

SEQ ID NO: 21245 - DNA, 1556 bp, Arabidopsis thaliana
tatataaattaactaagaatatattaagttttattgttttaataaagtagtttcattgctgcatgcactctgccatttacataaaatgcaagccttgtaatttacttttcttcattaattgtttaagatttgttttcaattttaattttgttaagaaaacaaatcttaatacgtttttttattttgctggctctgaggcaacaaactttttttacaattacttctttgtcatccccacttaatctggccttaccgtttttatttggcttcccgggttatgcataagaagatgtcaagtaggtgagaggttggtgtgcgtagggaatttgcaattaacacgtgtttattttaactctcttcaattttaaatggtgagagtagacgtagcaaactagtctaatcgcgaactaaaccactttatattttttgaacgaaatagaaattgttgtagttttctataaattattttttaataatctccaaatagagcaacgtatccacttatatatataaccttatctctttttttattggagaaaaaaaaagtacactgtgataatttgaactcatatatatacacactagttgtgtgtgcttgtcttaagaaaaaacaatgggatcaatggctcagaaatcggttttgatgttatgcggagagttcatggaagcctacgagactatagtacctctctacgtcctccaagcgtttggtgttagcgtccactgcgtttctcctggtcgcaaaactggcgacaagtgcgtcatggccgctcacgatctccttggcctcgaggcatttctcgaatctttcactttttcttcatttcagtttttttcccttgcaatcgttctttgcatatttagtaaaacaatgcgatcaaatgctcataattgggtggactttcccctttattatctttatccaaaaagtttagataattgggtggtctcaacccaaaatgcatgggcctactcttaacagtaaaaaagaagagtttcaatttgacttttacctttttacagatatacaccgaactggtggttgaccatctaacactaaacgctaacttcgatggcgtcatccccgaccaatacgacgccatcatcattcccggtggacgtttcacggaacttttgagcgccgacgagaaatgcgtgagtcttgttgctagattcgccgaactcaagaagctcatcttcacgagctgccacagccagctgtttcttgcggcggcaggtctgctcaccggtggaatgaagtgcacggcgttcgaaagcatgaaaccgtttatcgagctctccggcggcgcatggtggcaacagcctggagtccagacccttttcgaaatcactgattgtgtcaaggacggcagtttcatgtccactatggggtggccaacgcttggccatagtctcaaagttttgttagaatcacttggctccaagatttctagctctaaagagaatcatcagacttctttgcttttcttgattggggtaagtagcttattttcataagactctcttttagactttatatattggaattaaaaaat

SEQ ID NO: 21246 - DNA, 364 bp, Arabidopsis thaliana
gctctaaagactggctcacgtcagcgtgtaggtaactgggctggcgttaccgtcgaacgtaaagaagggcaattctccaccaccgatcatcaggtcacgctggtggacctgcccggcacctattctctgaccaccatctcatcgcagacctcgctcgatgagcaaatcgcctgtcactacattttgagtggcgacgcagacctgctgattaacgtggtggatgcgtctaaccttgagcgtaacctgtacctgacgctacaactgctggaactcggcattccctgcattgtggcactgaacatgctcgacattgccgagaagcaaaatattcgtattgaaattgatgctctgtcggcgcgtctgg

SEQ ID NO: 21247 - DNA, 540 bp, Arabidopsis thaliana
aatcaactaaatatttgaagtgtaagcaagctcttcttgtgtttgattctttgataaaagtccaacgaatgatttttattttctgtttggaatagatattgtgagctttggtgaggttacaaataatcagagagtagaagctgagaggcacagattaacaatatattcatgggaccaattcttgaagctagtaagaaaatcatatttttattctactttaacatcagaattatcaaaatcatgaatatatattacttaatttgaagggcgagggtaaacattatgaattaccagagaagaggagaagcgatgtttgcaccataatgtatacaagtggcacaactggtgatcctaaaggagtattgcttacaaatgagagcattattcatctccttgaaggtgttaaaaaatcgcctaaaactattgatgaagaggtataacttattcttgtttacatcatcactagctactaggtcactataataacttataatttgttttcattgtgaaaaatgttacagttaaccagtaaagatgtat

SEQ ID NO: 21248 - DNA, 601 bp, Arabidopsis thaliana
  unsure (1)..(601): unsure at all n locations
nnnnnnnnnnnnnnnnnnnnnntaaagcgcccttctgctctttgctgacggagggctgctttatgactatttcccgtatttcactccgccaatggaccgatttggcatcggtctgggcctcacccttgcagtgaaagaaagcgcatttctgctgtggatcttagcagcagtattgagcgaaaaatggctgttgcagcaggtcattgtgctggattcgctgggctacagccgctggcaatgcctgaactggctgctgttgccctccgtcgcgcctgcgctggcaatggcgatgctggcgattgttgcctggtcgctgtcggtcgtggatgtggcaattattctcgggccaggtaatccccgacgctggcggtaattagctggcagtggttaacccagggcgacattgaccaacaaacaaaaggcgcgcttgccagcctgctgttgatgctgttactcgccgcctacgttttgctgagctatctgctatggcgcactggcggcgcactaattcccgcgtagatggcgttcgcaagcctgccacgcctttattgccgggcaatacgctggcgatttttttaccttaactggtgtgctgtgtgtg

SEQ ID NO: 21249 - DNA, 548 bp, Arabidopsis thaliana
ttacacaacatctccacttcttcttctccttccttcttcttatgtatcgttactgcttctctccccgaaagaagctcaagaaccgcaactccaaaagcaaacacgtctagtttcgaagtaatgactccattctccacatactctggagctaagtagccttgtgttccttcaacatgtcttgttaactgaagatcaagatcaccttcatcaagaatcctcgcaacaccgaaattcgcaatcttggctctgaaattagaatccagaagtatgtttgttgattccaagttcttatgaatatgaggtggagttatatagttatggagataatctaacgcctctgccacatcccttgctatttcaactctctgtttccatgtcaaactcttcttgcccgacgagtgaagccaatcactgatcgatccattctctgaatactcgaagacgaggtacgatgttccttcacggatacagaaacctgagagacggatgatattagaatgatttagcttcttcaaaagattgatctcagaggaagaacatctcctttg

SEQ ID NO: 21250 - DNA, 586 bp, Arabidopsis thaliana
ctaaagagtgaataaaacgcgccgcccggagcaaataacgctttaaacggcttcatggtccagatggtgaccagcaccgttaagattaaaaacggtgaccacgctcgaatgatttgccccagactatattctgaaggcacgggaccgccagaagatggcttatttaccaccatcgcacctgcggattgtcccatgctgattgccgtttcggtatttttcggccgccagactttaaggaataaagcgagtgagacgatactcaccagcgccgaagtaatatccggcagttccggaccaatatagttagaggtaaagaactgagtgacagcgacgttcccccagcaaccagcgccgctggccacgtctctttcaccctttccagccgtccatcattgctaccagccagaacggcacaagaaccgacaggatacggtaactgacgtcccgccattgcgccaatgtggaacggatcgattcccgttaccagaccggcgaccagaatcggcacgcgcaatgcaccaaatgcgaccggtgcagtattggcaatcagacagagcctccgcgcgtataagggtttgaagcccag

SEQ ID NO: 21251 - DNA, 637 bp, Arabidopsis thaliana columbia
tgagttgatgtcttctcttatcgtttaggttactctttatgtgtttgttttcaggccatggtgacgcggttttcgtctatctcaacgaggaagttgtcaaatgcgttgacagtccttacttgtgacaaatctatggttgctactagtgattatgatgatttccacaagttggtgaaacggtgtctcttgaacggtcttttgggtgctaatgcacaggtgaattcattgttcgtttatcccgcagcttctccttggtatacataatggcaactgaatcaatcttttgtgttgtgttggttttttttgcagaaacgaaaaagacattacagagatgcactcattgaaaatgtgtcttccaagttgcatgcccatgctagggaccatccacaagaacctgtaaacttcagagctatatttgagcatgagcttttcggtgtagcattgaagcaagtgagtgtttcgcttatcctatacatcatttcttcgtcaacataaagtatgaaaatggatttttggttttgtttcataggcttttgggaaagatgtggaatcatttatgtaaagactcggtgtgctttgtcgaagcgagatttcaaggtttagtcatgcatgatggaggtgcaatgatgtgatggag

SEQ ID NO: 21252 - DNA, 538 bp, Arabidopsis thaliana columbia
ttctccacaagtactagggttttcttcatctccaagctaacctctggttgtttgtcattcattttctttacagaatcctcaagaagcgataaattcatctcaatcaatttcactttctgcatcatcactttcaaaacgttatgcttctccttgacttcatactttttgtctcctatgatattaatcgtcttcacaacatcatctttcttcttctgagcttcagtttctttgccaatctgatctgtcctattgctttttatttccccatcttgtttttcatctgcagtttttagttccaccatagctggtttactgggaggagtctctgatggaacaaacagatcttcaagcatttgctcaagagcatcaatgccaaatacctccacaacactcagagtacagtaaaactcagacccatagtgactaactaaattaagtttcagatatctcaaccatttaggttccgggagccggaatgactggatctgcttaacgtttgcagcgcaaaactcccagcaggtgtccacatatcactagg

SEQ ID NO: 21253 - DNA, 658 bp, Arabidopsis thaliana columbia
taatttctgggtttgtgttcttagttatgttgcttgagtagtgattagggttcttgaggatagattatattagggtaatctctaggttagttaggtggttaagattaggttagatatcttctggattcgttggcccctatgcggttttcgctggctaatgtggagattcgaccatagacgtccagcgtccaaaagacgttcaaatggatgtctgatctacgaattccagagatttatagacttgaccaaaggattggctagtctgtttattggctttggtagattgttgcttaaaccatgctatgctatgtttcatcaacgagagttgagattaggaagtggtcgagttatgttggtctctgttacgcgagtggattgacccagtttttgaatctattgtctagggtatctacctttcacctgttagccacctgatgaaccctagagttgcccttatcaataaatccatccttaggacttctattcttcttagatttatttgtatcaccccctgattgcagttttatgtacgtattatttgtaccccgtgttgatgcattttagtcgttaatattgtcatctgttggttaacttgacgaatgatcgagtagggctttaaagtcgttatttgttgtcgaatctgaccctagatgtctag

SEQ ID NO: 21254 - DNA, 459 bp, Arabidopsis thaliana columbia
gactaggcctgtgctcgtattggagacagaagaattaggaagatattggcatctagacattggaaaggaggttcgaagaacaacacaggtaaaatcgcctttagttttagttttgactatctttattattgtgatttgatgtttggtatttgcagatgcaaagccatggtattgctcaaagaggagttattacttgcaccatcatcagaggagttatcccatcaagaaaaggaaatactttgacagtgtttacgactcgaactctgatgattaccgtttgcaaggaaagactcataaaggtccaaaacttgtaatcttctcattctcttgttagtatgttgtaagtctttgctgttgtaacacggttttgcaaattcatccgcaggaagcagaacaatatcttccatgaaaagtcgaaatgcgtcctttgtgtcaagggatcatcatggtaatttaatg

SEQ ID NO: 21255 - DNA, 592 bp, Arabidopsis thaliana columbia
cgactcatcccaggaggttgattacatgtacatatagctcaatctctgttgggtaatgggaagaaaagaaaatgaaaccaaaacctcaaaacgaatatgtgttctccattctccaatgatctccattcaatagttctatatagtgatacgaaaccctgattcattagtcaaatgctttagaatcgttagaagaagatgcctcacaagattcggagtgttcatggtgatggtgatggttgttgttatcttcttcttcactgtcatcctcatcaaagggcttttgtttatgaaagatacaacatttctttgaactcttcttctgcataaactcgttgtccaccgtcccgtctttccatgaaactttcttcttcttcctgttcaaccgaagcactaatctttctgttggctgtgaatgagaaacaggattttctcagatggtagtcgatgaagacgaaggcctagtcgcagtgctcatggctcaaaaaaaggttttgatatctacattgggagacaaaatgatcaattcttggctgctcaagacaaaattatcattacctattcaccttaaggaacaagaacaggacaaaaaact

SEQ ID NO: 21256 - DNA, 622 bp, Arabidopsis thaliana columbia
gcaggtcgacacgatccccatgatctatacaaacacataacacatattgagagccagagtgaaaagaattatacccattactaatcgcctttatctgtgaattttcttgataaaaagaagacacaagtcaaagataaaatcaacaagatgggagttgggggaacgttggagtatatatcagagctaatagggaatggaggaagccatagttatggaaaaaggaagaagaagaagcagtttcaaacagtagagctcagagttaggatggattgtgatgtttgtgtcctcaaaatcaaaaactctctttcttctctaaaaggtaactagcttcttcttttataatcaaaattctcgtccgaatttgtgttactgtcccttatgagatgtgtttgcttactcctatctaaaacttatataaatacatgcatcaatcatcatgcatgcatatatataacatgaaaaatcttccttcatatattttcaggagtgaaaacggtggagataaacaagaagcaacagaaggtgacagtgagtggttatgcggatcgagcaaggtgctgaagaaggctaaagcgacggggaagaaagccgagatatggccgtacgtccgtacaacttggtg

SEQ ID NO: 21257 - DNA, 507 bp, Arabidopsis thaliana columbia
gatcgacatgttaacagtggtcaatgcaaagcgccgaattctaaattctaaatatgtaaaacttaaagagaatctttgacatttttttgctagattaataagagtgacataccttgtcgctttctttccagttcttgatcaagctcttccttccacttcttctctatctctgacaaagcaacactgcaaagccaaaaccagccaattcaagcagattcaggaatgaaacaagaagcctagactaagtgacagatttaaatcgttgctggtcaatagctaggctgaatttaaactctacacgtttggagttgggtgatcatagcttaagataagcatgaatgggacttatttctgtcttcttgattcctacagagtttctaaaagaggaaattaaggaaatgtctaaatccttaaaacttaaatcccaattatcgcagccactaaccactggcttaattcctgcttagtgcaacaacgagaccctccagtctgtgaccagtgctgata

SEQ ID NO: 21258 - DNA, 584 bp, Arabidopsis thaliana columbia
gaccaatgcgtatctgcaccacaaatgcctcatcagtcaaggaaagtataagccaggaagtcagtatgagaaaaaccttaactctcacatcgatttgattattaactcgacttttcgcaacggatttggtcacatgacaactgctatgggaagtcccaatatggtaaacatcatattccagtgccgtggagactcctaccagtccaagtgccgctcttgctttgccgcacgatttccggggaaatgtcacttatatttatccaatatccctcatacataatttgcaaagtcattttcgaacagaatgtttacttcgataatttcggaggaatttcaaaaatatggcattgatttgtatattgttataaaactataagagataattaaaagcaatcttttcgttacaaatttaaattctagtttttgaaacacgttcatttataatattatcacttttaataaacttgttttttttctttttgcaaaattaccattacaaattatttagtccataaataccatagataaaagtgatttaattttaattttttggtttgggtttatgttttagtttttaggttttg

SEQ ID NO: 21259 - DNA, 1320 bp, Arabidopsis thaliana
tagtaacgtccgttgcaaagagattgaaaggagtccacaacgttcttaggtctttgtcttcctccttttcttttttggctttgtgtttgtttgaaggagatgtagcgtgctcagcaagttccttgatttggtctggagaaattcttcggataatcccttgaccaatttcttttgatctcgtaaccaatctccctagcaattcttccggcacctataccaaaaaaaataaattcttccaatccttagtatgtgcctgatttaataagaaattcataacatgttctagggaagaatagcatacgttgaaactggtagagaggacttctttggtaaacccattgaagtaggattgctgaaattgggatgcagcagggaagtaatcctgtgaaaattcaagattaaacaatgttagttattttctgaacattacgcaataactcggataactccgaatggtgacacaacgatgtcactatttttgttttttttggtcttaacaacatgcaaaaccggagtaataacacaacaacatcactaaaacaaacctctatgctcacgctataactatatactactgatcttggtataaaagatacataagaatgactaatagaacaataaatatgaaccttgtagttgccgggattgttgacagggacggtgatctgggcgaggcggagaggaaccgtctggttagtgtggtgataaagttgtgacaccagaaggattcttaccacatcacctttagttatgtggaacgattcttttgatttatccgtcacaaactcgatcactcctttaccttgtaggactataaaaacagcatcggcatccaaatggtgaggcacaaagaaagttgttggctccatctccaccaacgagaatctgtagttctcgattcctcggaagagagccggtgcatgttttgtgaacttaggcagcactctcacaaaaccttcctttgactggaaccaatcactgaaactccgcttcctgaagtggtatggatgattcgtcgactcttcctcccatccctcgccagagccaccaccaggacggcgacggggaccttcttgttctccttgctgtggtggctcgaactcgtcgatctccacacggaaggataagcagtggacgacagctatggagataaggagaagaagtgttatgattaatttgttggttattgccattttttcttgttgttttgttgatgtgtttgtttttgaggacaataatgggtggttttagtttatataggaaggagagcttgacatgcatggtgacgagtgttcgacgcatcaaaaccacgacagacga

SEQ ID NO: 21260 - DNA, 682 bp, Arabidopsis thaliana
ctctgcttgtgatgcattttgcaggatctgatgtagtatcttctcagccaaatgacaatggccaagcacatactacagattttcgaaaggtttgattttgtccatttgcttttatagatctgatgtaatttctttgttttgacatgctatcatgtttggcgctgggtcattttcatagggaaatcaccgtgacaaaaacagctcagatgtctatgctgattcgactttgcgtggagatcgaccaaaaggaagcaattgtttgtctcaaacttctttttcggctcctaagcctcttggaaatttcaatggtgctggtagacttcctcccaatacacaagcacatgcattcagaccaccatttaaggtaccttacacatatctatttataaatagttgaagtcaagatttttgcatgacaatatcttacttaaggtttcctcttaatgtaaaaggtttgattaaaattgattctatttgcctttttaaagggaaaggaagccgcaggacagttcttaacattctccaatcagaagacaagctgtgtcccatattctggttacattaatggaaactcaaataatggtttctgggatcaaagggatcataataagaaacctgagagaaatggagagtctgactacttggttgaattgaaatgtggtccgagagccaatgcaaagac

SEQ ID NO: 21261 - DNA, 597 bp, Arabidopsis thaliana columbia
  unsure (1)..(597): unsure at all n locations
nnnnnnnnnnnnnnnnnnnnnnctaaagttcgctatggctacgaattggcacctgcaccatggaatgaacagcgaacattgctgaaagttgatatcctggcgaaagatcgcaaaagtgaagagttaccagcttctaatctggtctttcttatcgacacttctggttcaatgatttctgatgaacgtttgccacttatccagtcttcgttgaaattattggtcaaagaacttcgtgagcaggataacattgccatcgtgacctacgctggcgactcccgtattgcattgccttctatctccgggagtcataaggcggaaattaatgccgcaattgattcgctggatgccgaacaggtaccaatggcggtgccgggctggaactggcttatcagcaggcgacgaaagggtttattaagggcggcatcaatcgcattttattagccactgacggtgactttaacgttggcattgacgatccaaaatcgattgaatcaatggtcaaaaaacagcgggagtctggtgttactctgtcgacgtttggcgtggggaatagcaattacaacgaggcaatgatggtgcgaattgccgatgttggta

SEQ ID NO: 21262 - DNA, 516 bp, Arabidopsis thaliana columbia
  unsure (1)..(516): unsure at all n locations
nnnnnnnnnnnnnnnnnnnnnnctaaaggcgtacatcctggcacccactaagggactatcgccaactcgtccgggtaatttattggtcattccgcctgtggacgtggctgccgccaaattgccgtctaaatccaacgccacggcccccacggtgcccattttctgtttttcatccagtggcgcaccgctatggtcgaggacggttgccccttccttgcgcgctgccagtagttgttcataacgcaaagacgtggagaaaatctccggcgagacgcgctccatgccacgagcaaacgcaaaattttctgccccttcgccaatcatcatcacatgcgggctttgctccatcaccagccgggcggcaagaaccggattacgcagatgactaacgcctcgcaccgcaccggctttcagggtgttaccatccatcacacaggcgtccagttcatgggtttcacacgcgtaaagacagcgccaattccggcgttaaacagtggacactcttccagcagacgc

SEQ ID NO: 21263 - DNA, 529 bp, Arabidopsis thaliana columbia
gccagtgtgctctaaaggatatcgagcaaccttgtttgctgtccattttgtgccgggttcggatagcagcaggttataacaacgacttatcaatgattgtttactatatgataaaagtaaatgattaacatgattcactcctaacgaaagtagaacgcccattgctaagagctcctgaattttagttgagaagcctcgggaaacagatgtttttagttgctcccaacaatatattaactcaggattctgaggtaaaaagaaacttgttttgttacgtatttgatcagttaccgtataaagtttttggaaactctcaattaaatcaatgggtaagtaaagcatttctgcaagataaagccctgcttcaggataattctcaatataaaattcataaccacaaggaaataatattatttgattattatcaacagttaaagtatgcgtctcccaattgataactttctttccctgacggatacgacacaaagctggcataagaggcttaccctatgaatctcatgatgtttat

SEQ ID NO: 21264 - DNA, 523 bp, Arabidopsis thaliana
ggagtggcttccggtggtggtcgcgacggtgttgtttgtggtgctgagcccgggattgttgtttcaggttccgggaaacaacaactttgtagacttcgggaagatggaaacgagcggatactcaatccttctccacgccttcctttactttggccttgtcactgtcttcaccgtcgtcatccgctttccgggcacttaattctatgtaatctttacttacaaaaactttttcttcctatctatgcttttaccttttctatattatcagttataccatgtttcccgtgttcacctaattattatgctaatgttttgttacttttacgttataatgatatcaaacttgcgatgcgtaagaaacttgtttcgaattagtaatgacaaaatggatagttgactagttatacatttttgttacgttattagtatgttggagtatattaatgttacaaatgttataaacagtttaaccaaaatagacatcccaacaaacatagacaactatataatgaatagctcgaaa

SEQ ID NO: 21265 - DNA, 501 bp, Arabidopsis thaliana
  unsure (1)..(501): unsure at all n locations
nnnnnnnnnnnnnnnnnnnnnnnctaaagagcatcgcacgctttttgctgggcaagcagttcttcaactgtcgtaacgcttttcacttcaaccggaatagccgccagactgcgctcaagtcgggcatctcctgggtgacgtttcagttgatcctcaagcaacagccgcgcccggtcatcatgaccaaaatggcgataggcttccgcaaggtataaagtcagcggaatattatccggcacctgctggtgtatatattcaaattcgcggatggcggttgcttcgtcgttatttttctgtgccttcagcgctttatcgagacggggataaataacaaaatggcgataatcgctcagccccagctaacctggtccgggctactcggaacactgttgggtatcggtatcgacagtttcaaagaagcccagacgattcagacgctccttaccctgatcgaccagatcgctccccagccatgcaccttccatctgacgcatttcgcga

SEQ ID NO: 21266 - DNA, 580 bp, Arabidopsis thaliana
taataactcggggacgatccttagtttcggttcttcggagtcttcggttacagagactggtaagcatcagtcaggtgatacagcaaagataagtgctgattcagtttctcaagaaaataaaagctaccaagggtttcttcctccgcaagtaatgttacctaataattcttctccctgggccttaccaatggagtctaacgggtcctaacgctagtttctaccctgtccccttctactggggatgcacggttccgatataccctacctcagagacttcatcatgtttaggaaaacggtcaagagatcaaactgaaggaagaatcaatgatactaatacaacaataactactacaagagcaagattggtctcagaatctcttagaatgaatatcgaagctagtaagagcgctgtgtggtctaagttaccgacaaaacccgagaaaaaaacgcaaggattcagtttgttcaatggatttgacacaaagggaaacagcaacagaagtagcttggtctccgaaacttctcacagtctacaagcaaaccctgcagcgatgtctagagctatgaacttcagggagag

SEQ ID NO: 21267 - DNA, 555 bp, Arabidopsis thaliana columbia
cacttgctccaaatttaaaatcattgacgctgaggagtgtcaaaacgcttgacaaatgatcacacgtgtaagcctatgagtggtggtcgatttgactgatgcactatcaacacatacctaaagatatagagagagaaacgcatatcgttgactctccccctttttcactctcttcatttattcttcccctcatcatcatcatcatcttcttctttaaccaaaaacacaacttacaagaaaactgttgaatctttgtatttatttacatctcctttgacctttaataagaatctgagtggttggtctctgatttgatgagatgactgttgagctgatgatgagcagctacagcggcggcggaggaggaggtgatggttttcctgcaatcgccgcggcggcgaaaatggaagataccgctttgagagaagctgcttctgcagggattcacggtgtggaggagtttcttaaactgatcggtcaaagtcaacaaccaacggagaagagtcagacggagataaccgcggtgactgacgtcgccgttaacagcttcaagaa

SEQ ID NO: 21268 - DNA, 563 bp, Arabidopsis thaliana
caaggcagatagtgagacccagtacatgtaatcatcatagtttagtcctctgctttcaagtatggtgcgtcccaaggtgacatttgtgggttgcatctacaaacataacccaaaaacctattaagtcagttttggagaatgaagagatattggatgattaagagaaacaagcaagggaagagagagtcactttctgccaccgtggagcaagaaactcgtttacagagagtccaatctcagcataacttatagggtttacccaaaacccccacttcaaccaccccggcatatcggctgcaccaaaccgctgtcatatttaagtggagcttttggaacagaactcaaaagagaagagcaaaaagaaatcttactatatgggatggcaaaaccggcaaatacaaaggtgattaacatgacaaagctaccagctgtcattgcagcaactcctgtttgaaagattgcagctatacaccgaaacatggatatcgatgtgaagtgaacagcaaagagaatcatgaattgccggaagaacctgaaacatcatagatcattacattacattt

SEQ ID NO: 21269 - DNA, 493 bp, Arabidopsis thaliana
ttctaatttgttgaccattcgtccgtcggactttataaattgatcaaacattaagcgcttcgtgttataatgtctatgggacattggttagaatttacacagatttcttatccagctattggaagatgttgatcacttgcactctagattaatgctcctgaatctctgattctgcgcatagaaatattacaaaacttgattctcgtaactcgcgtgacaagtttactacttgtgttacaaattgtaaacttcccatgattcttgtattatatgtgtaaaactgtagatgcttcattcaattgctcagtgattttgcttcacattgagacaatcattgtaacgaatgagtaaaaacacttttaacatctacgatgatatcagatcgacattaaactaagatgatcttaggtttctaggaataatccttgataagcatgacaggatttaaacttcctctcataccttgtgcaagcatccgaatgcagatttagac

SEQ ID NO: 21270 - DNA, 515 bp, Arabidopsis thaliana
ccttttttaactcatgctcaccataagcggctattgatgtttcagttcctttacttgttatctctgcacgctaatctcatgaaaaaaaaaaacatgtatcataggacagtaggactataatcttgcataaccattaaggggtagtatgactacaaacattttagaaaccagcttattaaggaagaaggcttctctgtaattgagtattaagggaacattaaaacgtttggtttacgttaaaaataattaagctatttgtgtggtgtgtagcattgtaacttatgagctataaactaattttctcaagcagaatgattactttggttaatcttcattttaggatttgctggatctgtgtcccgagaaagtcagcaactacgaagaaaagctgaagaactttttcacagaacacattcacaaggacgaagagattcggtactgcctagcaggaagtggctactttgatgttagggacaaggatgatcgttggatccgtatctggatgcaacctggcg

SEQ ID NO: 21271 - DNA, 583 bp, Arabidopsis thaliana
  unsure (1)..(583): unsure at all n locations
ctnnnnnnnnnnnnnnnnnnnnnnnctaaagttcagtcgttgagtccgttgtcgttgtggttgtaacgccgggtatggataccgcgtgggcaggtgcgcccagcaggcagaagaggatgaacaggatccaccgcatgactcctccagtgagaaaatagagcaaaaagattagtatagatgctggaggaggggcgattttaaatgagaggaatctggtgtgcctccctttcgggtgaaagggaggaagggatattaagcaggttgctgacaacgtgcgggcttttttgccggatgcggcgtgaacgccttatccgtcctacaagttcatgcaattttaataagttgccagatatcctgtaggcctgataagcgtacgctgatcaggcaatgtgtcttattaagagacgtgctgcaaaaattcctgcaagcgctggctcggcgggttcttgatcaacacctgcggattgccatcttccgcaatccggcctttgtcgataaagatcagccgcgaagtanctttctcggcaaaaccgatttcgtgggtcacgatcaccatcgtcatccctttagagnnnnnnnnnnn

SEQ ID NO: 21272 - DNA, 594 bp, Arabidopsis thaliana columbia
gacaaaatatctaaagacaaaggggtttctaagttctcttctgcacttgaatcccttactatggagcctattgaaagcgaaaatgtagatatttcatcaggtggtgcacaaggtttggttgtctcagttcaccacttccccttgattatttgtcctttcactcctcgagcgtttgtcttaccttcccaaggatcagtcgcagaagcgtccttgtcccgtcaacatgaggattctcttagttttggtttgcctcccataagtactggatctatgtctgacactgatgatgttcctcctggtgcaactcttaccgcacattttctttaccagctggcccttaaggtaaactaacactgcagtaaccgctttgaacttaattcacgatgttcatgaagtacgtgagctagaacactagaagatatctgttcccttgtttgtcaataatttaatttcttctgtacgtttttcttaaatttgtgaccatgtcgtcacttttttaaaattgtagatggagttgaagttggaaatattttcacttggtgaccaatcgaagaatgttgggaagattctacagacatgcaagtgtgatgatgt

SEQ ID NO: 21273 - DNA, 568 bp, Arabidopsis thaliana
tattggatgtaccaaatttagctaatcttatttcagatttatctaatctgtctctattctcccctgaaagacgaggcacagcactgttccttctgttagtatcgtttatctcagacactttgctgagcttaacataacaagaatcgcagacacgatatagtcttcccgcgcttggggctagtgcagctcggaatgctttttttgaactgcatgaatgacagtgcacaagtccacaattgtaacagttatgtcttttccgtgtaaacccaaaagccagtctacaggttgaacactgagactgctcagcaccagacacccatttgtgaagacatatggctgcagtgtaattcgatccgcaagcaatgtattttacgtgtctatccttcaaagcttccacaatagtaggtacttttcgatcctccagatcaccatgccctaatctcccattggctcctttaccccatgtgtaaacttcatttctagatgttaaggctgccacgtgatatgcccgcaggagatctcctcgacaaattcacttgcaagcttgtcttccaccaaacacggtaat

SEQ ID NO: 21274 - DNA, 648 bp, Arabidopsis thaliana
aacggccgccagtgtgctctaaagggctttaccgtgcgccacgcgttcggactcaatttcaatctcacgcagaatgtcggtcaggttctggttcagtgtgtcgatttcatacacgttgctcgggtggaacggcagcgcaatcattggtttgatggcgcttaaatcaacgctgatgcagccatcgtagtacgccatcggttgagggttaagctggcagtaatcctggccgcgaccgtgcagcgccacgcagttatggacttcttcatcggtttgccagacagaacttaaacaggtcgtttcagtggtcatcacgtcaacgctgttacggaaatcggtagagagcgcgctaacgcccggtccaacgaactccatgactttgtttttgacgtaaccgtttttgaacaccgcgccaatgatagccagcgccacatcctgtggccccacatacggcgcaggttttccggtcagatgcaccgcaaccacgcccggatagtcgatatcccaggtgtcattaagcagctgttttaccaactcaccgccgccctcaccgactgccattgtccctaatgcaccgtaacgggtgtggctgtctgacccgaggatcattttgcagccgcctgccatcatctcacgcatatattgatggat

SEQ ID NO: 21275 - DNA, 553 bp, Arabidopsis thaliana
ggttgttctgggtgccatcattgcttaattcctgtgacttgacatcatcacagaggaatcaacaaagagattcatccaaaatacactgacgtgataagggaaaatgcaacaacctctaaaacttgtgattccaaatgctggtgatcagtgttatatgacgaagtacttgctccatctacctgttggtgaatattcctactgctgtccaaaggattggcctcaatagagtcgggaaaggcattccacggctgctaaaaacaggttgggtaggagttagttcattacatcccaagtatgaatgctaatcttgattgtggaatcatgccgttatttcagacataagtaactacagtatttagtttgtcagattacagcttggccaataaattccataaaacatgagaccagcctgtttgccgagcccaacatgtacaggatcatcacaattttcatgaatgaaagaagtatcatagtcaatgcaaggatgagatggtggccatgaacatttcctttttattactcatgctgaccgcgataatataattgaaagcag

SEQ ID NO: 21276 - DNA, 524 bp, Arabidopsis thaliana
actctagaggaattttgttggtagagcccaatatttgctccatctactatagcttcgtaatctccatgtttctcaagccagtcctgccaaataagatagcaacattcaacaaatatcgacatttgaatactcaagattgatgacaattcgcagcaaaaactccaaccagtgtacctatctctaaatgcttatcatgcaatatttaatgtccaagacttattataaccaagctaagagaatcccatctctaacctgaaactcgctgaagaccacatttgtctcacatgaattcatctttgtcttcctatccatagccaaagccaccaaagaatccacaaacttctgtgtttctacctcattggtatctacacaagctaactgctcactgcagctcaaacatcttcctgttgagctaacattacctttctttacagtccatttaccctccccaacccacccatgcccgtgccacccacctccattattcaaaacagcttctctaagcatcccaacatcagaaccaa

SEQ ID NO: 21277 - DNA, 654 bp, Arabidopsis thaliana columbia
aacaacagctgttatcgaagaagactcctatgatgacgagtttccctgcggagatccacaagttgagcctcgtgttggagatgaatttcaggtcgacattcctcttatgatgtctgcatccaagcgcgctgtgtttctttccaatcctgttgctttggatgattctacatgttcttttctcgtcggtctacctgtccaagtaatgtggatagacaaagttggaataggacaaggaaatggagatggcaatgttgacatgaaccaatctttgaaatctttaagagctaaaaaaggccgttgctctgccaagatcagaggaaagagtgacaagaattcggaaaccaagaagcaaagactgaatcttgaggctgttcctgcgataccttccagttcttgggacgatttggaggttgctagctttgttcttggtctgtacacatttgggaagaactttactcagatgaataatttcatggagaacaaaggaataggagagatcatgttgttttactatgggaagttctacaattctgcaaagtaccacacttggtctgaatcccgaaagaagcgcaaccgcaaatgtgtatatggaagaaactctattcaggttggaggcacaacagttgttacccgtttgatccctctatcctgatg

SEQ ID NO: 21278 - DNA, 1218 bp, Arabidopsis thaliana
acattcccaactgcgagaacgaatacggcagcgtcaacagcacttgtgccacctgcaaccatatatttttgtttttataacttaagttgttatttatttcaagaatgttttatgaaagaatattaaaaaaaaactttaggacagacgaaaaaagagtaatttggtcttattataataaagaaacatttgttttcttatagtaaatattactactagatgaattattcattatcgaaattgtacttacttgatttgatgcacagctaaaccaggcgtcccaagcggacccgccatgccagaggaagctcttcatactaaatccattgcccccgttgccgtcaatatcctcctccgccgctgaatcttccacttttctaccggccacctcatcctccccggagactactattgactcctccgcttgtttctcacccgacattagcaatcgatttctgtacggtacacaaagataattatataaagcaaacaaataattgaaaagttacaatcttttgattttttatggtttaaaaagagagaatcttatgaaggaagaaaaattgtctccaagctcttacccttttttccttttagtcctgctgagaagaaacacagagactttagctctgtctctttctacactctccgaagcagagcacagtatcaaaacaataaaagagaaccacaaagatttaatggaagagggagggagggagagagaggaaaagagtgaagaagagctctctggttatgtaataacaatggcaagtgagtaggagagtactgtaataacgaagtctacttaaaaaaatgttctgttttttacttttaatgcggccgcctttgttataattatacatgttcaatgaaagagagagagagagagcataaaagcaggaagctttttcttcatttctttttacctgccttctctatgattcccacatcatttagacctctctaattaaacttagtgtgttttcttttgtgggtttaccattttgatttgtaacttatgatgacacacataaattttgggtatccagttttgattttgaacacaaattatattactatttgttaccttcacagtggtcactataccaaactttctagcattataatattttgattatacattaatacacaaaacacatagctaataataagtaacttttcttagagtttttagtgtatttatattgttttgttttgttg

SEQ ID NO: 21279 - DNA, 655 bp, Arabidopsis thaliana columbia
ggttatctgaatgaagtaaaattacaatttacaacaatcaataaaatcaggaattatctcaaataatcttaatcatgatcctacactagaccaacaacacttatcatatactctcaggatcattgtaattagcttttgtatcgggttgtagcagtgctgatttcatttcatcaacaaggagttaatcagttagctgagagcaaaccgatgtgtagtagattcattatttggtgaattcattacgggattggatctaatcacagtattccaccacctaaacgatgcaacatagcgaattgaatccatgaataaaacctaatcttaaaaccctagaatcgtgtagaagaaaaaatcaaggatacataaaagagagaaccttggcggatttgatatcgtcatcgaggtcatggactctgttgttgagacggctgaagatattaatgttctgctggtcctccatgtcacctccatctcagatcactcttactccctgcaacatcatcatcaccatccattagcatcaattgaagaagatggtaacaaaataaattcctcctattcgagatgattttcttacttgctgctgcattttcgtcgcacatctggggatcaggccaaattcaatagaacgtgctgtgtgagagagagttgtgag

SEQ ID NO: 21280 - DNA, 615 bp, Arabidopsis thaliana columbia
gagagaagcaatccatcatctcatacaggaaaaggagaggtcattaggacaataaaaattatcggcaaacttacctgtcaccaggaagctgagagcagtagaaatgtacaagaccaaccgcggaattcaagctaaccatggcaccagttgcctccaccttataaactgtaccaggcacagcatcaattgagattaatctcgatgtatctttgagatgactaagatcagtcctttctattgcttcttttcgaagtgtctcctcactgttcctagcattccttaggaacgctgcgtgagatacatttcctctgcaagtaacacaagttgacatatcagtactgatttggtgaccagtagttacaaaaatcaaaatgtagttcttaaagctttttatgtacctctcaaccatgagtatgtagtctgatccaggctttcttgcccggccacgagactgaatgtatgccagcaccgtctttgcaaggtcgaaacgcataacaacgttacattgcctaatatcaagtccttcctcagcaacgcttgtggcaactaacagtgtccctatcacagtagaaagaggaaatagtaagacatttcagtataagataaaaaaaaata

SEQ ID NO: 21281 - DNA, 555 bp, Arabidopsis thaliana columbia
  unsure (1)..(555): unsure at all n locations
nnnnnnnnnnnnnnnnnnnnctaaagcctgtgtttcaatctttaaatcagtaaacttcatacgcttgacggaaaaaccaggacgaaacctaaatatttgttgttaagctgcaatggaaacggtaaaagcggctagtatttaaagggatggatgacatctcagcgttgtcggaggagatatttcatgatgatacgtgagcggatagaagaaaaattaagggcggcgttccaacccgtattcctcgaagtagtggatgaaagctatcgtcacaatgtcccagccggctctgaaagccattttaaagttgtgctggtcagcgatcgttttacgggtgaacgttttctgaatcgtcatcgaatgatttacagtactttagcggaggaactctctactaccgttcatgcgctggctctgcatacttacactattaaggagtgggaagggttgcaggacaccgtctttgcctctcctccctgtcgtggagcaggaagcatcgcgtaaaaacgcatttgcaactgtcggcgcttttccagtatgttgctaaagattttatga

SEQ ID NO: 21282 - DNA, 615 bp, Arabidopsis thaliana columbia
ttgaagtctccaagattaaaaacaacaaggtaacataacataacaaagactaaacaaacatcaacaaaaatgtagtgagactgagtaagagtttgttgtgatttgatcttacaggatgttggacaggcgattttggagagctattcaagggtactagagagtcttgcttcaaagataatgtcaagaatagaggatgttcttgaagccgatcggctagttcaaagacagttgatgggagaggcagagacaagatcagaaagcgaggcagaatcagaatacgaggaaactgaaaaggtggttgcagcggaaacaccagtgtcgaggaaactatcagacttcatagggtggagattgtcatctgatactaagaagcatagttcaatgagtgatatagaattcttccacaaagttgagcaggagaaggagaacccatgatgaagtcccaagagctctaccgaagaaattttcatatctagcaaagttagagaacatgagaagccctagtgacagacactgatagtgaaaagagaaggtaatagaacagggcatagaagaagaaaaccccaaagagagtgagagagagagaatagaagaaggttacagtgtgtgagaatg

SEQ ID NO: 21283 - DNA, 575 bp, Arabidopsis thaliana columbia
catgcgtaggctttaagcaagatcgcgtgtaataggttgcagaaagagctttctgagtggcaattgaatccccccactggatttcgtcacaaagtcactgataatcttcaaaagtatcaacctttatgtctctgtctttgaaatgagttttttttctttctgtgattttgatttgaatgcgtatctttgtgtgtgatcttaagatggacaatagatgttaccggagctccagggacactttacgctaatgagacttatcagcttcaggttgaatttcctgaacattaccctatggaagcaccccaggcaagttttgttttttttctctgattcgtgagattttgaatcaaactgtgttcttttgttggttttggtgtctctttggttggctagaagtctctcactgataaaattcttgggtttgcttctgtagagagactttgttatggatgtttcatgttttaattcgaacttattgtaaaaaagttttttgttttatgttttggtgtctcttggattggagctactgtggaggagaatgacttatttttccctgttgtgttgagcaggtagtg

SEQ ID NO: 21284 - DNA, 847 bp, Arabidopsis thaliana
tgctatgtttaaacaaattaaataaattagtatatgtgtactcaagaataaagaagatagaaaagaaaattctatatgagctaaatttgctggaggaggcatcggacgtgggtaccagacctttccaagcacacgagtagtgcttagccatgtcatgctaacatacaccatttggttcatacaaaatccaaatcaaaatctatttttaaaatcttttgcacacgtctttgaaaaacacctctcatactatagctacggaagcttcaatttcaaggtttgtctaaaagctaacgattatgaatcggcgctacgaaaagccaccgccattgtcagtttcctccaaagggaagaagaagcattttgtcaatcacacagctcccaacactcctggaaattacgagaggactcaaaccagtccaacgttatcaacggctcgatcacacgaacccgatgataagctcaattacgagatcttctcaattctcgaaagcaaatttctctttggttacgaagacccaaggctactatggattcctcagagtccattacgacccggtgattccgaagcaggtccttctcccagatcaccgttgactccaaacggcgtcgttctcccgggaacaccgtcttcatctttcagaagtccgagaggaagaatctgcgttttgagcattgacggtggcggtatgagaggtcttttggcgggaaaatcctaatctatttagagcaaatgctgaaagagaaatccggcgatccaaacgctcgaatcgccgattacttcgacgtcgctgccggatcaggtgtcggtggagtattcgctgcgatgatatttgcgacaagagacggc

SEQ ID NO: 21285 - DNA, 538 bp, Arabidopsis thaliana columbia
gtgctctaaaggccacctttcgcagatctgccttaagcagtgttgtcacactctttgtcggtatatcggtgaccgcggcgaatgtcggtaccagtgtgcccatcgcaaacggtccagacgccgaccacatcctgataggcgtaataacgccgaccttcgagtccatccgcattgcccagcattactgcagcaatagtgattgcccctgatccgcccacaatggcacccaccagcttattcctcaacgttgggttcatctcggctcctgctgcggcggttgtcttcgcggattttgaaatagagatttgtcagatacgtcattacggcaatgatgatacccacagcacgccgatagcgttccactgctcggggctgtaggcattcaacatgccgtttaggatgctcccggctgaagcgccataggcatgcaccagtggttagtttgtccatgcgatacatactctcacctcgctttgtgcgagtgctgttgctaggaataaaaaaggccgccgaacgcgagccttgtattgattgatag

SEQ ID NO: 21286 - DNA, 565 bp, Arabidopsis thaliana
  unsure (1)..(565): unsure at all n locations
tnnnnnnnnnnnnnnnnnnnnnnnctaaagctactttttaggtgattatccctaatacccaacagagcatgttgctgctgtgcattagcctggcagtgctgggattcttcctcggtatagaagtacagaaacggcgactgggctcgatgggggcactggccagcaccataaatattatcgtgctggataacccgatgactttccatttcagtcagtttctcgacagcgcattagggcaaatcgtcggctgtgtgctcgcgttcaccgttattttgctggtgcgggataaatcgcgcgacaggaccggacgtgtactgcttaatcagtttgtttctgccgctgtttccgcgatgactaccaatgtggcacgtcgtaaagagaaccacctcccggcactttatcagcagctgtttttgctgatgaataagttcccaggggatttgccgaaatttcgcctggcgctgacgatgattatcggcaccagcgctgcgtgatgcaccgatcccggttaacgaggatttatcggcgttcactgacaaatgcgccgacagcagaccatgtgata

SEQ ID NO: 21287 - DNA, 149 bp, Arabidopsis thaliana columbia
gatcaccttacaaaattgatcaaggagaaggtctaccaaaagacgaccgtgagccagggctagacaaacctgtattgagatccgaacagccatggccttcactacagcttgtgccgctcactcctcggtatgaatcgccggagacaaga

SEQ ID NO: 21288 - DNA, 579 bp, Arabidopsis thaliana columbia
cccgtttgattctagacaatcaaatgttttactttctactttttagaacatttccgacaaaacaaaaccaacttgtcctaatccatgaaaaacaactttcaaatcttgtcttaaaatcaatcaaactccaagcaagaagagttaacaaactaattacccaattaagttaacacgaagatggaggctaagctcggagaaaagctcgaacatctgaccaagatccgcggcgttaccatgagaataaagaagcgtaagtgaagctgtaggattcttaatatacgccgcaaccacctgattacctctcttcgtcttcagcttcaatacttcaacattctccttcacgttctctacaccaatcagcctcagctttccttccaccacttctacgccgtacgacggcgagatttggcgggaaaaacgcaaacttcgccgccattgatgacgtcaccgctcccattttttgtaacaatgaaatctacagaattttgaaaacccttttgtctattcaaccaagaaaggtaaaacccaggaaaaatcaaactttcagatgcagaaggaagaagaagaagaaaaaaaaag

SEQ ID NO: 21289 - DNA, 1001 bp, Arabidopsis thaliana columbia
cgaatcttcgtcttccccttgttcttcttcttcctcttcattttactttctcttcccgatttctctctgtccgattcaccttttcctccgatctcggtctccttagattccggaataatcccctcaaggcttggcttagtaatcgtcgttttctccgccatgagttccaatacggcgtcgtccagcgcgggggcagccggatcgggagattcttccgccgctaggaagaattcaaagcgacccaagtgtatttatcatcttcccttcgctatcttcttccgattattcattatggcttatcgttgactcttctgtcttattcgaattggatcaaattctctctggacttgctagtttttcaataacaatttgttaacagctttggattagctcaaattctttgcaaaattgtcgttacaaagatggttagggaaccatggtcaaagctatggctaaaaggtgtgattttgttggcaaatatcttttgcagattcgaagttcacacagcaggagcttccagcttgcaagccaattctaacccctggttgggttagatttctttctaatctctattgatgtttgagacatctgatttctatacaaggcgcaactaaaagctcctttttttacatgtttgtgctgttgtgcaggtcatttcgacatttttgatagtcagtgttatctttattccccttggagttatctcccttttcgcttcccaggatgtaagtagttactaaagcattgctgctactcatcagattctcttccatatctcacgtgtttcatctcccatgtttaggttgtggagatcgttgatcggtatgatactgagtgcattccggcacctgctaggactaacaaggttgcatatattcaaggagatggagataaagtttgtaaccgggatcttaaagtgagttacttctgccgccacgtttgttttgttctttgagatttgatagatttttgcatttgttgtttactttctctttttctcc

SEQ ID NO: 21290 - DNA, 547 bp, Arabidopsis thaliana columbia
  unsure (1)..(547): unsure at all n locations
gccagtgtgctctaaagaggctgttgcttaccgtcagatctccctgctgctccgtcgtccgccagactngagagcattcccgggcgacgttttctacctccactctcgtctgctggagcgtgctgcacgtgttaacgccgaatacgttgaagccttcaccaaaggtgaagtgaaagggaaaaccggttctctgaccgcactgccgattatcgaaactcaggcgggtgacgtttctgcgttcgttccgaccaacgtaatctccattaccgatggtcagatcttcctggaaaccaacctgttcaacgccggtattcgtcctgcggttaacccgggtatttccgtatcccgtgttggtggtgcagcacagaccaagatcatgaaaaaactgtccggtggtatccgtaccgctctggcacagtatcgtgaactggcagcgttctctcagtttgcatccgaccttgacgatgcaacacgtaagcagcttgaccacggtcagaaagtgaccgaactgctgaaacagaaacagtatgcgccgatgtccgttgcg

SEQ ID NO: 21291 - DNA, 596 bp, Arabidopsis thaliana columbia
catcttccttcgttgcttcgtcgctttggacagaaaagaagagaaaaagtttaatagtaaaataatcgatcctcttctcttctcttctctgaggctcgttggaaatctgaattctccgatcgaatcgaaccaatcgcagaggctaagaagaggacctttgagagaatctccgagtcaggatcagaaaaaacggtgatacggaagctagttctagggctaatgggcgccgcgggctccaaactcgagaaagctctcggcgaccagttccccgaaggtgaacgctactttggattcgagaatttcggcaacacttgctactgtaacagcgttttgcaggtccccttgctcctttctctctttcctttgctttcactgcctctttgattccccatcgcgacgatttcttctggattttgttgaattagtgtgtgtttttaaagcgtttgatttcaaattcgtttcaataggttaaatttgatttggttgcattgatatttctcgaatcattagctctttcgaattggatggagtgtgtagatagatttactcaaggaggttaatacttaatgtaaatcatgtgtgcaattgcaattgtg

SEQ ID NO: 21292 - DNA, 639 bp, Arabidopsis thaliana
gaagagaatcgtggagaaagaatgcaaatcccagacgacaaaacttgttcctcctctgttccaagatacgatgtggtcagtgtttggatcatccaccatctcaaatgtcttggtcagaaatggaggtggagcattttcgtgtaaaccctccattggttgtggtggtggtggtggatcgcagccttccgggagaaacgggttcatcatcctgaggtaacgggttttgaaaaacccaattggaaattaaagacaagattcttgatgatttcgattaaccagtctccgaagttgagttcatcatcttcggattttgaaaaactggtcggattaagttcgtttatggcagttgatggagtgaggaaggtaatgtccacgtaagataattttgaggtggctttatataggaagagtagaaagtgagtgatgatattagatttgattaaaatatttgtaaaaattattattatagtacactcaagttagaaattagaaacttctggaaacggttttggacctttttgatgcacattcgaatagtcgaaacttctggaacttcgtaattgaggactgtacggtatggttttccattgttagtattaggaccaccttttgtgtttacaaatataaaacaaagagtga

SEQ ID NO: 21293 - DNA, 1123 bp, Arabidopsis thaliana
agcccatgtttcttgggctttaagttagcaccaaaccttgaacttgacgaagatttttccgcgtataaattcaagagtctctgccattgtgatttatctccgtccgataaatatatacaagaacaatgaacagaggagcaaactctgcttccatccctaatgatctcattcttgaaatactctcgagattgcctgcaaagtcaaccgggaggtttcgctgcgtgtcgaagctgtggggatccatgctttgccattcatatttcacggagttgttcttaacgaggtcctcggctcgtccacgtctcttaattgggatccaccaagacggtgaccggtttttcttctcgtgtcctcagcctcaaagcccatatgataactcttctattgttttagcagcagattttcatatgaagttcggtagagttgaggatgaatgggtttatcatattctgacattaggaactgaaaatgtgaggtggagggagattatatgtcccttttcatatgatcctcctcgggaaaagccgatatgcatcaatggggttttgtattacataagtgtcggtagttattattcacttataggttgctttgatgttaggtctgagaaattcaagtttttatatctaagcccagattgctttccaaactggtctagaaaattgataaactataagggtaaattaggtgtgactataatggaagattatcatggtggatttccccttaagttgcgtatgtgggttctagaggatgtcgagaaagaggaatggacgagatatgcctacactttgaggcctgagaataaagtcgaggacaatgactatgtatatgttgttggggcaactgcttcaggtgaaattgttttgacgaaacagaatgcatataaaccgttttatgttttctactttagtcctgaaaggaacactctcctaagcgttgaaatccaaggtgttggagaagaatggttttatcataatgtttactactttgtagaccatgtcgaggatcttaggtttgatgttatgaagacaacatatgctggaacatctagaagcccaccaaaacagagcacatcaacatcatctagagaagatcatgaagtgaggacccttgatcagac

SEQ ID NO: 21294 - DNA, 524 bp, Arabidopsis thaliana columbia
ttttttgcgtaaaattgtctttgctatccttattccttagataggcgtttaattcattgagaagtattagattatgataaatataagctatttgggaagcatagaatttctttgtagctccagtcgaataggctcttctagttgcaagctttatcttagaagtagctagttgcaacgtttctctatctctctaggtagcaaattttatgaatatatggtttcttatgtcacattgatttctggtatgaacatctgttagggattttggaagtcaacagcggaacgcatgttttgtgggagagtggttgtcctgtctgtcctatctctgctgctgtatccatttctgtgggcttggactgtaattggtacacaatggtttacaaagtcgaaaacttgtgtaagtagtttttccgatcatggcatatgattattcttgttggaaatctgttgctgagttagtatgtattatcttgccatagttacctgaagaaggccagaaatggggctttcttatttggttgatg

SEQ ID NO: 21295 - DNA, 567 bp, Arabidopsis thaliana
gtagcagaaatctaatacgtatggagatgcacatgaaacagaagagttatttaggattaggatcatcttagttacttgagatcaagtcaaatgtcatttcttactacaatatcaaaggtttaatcttatatggtcttataaccaattgttttccttaaaatacttaacgtgttataataatataatataatcctcatttgttttgaaataatgcaaaacgttttaaaatatcaaatcctccaatcattcgtttagtttactaaagttataaacttcgaatgagtcatgactaaagtagatgtatacacagacacaaaatattaatttatttttgagtatataaagatagaagagaagaaagacataaatcttacgtccggtctcgtgagtgaaatgagcaaacatggtagcaatttcacgtctggtaacagaattggcaaagttggggaaagtattagcggcgttaacgaaagagtcacgggtgtagaatcttttccccgcgcaaccattaccagcttggttgataatattgttaaagaaaccttgtgtcacaatgctaccgaccga

SEQ ID NO: 21296 - DNA, 605 bp, Arabidopsis thaliana
taatgtttcaaaatgtatagtatataattaaaacgccttcaatcattgattaatataacaacatttttttgaagaagcaacatttgataattgatgtcttccctaacggacaaaataatcttattaagaacataaacaaaccaaccaatggaaacataatataaaaatcgatgtaccaaaataatataaaatcataacattgagaaatacgtgcgattccctataatacaaaacgtaagtcaaacaaatacgttactattgatattgagtggttcccactaattattctcctaattttgtcattttgtccattttaatagcataatgtattgtcacaaaaatgcaactatttaatatttatatccaaatttgtgatcttctcaaagaactcaagataaaaaaaaacaagagttcttgcttaagcatttattgattggagccattaaagcttttatatttctcgtgaatttttgagccaaaacggttatatatttcttgagtttttcttttcttgtaacgggtccgagtcacgatgagtcaactcggagatttgcttagagaatcagaagatggaacaagaagtgagaggacgatgatgatgagtt

SEQ ID NO: 21297 - DNA, 447 bp, Arabidopsis thaliana columbia
gaaatttgacgatttttgggagctaattctgggaattggataattttaattctttgatttctgagagagaaaaaactgaactttaggattataaagcagaaccaacgagctccaatggtggtggcgacgactatagcactttacgcgagtccaccaagcagcgtttgttccacgccacatcagatctcatgtgatctcgatctcacctccaggagttcgtcaacatcctcttccatggcttcctcgccgcagaaaccaatcgttggaggtctctcttcacttttctccagcgcatcagtcaaatcttcatcttcttcctcttgctcatactcaaccggagtagatgaagtctcttcactacgctatgatcggagtgatgatttgaaagatctgagctttagagctcctttggttatccccggcgaaatttgtgaatcatttagacga

SEQ ID NO: 21298 - DNA, 548 bp, Arabidopsis thaliana columbia
gaggatagaggatcccctaaaaatttaggaatataatgtcgatagatccaattactttcaaaattgtcgctcattgaaattaacaatttattaagattaactaataaaaattcattttgcacaaaaaaaaaagtaataaaaattcactaagacaactaaaaaaatcactttttataaacagaagaaaaaacctatataactactttgtggatgttaactcctctaaaactgtcctaaatctctctaacttatcttgattatttttcctttcagcaatatcatcgatggcgttatccaaagatttgatgttgaaatgctcggaagacatgatgagtgcttacaaatctgcttgtgaagaacacccaaaactaaaatcctttgatgcttcccttcagcagcgaaccaacaaaatgatagactcactcaccgttgaagacaagaatggttcgtcctccccacacgacgcacacatggagctctccaagcaccttagttgaagttacccaaggtgtggcagacttcattaccgaaatcgaagacgatgtgtg

SEQ ID NO: 21299 - DNA, 527 bp, Arabidopsis thaliana columbia
tagtgatgctggtgttgagattcatccgattgacgaggaggaagaagaggaaaccgatagactttgggcgttaaaacatgacggtggagttatcggcgaagttaagactcttgttgacccgaataccggtttgccggttgttgagatcaagagacagttttcgattcctaagaagctagacagacaactttgtttacgtgctgatagctttaaggggataagcgacgatgattctactcaaaccggtatgaaaacgataaaccggatgttaagcgggaaagaacggatcggtttgagttggcctgagccaccattgaacatgttaggaccttgtgttctcgatagacagccgtcgataaagacagtgaagtctttaaaaacagccaagtctttcaaggcttatagttcgtttaagtctgtagccggaaacaacaacgggattcccctgaggttttagctctagcggaaatggacctgaagttgctaatggagaggaacgaagaccggcttatgtgaggctagtgagt

SEQ ID NO: 21300 - DNA, 336 bp, Arabidopsis thaliana columbia
gtcttgcaaaattttactttgatcgagaaatctaaaatctaactaaaaaacacaagctaactgttacatggttcttcaacgaagccatgtaagagatcgtcttttgtaatgcagattgcaaacagatccctcttgcctcttttataactccttcctagaatcaagaccacaccttcttttttaatgcagattctcatgggcgatttggaaaatcttatcagaacgtaggaacttcaactctctaagaaattgggaatctctctttggccagttaaggaattacgaagctcagacatgcttcgtagatacagatccaggatgcgaaatgcttggaag

SEQ ID NO: 21301 - DNA, 594 bp, Arabidopsis thaliana
  unsure (1)..(594): unsure at all n locations
tctnnnnnnnnnnnnnnnnnnnnnnnctaaagaatcaaggtatcatgacatgtcccaacctcgcccactgctctctcctcccgaaactgaagaacagttgttagcgcaagacagcaactttctggttatacattgggagaactggcggcacttgtcgggctggttacgccagagaatttaaaacgcgataaaggctggattggcgtgttactggagatctggctaggtgccagcgcagggagtaaacctgagcaagattttgctgctctgggcgtggaacttaaaactatccctgtggatagtcttggtcgtccgctggaaacaacattcgtttgtgttgccccgttaacgggcaatagcggggtgacctgggaaaccagccacgtgcgccacaaactcaaacgcgtactgtggatactggttgaaggcgagcgcacgatcccgctggcgcacggtcgcgttggatcaccgttgctgtggacccgaatgaagaggaagaccggcagctacgcgaagactgggaagaattaatggatatgattgttctcggtcaggttgagcggattactgtcgtcacggggagtatttcagata

SEQ ID NO: 21302 - DNA, 982 bp, Arabidopsis thaliana
ggagtaacacgcgatcgatgagagacaggatcttgaagctaggttggtgtatggacaagatcacgatcctttctctggacgtcgcaatagatttgagaatttgaacgacatcgaaagcggatttactgtctaaacccgaggtgggttcgtcgaggagtagtacttccggatcatgaagaagacttagaccaattgaaaccctcctgcgttcaccaccggacaagccttgacctagtcttgtatgtgcaagatgtgttaggtttagttctttgaggagagaagcaacgacactggagacttttgataggttttttgggagcaagagagaggcggagaaagtgaaggtctcggagacggtgaggagagggaagaaggtgtcgtgttgaggaacgtaggaggagattttacggtaagaagaagggttaataaggacggagtttagaagtattgagcctgaggtcggggaggttcttgcggcaaggatatcaaggagagttgattttccggcgccgctagggccaataatggcgaggatttgggaaggatgagaggtgagagtgatgttgcggaggatgaaggaaggttgctccgccgtgaggaggagcggtgaaagaggtttggcgtaggagatggaagaggtggataaagtgtacgactccattttgagagaaatgtttaaaggttggagaagggaagtgagtgttgtaaagagaatttattgatgcttgagtttggaatgttttgtattttccaatgaaattgacaatttttcagtctttttttctttcttatttgttttttgaccttttggttaattattttgtcttttctgtcattttgaattttgcgttacatagaactcatcgaatataattgtggtcaaacggtgatgtaaccaggatgcgacagtaagacaagagagagtcagatattgaagagatcattagagattcaagtccaaattaagatggagttattagtg

SEQ ID NO: 21303 - DNA, 522 bp, Arabidopsis thaliana
  unsure (1)..(522): unsure at all n locations
tagtaacggccgacagtgtgctgtaaaggtgtactgcgctttggtcagcgggtacatgatgccacgaacgataaaggtgatgatgataatggagaagcccaagttacccacaaagctatggatccatttcagcagtttgaacagcggctgagagatgaaccacaaccaaccgtaatcaagggtcagatccaggtgcgaacgacagctgccattttgtcctggatttccgggccaacccacagggtgctgttcatcgcgccagtctgaccaggctgaaccagtaccggctgagaattatagccgatagcggcgatgccgttacccagattagcggtatagaagttgttggtagcgtcgttatgcgggatccacgccgtcgcgaaatactgttgcagcatcagcacccaaccagctttcgaagagatgttcaggttttcgttatcggcaatggtatcgaacttgtatgtctcatacttctctttagagnnnnnnnnnnnnnnnnnnnnnnnnnnnnnnnnnnnn

SEQ ID NO: 21304 - DNA, 481 bp, Arabidopsis thaliana columbia
ccggaatctcgagtcgattatcagtttcggtgattcgattaccgacacaggaaacttggttggtctctcggatcgtaaccatcttcctgtgaccgcgtttctgccgtatggagaaaccttcttccaccacccaactggccgttcctgcaatttcgtatcatcatcgactttatcggtacttctctttctatgtaacttgacatgtaagtaagtgactaggaatgtaaatctgatgaagtatcgaatcatgatcttataattggtctcagttggagtgttttagacgtcttcaatctctgagaagaatccaaaaacacaaaaaaaaactgatagttgcgtttgaacctctgttttcttgtgtgggcacagcttttccgatttataaaaatctggattttcttgattagggtttcttatgtagactctttctctgatttggttttccttgatctgcaagtcaacagtagtatgagaccttaag

SEQ ID NO: 21305 - DNA, 546 bp, Arabidopsis thaliana columbia
caaaaggatatatgtttcagatacaattctcaattattcaaacggtagcatttacgtgtgagtcataatcccttaaaatcccagtgacaatactcaaaagaaagtaggtcaacaccatatttacctgcaatataggatctggaatatggggcattctctcgtcataaggctcgatgatgatggaaaatccccgggcatatgtcccaacaagagttgcaaagtcgcacactgtctggataggcaaaaactcatctgtatctgtaatttcaagggttagcatgagagactggagccggtcataacagaacttcagtgttttctgctcaattccagcctgagaattcagtgacgatacaaagctaacagggctttctttctctacattctcagtgtccagccgtacccccaagtactgaagtaatcggcgtaaaacatgcacaaaatgctcagcccgtctaatattccccgggacagcctcctttagaatatcatgaggcagtgcagggtttgcaagccattgatacctcctgcaaaaaaaaaattgtt

SEQ ID NO: 21306 - DNA, 682 bp, Arabidopsis thaliana
tacaattattacaaatgcgaattcaaaatccatacacaacaccggacacaaaaaatcgttacataaccaaatacacatgtatggggaagtggaagaccaagccaaagaataagatgatgaacacaatcatatatataggtatgaaactcaaagaacccagcttcttttcttggtgggatattttcgtaatatggtatcttaaaatcagttgcgggttttgccgtagagatttgtgtaaaccggcttcgtacgttgcacaaggatcatactcaaggcggccgcaatgaggcagaatccagacattatgagtgacgtcaagaagtaacagatggaacctcggcatctcaggacatcgtcaggattgaacaaggatccttgtgcttgcctctctgcttcgcggtcataaatggaacttgcgatcagccccgaaaagactaaggatcccgctgggttggccagcgtcaggaaattgtataaagctccaaacttctttagaccaaagagctcagaggcagtggctgggacgatggcccagtgagcaccatagccaagtccaatcaatagtgtgccgatgtgcatagctccaggccatccgtatgcaaagaagatgtgtcctactgacattacaagctgagccactgctatagcaaccggtcttgggtacgcatagtccctgcaaatc

SEQ ID NO: 21307 - DNA, 595 bp, Arabidopsis thaliana
ataagatgaaagcaaggataagcaatcaaattatattaaaaaaaaaaaagcaactgatccagataagatatgcagaaaatatacacaagactcaactgaccaaatcaaagacgcttattatgacaaactcaagagagtaaaaacttgaaaacccccttaaatgatactaggagattcccatgtaaacctaaaaccctgaactagcactgctacaaaacttgcatgcttcttactataggtaatgatgatcatcaagagcaatgatcaattatgcaatgaagacaaaacctactatcaacagagagaggaaaccgatatgactgcagctaagtgtaatcaggtgaggttgttttgagcaacagcttgacatagttcatcctcatagaagagcactcgagggtgctttggagccattggtttgaacaaagtcggcctctggagaacagaaggaacgatgcatcttgaaggaaatggtgtctggtcttggaaaagaacagcagtgatttgcttcatctccgcgagtttggttcgagagggtggtctaggagcatgttttggtgctttgggggtatgtgggcttgacaccattgttggg

SEQ ID NO: 21308 - DNA, 731 bp, Arabidopsis thaliana
ttaaaaaaattgagcccataacaaagctgtgttttttttgaacacgcccataacaaaactttctaattaccattttacgaccatattaataacaaatattaggatttttttttttaatttgcttttaacagtcaagctagaaaccagacgaaatcacagtctttagtcaaaaacaatataaaaaaaaagattctagattttttcagctttggataatttactttttcaattttaagacttaaaaggaacagatctttggacataatctcaacaaaatatctttgaagtacacttttaaactctaataaaatcacaattatcgcattattgttgtaaaaatgtacattgtactacacaccaaactccaacccaaaaacaaaacccttataaatacacacacacaagtatacacaacaacaaaatcttcacattgcacgtaaaaaatatctttatacaatgaacggcatgagtggatcttctccggcggctccggctccttcaccatcatcgttcttccaacatcgccaccgtcacggtggtatgatgcatatgactttcttttggggaaaaaccacggaggttctattcgacggatggccagggaccagtctgaaaatgtattgggtctgtctcgccgtcatttttgttatttccgctttctccgagtgtctatcgcggtgcggtttcatgaaatccggtccggctagcttgggaggcgggctattacagac

SEQ ID NO: 21309 - DNA, 527 bp, Arabidopsis thaliana
aaaacaaaagaacaaagatgggaatcattggtaagagtgtttctctaactctctttgcacttttgtgcttcacttcctctgttttcaccttaggagtgaatcaacctggttcatcagatcccttccatagccttccccaacaccttcccctacctccaatcaaactaccaactcttccaccggccaaagctcccatcaaactaccagcctacccaccagccaaagctccgatcaagctaccaactctcccaccagccaaagctccgattaagttaccaactctcccaccgatcaaacctcctgttctcccaccagtttaccctcctaagtacaacaagaccctagtggcagttagaggtgtggtctactgcaaagcttgcaagtacgcgggcgtcaacaacgtccaaggcgctaaacccgttaaaggtactcacttatatacattcatgatatgaaagtctatatattatcctaaaaatcactcgaacccttaatatacgcacctgtggaccgtggtatgtcgtatg

SEQ ID NO: 21310 - DNA, 571 bp, Arabidopsis thaliana columbia
atttagataaaaagagaaaataaacatgatgatactaaaagaaagaaaacgacttgggtaaatctctgagacatgataatatgcttagaagtgataaaggaacctaacctcaagagattgttcaacttcaagcgctagaattaacagaattccagagctggacccacttaaccatagcatcagcagcttgcgtaaaggcaggatcatctgaacctaactgctctttcaccgctttagcaagctcaatcacacaatcttcaactttaagcgcagtctcgggcaatttcaatgaatcgaaaaatggaacacttttctccatcagcttcattccttcccatttcttcctcaaactctccactgcatctcctctctcgtttctccacacataaggcagtccggttttcacaccataacccaaatgatcagagatatgtttcagacacatcccacaccaaacatcttcaagtgtttccatctcactttcccttctccagccaatctgagtgcaggcacaaagctggaccaccaactcgcggttaaaacaatgttgattggcttatgggtagatagc

SEQ ID NO: 21311 - DNA, 526 bp, Arabidopsis thaliana columbia
tcggaaggcttgcttaccgagtaagttttaccatattctgcaatcaataatagagtgactaacttgtaaccgactctgtaactaactctgttattgataatactcttcactttctttgaatatgtatgtgactggcttttgctatatctgtagcatgatgcagccacaaccaaaatactccgcgtttcgagaagctagctttgggcacgggttgctagagattaaaaacagaactcatgcttacttcagctggaatcggaaccaagatgggaacgccgtggcagcagattctgtgtggttgcttaatcggttttggcgagctcaaaagaagacatggcttgatgcattttaaagacaaattgaagaaggttttatttttgcagcaattctaaacgaataaatcagttagtgactgttttacgagggttgttattgagatttgattaaaacctcctctcatacagacaaaagtttgttattacataagtggttttgccctatacaagttaatataccatttcactaa

SEQ ID NO: 21312 - DNA, 606 bp, Arabidopsis thaliana
cagctagtggaagtgcgtcgatggatcttggcccgaaagaaggggcatgcagccatagtatcagtagcggagggaagtaatggtactccccggtagttcttatgagtttatgtgaagtcatcatgaattgtatgctttggaattgttggggggcgaataaatccatctttagaagatcgatacggtatatgctaaagaaatttgatacggaggtactagcgctttttgagactcacgcgggggggggggggggggtgaaaaagcaggtagaatttgtcagaagctggggtttgagaatgcatatagggtggatgcaacaggtcagagtgggggcttgtgggtgctatggaagtcgagtgtgggggaagtggatattgtggtgtcacaagctaatatatccacgctaaggtggtctgtaatggggatccgatgaatctaatagtggtttatgcggcgccatctatgagtcggcggagtggtttatggggagagttgaaggaagttgtatctggtttggtagggctgttgataattggaggagactttatcaccatcttgagagtggatgagagaatgggtggaaatgggaggcttcaccagattttt

SEQ ID NO: 21313 - DNA, 473 bp, Arabidopsis thaliana columbia
tactagatccgctttggtctagctcgaaacaacaaaactctcgtaaaatctcacattccatctctcgatttggttttattgtctccgaagaacaacaacggtactccttacccatcacctgtttctctcagttcaccatcttctcctgttactcttcgtgagattctccttttatctccttcccctcttcgtaaatcgagaacccgtttaagcaatcggttcgatatggaagctgcggaggctgctgtgacggcacgacggagtaagacgaagggagggcaaaatggtcttttggcctcgccgtcgccgaggaatttccggaggtagagactaaggtcggaggcgatggtagatacaaaggaaaatacggagccaattgttgtcgtgaccgatgaaaagaaacaaaaccagaggaaacagaagaagttgggtcgatctaagaaggagaagcacagttctgttcctctgttagc

SEQ ID NO: 21314 - DNA, 572 bp, Arabidopsis thaliana columbia
taagatttcccatgctgatttcgtcttctaagtttccgtcaaatgctgaaattgtctcgtacagaactcttcgaacgtcgtacactataaaatcctacaaataaagaaaagaaaggaatttgatacaactaacgaaagactactgattagcagataatgaatcctattgtcttgttctggtacctgtgtatgatctgttgcgtattgcctcttatgtttggcatcagacttggagctctcatcggataaactttctgttaaatcctgagatttgcacagtttagcccatttcttgtattcatggctcgaatttagtatcgtcagaaataaccgtgctagtttgagtccccaactatatcatccgggatagctcctgcattaggtaaccacccaataagctctctgcgctatccgggaatgagaatagagaaataaaaccttaacgggtatataatcattctgtttgtgtttagtgctgatcaaacctgttaacgctaactttgcgcagatctcagcgtcatacagattaggaggaaaaattccaggcgtgtccagtacatagacattgggat

SEQ ID NO: 21315 - DNA, 456 bp, Arabidopsis thaliana columbia
atcacttttatgctaattacatgttatattatctttattgttttctacattgatgtaccccaatttaattaactacgatagtttttcatgatttttttcacttattactgaaggagaataaagtggacttgtacataaatggacatgatcactgcttgcaacacattggttctcacgggtaaaattataagtacttatttgttgagtttaaaatgtttctttctctattaagttgttatattttgttgaaagaaagaaaacttaacatatattttggaaatggtgaagtaaaacccaatttcttacaagtggaggaggatcaaaggcatggagaggacatgttcagccatgggatccaaaagaactcaaactgtattacgatggacaaggtttcatgtctcttcacatcactcactccaaagctaaattcatctactatgatgtttccggcaatgt

SEQ ID NO: 21316 - DNA, 673 bp, Arabidopsis thaliana
gtttaaaacagattggtccacaatcgttgccagaatcaaaccgggagcataatcgaaacggtttaagacaatcactgtaccgatgacctcatcggcgctaagatgatccctagcgaatctcttcactataacacgtggcattcatggcacaacgacgatcgtatggcacgaagtagacgccctccacgcgtcaatgctgataacgtccatgaaaaatctgggaagaacgctcgagccactgattcaatctctgattcgtgcaaaccggccgttgcgacgaagatcattaacttaaggctaccgtttctgtagcccaaaacgtcaaggagtgctatgataggccagagaaacagcaaggtcgcaaaacggattagtcctgaagcctcgaaagctacgagcatgaagtaggcgaagggttttgggtgtttcagtagtgttccgtctagctccgacacaactgaatacgatgttgtagttgatgactccatcacgacttaacttgtttctttttttgggtgtgtggtttcttgaggttttgatttgtttgaatatggaaaattgtggattataaagtttgggtttataagggttggttggagtcatatgtctctgatgcaataacacggcagtttatcagtgtcgcaactacttgttttgtttatgaacgcattaa

SEQ ID NO: 21317 - DNA, 555 bp, Arabidopsis thaliana columbia
  unsure (1)..(555): unsure at all n locations
ccatctgtattaggagttcggagtaaatgatatgacatttcttatctatccttgtggatcttataatgcaaaccttgcatgttacagtttggaaacgaaagagctactgcaacttatggtgttcttcctgctgcaaatgtttcccctccttatgctttggcgtcgatatcagcagtgcaattcggtccattcggacacagatttgctagcgctgcactggatggaactgtatgcacttggcaatcagaagttggaggaaggagcaatattcatcctgttgaatcatctctttgcttcaatggccatgcatcgtacgtttcatgatccttgagtctataagttcttgttcactaatatgctaaacacacataagtcttacattattgctgtcagtcatgaaaattaccattatttncctgtttcttgttctattggcttcagctattctgtttctgttatttatggttgcagagatgtaggatatattagttcgagtggcatcattgttgcagcttcaggatatagctcaagtggtgcaaatggtcgtgtgtggga

SEQ ID NO: 21318 - DNA, 614 bp, Arabidopsis thaliana columbia
ggccgtggcaatggcagtttcgaaatttggtatttgtcttgtatccgtaaaccttaacaagtgttttattttgttgtcttgtgaaagtgaaagagagagtatatataatttggctctgtcgtaatgcacagattgaactacagaaaatggcgccttcctttgaaaccgtttggtagttgtattcacagctatgctgatagaacgaagcttcactcgaatctgcttttgggagatttgtctaaatctggtcgggtcgatgaagcccgccaaatgttcgataaaatgcctgagagggatgagtttacatggaacacgatgatcgttgcttactcgaattcaaggcgactttctgatgcagaaaagctttttcgtagcaacccagtgaagaatacaatctcctggaatgctcttatctctgggtattgcaagtctggaagtaaagttgaagcttttaatttgttttgggaaatgcagtctgatggaataaaacctaacgagtacactttgggtagtgttcttaggatgtgtacttcgcttgttttgcttctgagaggtgacagattcatgggcatacaataaaaactgggtttgatttggatgttaatgtggtgaat

SEQ ID NO: 21319 - DNA, 736 bp, Arabidopsis thaliana
tatcttgcttttgtgcattggttatactgtaataccgttacatttgtccaataatataggtgatatgtgaccacatgggatggggagtgaagacgggtttgccttacatatggcacagcaaagccagcaacccattcgtgaacctgaaaaaggaatacaacggaatattttggcaggaagaggcgattccgttctttcaatccgtgactcttcctaaagagtgcacttcggtgcagcaatgctacctcgagctggccaagctcgtgagagagaaacttgggaaggttgatccttacttcatcacacttgcaactggaatggtcacctggatcgaagcttgggaggagcttaactccgcggagggaactgaggctgaggcaccaaaaggcaaaaattagtaaagagaaggtcactgaataaggcaaatggtattgtttactaggagaaaagggtttgagtcacatgtgcaaccctctctgtttttcttaatcataatttgatttgcttctgtctttaatttcttgtcatcagtatttgtgttctcagtgcattgtcagtttgtcacaaaaagagaaggtgtaatgtgctctatgcattttgttttctttaaggtttctaaactctttatctatgaaatatctatcattcctattttccttaatttgagagtaaatttacacagttctcaaagtttaaggctttcttatcataaacaagccctcattgtacaatgtag

SEQ ID NO: 21320 - DNA, 555 bp, Arabidopsis thaliana
  unsure (1)..(555): unsure at all n locations
tagcttattcttttcttcgttgctgactgctgataaattttcaaaacgagatatggcttcaacctttgcagcctccgctgcatccttctctctggaaagttgctggatttcatatgtaaattttgatagatcctcttgcagactatcgtttgtctcctgaacttcgttcaactcagcaagtagcaactcagctgctcttcctagatttctcgactcctgctcagcagaagtcacggttgtactcattgtntgaaacagttgggagattcgttgaagcttcatgactggatcatttatgtcaccttcatcaccaatatcaatgctatttaacgcattcaacgtcatgctcaaattaccacttctttcctgtaaaagatattctgtttcttgcgaatgaattttcaacaattggcactcagactctagggattctaccctcacagaataagattccaactccctaaatttcttttcattttccaagagcttttcatctcttttgataatctctgatttcaggcgaccaagctcagcgttcacgtcttcaatagtttg

SEQ ID NO: 21321 - DNA, 352 bp, Arabidopsis thaliana
gttttggtctcagttagaaagtcctttctttatctaaccctgtttttgtttctgaatccttcagttcctttatgaagctggttttggttcaaagcaattcagttctcgaagtgggattatcgggattacccaaccacgccgtgtcgccgttcgtgccactgccaagagagttgcatttgagcttgatgttcgtcttggtaaagaggttgggtttcaagttaggtacgacaaaaagattggcgaaaactcctctatcaagtttatgaccgatgggattttacttcgtgagatacaggtaattgacggtttttcgcctggtttgttttgtacattcttttccatgttgatcatg

SEQ ID NO: 21322 - DNA, 527 bp, Arabidopsis thaliana
ggatccccccgtgtatcatgaaagtaacttctgcggcacgtagagccgctgcttcctgattacaaacaaaagcagtacattgtctcatctgttagattgagtatcttacaatataacagagtttgatacagagagttttttccgtgtacacacctgtctttgtcttcgacgttgtagtataccgatggcccatgccatgatgtaacatgggaggagaaaaccagcagcacgaagaaggaatagctattgaaacaaacaagtgtagtcagtgacggtataaagaagtagtgaaagtaagtaaagatgaacatacagagaagaaggcagttggatcgtcctcgtcgtctgggttcgttgtgagatttagcgcatctcgtaacagtaaaagtgccattagctgccattacagaagttagagtgcaggcatttagtattaaatcatggtaagaaaacatcttctcaactgagagcttacgatgagagcagcagacgacaaaaggcagctccgcttgagttatctcagaata

SEQ ID NO: 21323 - DNA, 580 bp, Arabidopsis thaliana
cgcttgagttattctcagaatattcatcatagtctgcttccaagaaatgacgttctgcagccgccattgccagaatgcgcgggtcggtcaagtccaacggaactccgttctcccaatcgtcactgcacacaacacaggtcactcactactttgttaacttgataagttcttcacaaggtattattaattttgttataactggttacagataatccacttgtacaacaattcaacaagtcataactctctatgtttaagcaaatttacccgatgtgaattatagtttcatcaggaggaggaggcggaggtgcagtgtatccatgttgataaggctgttaaaaaaaaagagagcattttagttgtaattggtattctctttagtgtcaatagcagttagataagatacaacatttagcagcagagtgatgattaacctggtgacatatttcacaggttatgtcgcctttctcattacaccaacgctgaacacacttgcggtgagcatactgcataaatcaaaactcaataagaaaattttctctaaccaataaaaaacaaagaacaatgagatcaacgtgtt

SEQ ID NO: 21324 - DNA, 603 bp, Arabidopsis thaliana columbia
ggcgtggtggcttctcctctttctttaccactctgttccggtcccggcgatgcttcaagctccggagtctccgggaactcggttgagtcgagacggtgtcaaggcgtttcatccggtgattcttgttccggggattgtaaccggcgggctcgagctttgggaaggtcggccttgcgctgaaggactctttcgtaaacgtctttggggtgctagcttctccgagattcttagaaggtaacacattagaccgttatgttcggttcgagatatttttttagacccggtcagatattggtttggttcgtctggttaggggtatgtataattggttaagcttggtttcttcttgaattggctttacgtagtgttatactgttgttgttatggatggtctttggattttcattttggttaatgggtggagatggttctttgggttttgttattgttttgcaactagtttatgaaaatattattttctaagtaatgatggatggttttaggaaattaataattaatcgtgatttttgggatatgtttttaaatgtcattcgaatttggaaatggaaaccgtaagttttgattctatataggaagtagaaa

SEQ ID NO: 21325 - DNA, 514 bp, Arabidopsis thaliana
aaagacgtagctgctgatacttctgcaaggagagatgttttagatattgctcaagttttccgtgctaaagccattgatgtctctgatcatactatcacccttgaggtgctgatatcatatctccctgaactttacaacaaaaagctctcgtagctttctgatatttcaagcctgaagatgagatctagtagctgatgaaatccgtcgatttgcaggttacaggggatctcagaaaaatgtctgcattacaaacgcagttagaggcctatggaatctgcgaggttaaaaaaaagtttcttgatttatctctaatctcttcacagacacggtcactgttgtgtctggcgattcttatggtttgtgttttatgaaaattgaaggtggctcggacaggaagagtggcattggtaagagaatctggagtggattcgacttatcttcgtggatactctcttcctttgtagttctagaggttagtaatctcttttataacacagatgcatcatgcattgtt

SEQ ID NO: 21326 - DNA, 393 bp, Arabidopsis thaliana
cgttatgggtcaaatgtggtagaacacaacttgttaaagcgcgagattttttggactgtcaaagagaatgcaaatctaggatcttggatatggaagaaaattctcaaatacagaggggttgcaaaacgtttttgtaaggctgaggtgggaaatggtgaaagtacttccttttggtttgatgactggtcgcttttgggtcgacttattgatgttgcagggataagaggcaccattgacatgtggattagtcgcacaatgtctgtagcggatgcatggacttctcgtcgaagacgacatcatcggcaagagatcttaaacacgattgaagaagtgttgtccactcaacatcaaaagagaacgcagcagcaggatcgtgtcttatggaaagggaag

SEQ ID NO: 21327 - DNA, 507 bp, Arabidopsis thaliana
taagagggtacaagagagcctccataagtttgttcaaggaaagaaaatggaaaacacagaaaagccacctattatagtgtagaaaacatcagcggaagaagatagtaatgaaattataagacggagtttagtttctttttatatagaaaggagaagttgggttccagttttcaatatctctggcctctaccaccactgcctcctcttcctctgccaccaccaccgccaaaccgatttcctccaccaccaccaaaccgatttcctctgccaccaccaccgaatcttttttgtggcaatggttctctctcctggagtttaggcatcaccttaaccacttccaaactcatacttccagcactcttttgtgctcctgcaatgaacaagtctagatctgattgcttaacatcgaacacagctcctgttttatctgctgttagagataacccttcaatcatttccaccttgtcatccggtaaaactctccttagcagtccataaacaaatctg

SEQ ID NO: 21328 - DNA, 967 bp, Arabidopsis thaliana columbia
ggcatcaccaagggctttcctaattcagtatctcagtgccaaaacgacaaaagatcacagtgaggccgactaatcatgggcctgaccgttgatccacgtgtctttgtattccacgtccaaatctcaacccttcctttacatatgccatgtcatcatctttttcaccatttttttgtgagttttatgtgtgagttttttttttgctgtcattaatttagaaacaataatctcgttgtatcagtatctctatttaatatgcaaaaatcagtcattagttttattttaataccgttgaaaaaatgcaataattcataggtgtgccgcagcagattttaacccatcaattttataggaacagagtgtgtcgtctctctacaacagtcgtaggcacattaatactataattgccttaaaaactccgttgagtagacaaaaagagtgcaattccgtagcatttcttattcttatagattttaaaaataggaaaaaggtgtaaatctgcgaacattttggattcttcacgtttgtttatattttgggttggctctacacctactctcagaagtcataagccaagcaaagggggttttagggtttttgaccgcgagccagatctctttcttttgcttctcccacttccgaatcaatggccttctcttctctcctcagatctgccgcctcctacacggttgccgctcctcgccctgactttttctcgtcgccggcgtctgatcattctaaggtcagagacgacgttttacctttaatcgatgttatgttggatatgtttagcttcgtttctgattctcttgcgtttctgttcgatttgatttgcttttagcttaggtcgtgctttgatctgcttgaatttcgtttttacgcgcctttggttactttgaagaagttgtttgatgtgataaatattacttggaagttgttctgagtttcttagcgtaacgttgtgacg

SEQ ID NO: 21329 - DNA, 500 bp, Arabidopsis thaliana columbia
ttgagtgtgaactccaaaatttcagacaataaggtcattgtgatgatgttaaaaaggcgataatcttcgatgagcatttcattacatacccagtgaaagctctctctgtgcccttctgtctagtgatgtagtactgttctggtgttagccgtttcttccattcattttcacttagagaagcaaactcattcttctcagcctctgcaccatgataaaaatctctcaaaatgcaaaggattgttctaaagaacatggcattgaaagtaacactgtacatacaaacaaatgcaaagcatggattggtgatataacttataagctctcaaatctctttcactaacttctgagaaccaattgagtaaacttgctgacctaaatctctcttccaaaacatcaaacataacatttggaaaaagacaaaactcattaacctaaacccaccaagaaagagaccatctttacgcaaatctcagtacacaacatgaaatgggatttatggg

SEQ ID NO: 21330 - DNA, 1516 bp, Arabidopsis thaliana
tccagatagtccactttacaaaaaaaaaaaagtctaatataaagaagaagaaaagcctcaaatgtagttgcaaaactcacatggcctaaatcagaacaaattaaagacgattcaccactcgccacataatagtttattgacaatttgaacccactcgttaccaagggtcactaaccaaacgttaccaagggtcctactccatatcgcataatatgactcacattcacttcttcttttctctttaacgattttatgctattagaagaaacatttttgcaaagttcttttttattttgacccccaacaaaaaaaaagtcagatggaaagtacaagaatcggactctggattcaaacgagaatattagttaataattttacatatatagttataatctttgggggcaaagtacatgtgaaagcagagcatatgataaggggtaaacgattgagtacgaatggaacgaacacatgccatatttaatatgagggacaggaacggtcctctgatccattcttttgatcagagagaagatgaagagtgtcaagtaaataatggcacgtgactcggacgaagtatccacgtgcgcctctccccacacccatgtggcccataggatatatgaccggctccgcaggtccaacttgtccatgttcccctatttaatttttaaacacaccctgccgttaaatcaaattttccaaataaattaaagtgttatttcaaaattttaatgtaaacttagtagtattgtcgctgtgctatgatcaaaactgtataattaaaagatctaataggatcctaaagaattatctagtatcggaagatattgttcatggtaaaatagtttatataagtctaattaggataaatgtataagataagaattgttttttgttactaaagacaagtaaaaggagagaagacgatacattttcttagcctattgttttaacaataccaaattaagaaatcacacactacatattatcgactattcaattttaaaaaaaaaactaaggagtgaaaacaaaaatacaaaaccccaaaagagaaaaaaataattaagagcttagcacgcatttaacaggggtgtgtaaaaagtacactattttcgtgacttttactcccttcacgtatacgaacacaaaacacaaaagaagaacaaataattttaagaaccctccacaaacgcattagaagaaccctgactcgatctctcaaagacggtggtgtaaagcggagaccggggcatgtgcggcggctgcagctggtttacattggtaacacttggcaaagagaccaaaagtgtcgacttgacgaacaaaagttggtcacactagcccatccaccgaacccaaatccgactataagaacccaaaccaccacgaaagcattcaacacgtacatcgccgtccagctcggcataaagaacggtggcttctccgccgcattctacaagaaagatccaaaacacaaaaataatcagagaaccattaaagaaatagagagtgtgta

SEQ ID NO: 21331 - DNA, 625 bp, Arabidopsis thaliana columbia
gtaaaaacaaaaagggtctacttagctcaaatcaaaactatatgtctccgattcctaattaacgaaagattaccattcttgttgctaaaggtgggaaatgcagtgacggacaatcagtacgacagtataggaacagtaacttactggtggactcacgcaattatctccgacaaaagctacaagtcaatcctcaaatactgcaatttcacggtggagagagtttccgacgattgcgacaatgcggttaactacgctatgaaccatgagtttggtgacattgatcagtacagcatttacaccccaacgtgcgtggctgctcaacagaagaagaacacaaccggtttctttgtgcggatgaagaacacactcttgcgtagacggttagtgtctggctatgatccttgtacggagagttatgcagagaagtattttaaccgtcccgatgttcagagagccatgcacgctaatgttactggaattcgctataaatggacagcttgcaggtaaacagttcgcttcacacctaatgatgactatgtaatgacactttgcatataactgatcctgaaagaaatggtttcttgtttgggttgaggcagtgatgttctgatcaagacctggaaag

SEQ ID NO: 21332 - DNA, 485 bp, Arabidopsis thaliana columbia
caagaagaagctagatacgaatgggatctttctctctccaccgtcgtatcttcctcctcctcctccgcctccgacgttatcggagctattgaattcgatcccactgataacatcgtcgctaccgccgggatttcaagaaagattcgtttttacggcctcccttctcttttacgtaacaacgctgtctccggtaccggagtttccttcgtcgatcaagccaccgcctgcgaatattacatctgtactccggcgaaacttagtagtctccggtggagacccgggtcgggcggtcgggttattgggtcgggagattacgacggcgtagtgatggagtacgatcttgagaagaggacgccggtattcgaaagggacgagcacaggtggtcgtcgtgtatggagcgtagattacactcgtcacggcggcgcttcgacggtgggcgcgtcgggatcggatgatgggactatgcaagtatgggatctgaggt

SEQ ID NO: 21333 - DNA, 538 bp, Arabidopsis thaliana
ttctgatacctcaggataattagtcacataaccaaaatgaaaagaacattcctaaccataagtctagtactccctaaatcttcaattcacatataccaaagaaaaaaaacttcagattcattaagtaaaacagaaaaatttctaccttcaagaagcgtcctcttctgttctcaccgatatcgaagtaaaacacctgaataaagcaacaacagcagaaattaaagagagtggaaaagtcaacgatcgccagaagagagtgatgataaagttgaaaccttggaatcaagctgcaattctttgctaaaaagctcgtgttcctcagaattgacatagtagttgaagagatcaaggaaccaagagatgccggaggaaggaacaatgatggttgacctcgtcgccgacgtcttctccgatatctttagataccttccacgaggattctccttaagatcaaaatagaatagcttatgctccacttgcaacgtcttgctcaccaattccacatcgctccctcctcctcctcttcctcctccggtta

SEQ ID NO: 21334 - DNA, 429 bp, Arabidopsis thaliana columbia
ataatatgcacatttcaattaaattaacttttctttgcttaatctattcaaccatacctggcggacgacggctgaagtgacctcagagaaagtaaggtcagggtatggcatgtcacagcaatatatctcccataagcagatcccgaaactgtatacatcgcattttcgattatacgggtttccattgagaacctgcagccaaagtttatttgttataaaaagttggtttgttaccaatcttgatgatgcattatcactatagtacctcaggcgccatgtagccaagtgtgccagtctctcctgtcatgtcattagggttagatgcttcaactctcgcaactccaaaatctgcgattttaacagtccgggttttgtctaacaacatattctctgtctttacatctcggtgaacaatcttctgcgaatgaa

SEQ ID NO: 21335 - DNA, 489 bp, Arabidopsis thaliana columbia
taaccgggaatctgcaaggaggtcacgtatgcgcaaaaagaagcagatcgaagagctgcaacaacaagttgaacaactcatgatgttgaatcatcacttgtctgagaaagtcatcaacttgttggaaagcaaccatcagatcctacaagagaactcacagctgaaagagaaagtctcttcctttcacttgctcatggcagatgtgctattacccatgagaaatgcagagagcaacatcaatgaccgcaatgtgaattatctaagaggagaaccatcaaaccgtcccaccaacagtccctttggtaagtaaaaaaaaaaactttcatcttccactcttctagttcttggtgtgttaacttaagccagtagtactatgattgatgccatgtatgcgactagtgactactacagtagcaattacttacttgcatttgtatgtagatactagataacaacaatgttaacaccgagattgtgtatccattattg

SEQ ID NO: 21336 - DNA, 561 bp, Arabidopsis thaliana columbia
catactccaaatcaaaataaatgcagaaacaagttttgtttccggtacccgtgtgttgtccttatgtagttccttgcatcatagcgttttttcttctactcaagaactcgagttggctgatggaggatgttgccgcgctagataagggacttcagatacaatccctgaaatatcttcacctacagtcactgtgttgccaattgaggctgcttgtttcttgatgtagcctaacccgaaatggccagacccgttttttcccccagtgtagctcgttagcttccccacctaaaaataatgtttataagttagttaagtaaaagtataacaaaatttggattttcttctttgttttcgtttcaagctactaaggtatgcacacaaacgctcaaaacctttttcccgtcgactgtgatggtgctgccgggttccgatggtgcagagagattaagtccacataatctttgcttgattccatcatatgtcatgagtcttgctattgtctcctgtcccttataacatcctgagatgtttgaagattgcttactgataggtgtttattgt

SEQ ID NO: 21337 - DNA, 634 bp, Arabidopsis thaliana columbia
cccgtttgttaactagtttaggagtgatttggcacctgataagtagccattgtagtctcatatatctttcatgtttagtataatttatatctgtattgctgtttatacattttccgttgatgatgttgtccttgctgtcacaatttgatctacttttgctgcctggccattaatcaagattatacacatcttcttttttttttctctccaaagaattgtacatagagtacttaaggaacttatgaagctgaataatgaataaataatacatgataaaaaatatttttgacaagcataaggatgtggcaggattttaaactagaagaagatttatttttaatttgctcttccgctatgcagacatggagccaccgggaactcattgcttgcattagaagagcatgaaattaacaaccagtctgttgtgtatattggggtggataatacacttgctgcagtcatccgttttgaagataaagtcagggaggatgctgctcaagttgttgagaatttgactcgccagggaattgatgtgtacatgctgtctggtgacaagaggaatgctgccaattatgtagcttctgtcgtaggaattaatcatgacagggtatgtcctcttctttaaatggattga

SEQ ID NO: 21338 - DNA, 707 bp, Arabidopsis thaliana
taaacactagttatggtaatagtggaggtgggcatgggaacatgaaccatcatcatcatgccaattctgcaccatcatctctcaacattactacttcaaacccactactagtctcctcaaatagtaatggtcttggtaaaaatcatgatcattctcatcatcatcatgtgggttacaacatcatggttaccaacatcaagaaagagaagcctgtggtgataaagtacaaggaatgcctaaagaaccatgcagctaccatgggaggcaatgccattgatggttgtggagagtttatgccaagtggtgaagaaggttccattgaagctctcacttgctcagtttgcaactgccatagaaactttcatagaagagaaaccgaagtgaacgagaaaacattcttttccccttacctcaaccaccaccaaccacctccgcagcagagaaaactcatgttccaccacaagatgatcaaatcaccattaccacaacaaatgataatgcctattggcgttacaaccgctggatccaactcagagtcagaggatcttatggaggaagaaggcggaggaagcttgacattccggcagccaccaccaccaccatcaccgtatagttacggacattatcagcagaatagctttaggacaaagtttactcatgagccaaaggagaagatgattagttttgcggaaacagttggttggaag

SEQ ID NO: 21339 - DNA, 280 bp, Arabidopsis thaliana columbia
cagggacagccttcctcgagagatgccaccgaggagattagagtatccagagtacaggtccgagtacatgcggtagctagagagctgagagtctcataagtcccggctatgcagtcgtcaaacgtatcccgggagcacaagagaatgatgaaggccacactcactcgagctagctttagatcacacacaagtcactcgaggagatcaccagacctcggagctggccgcagcagttgaagataggacggttagcctcagagcgttgctgggcgccacagag

SEQ ID NO: 21340 - DNA, 565 bp, Arabidopsis thaliana
gtgcaagagtattcaagtctgatctatgcttgattttagaattgttagcttttgcattttgccacatgaacaacaaatgaaaaaaaaaaaaaacatttttttcgaaattcttgttgatttacttgatcattgatgtggttataatcttgatagagtttgtacggtatatggtatgtttgacatttgtttgttaacttcttgcgtttccaaataagtcggccatttcaaactccaacaattccattaagttgagattaactaaagttacaagtacttatttaaagttttaaactggtgcaagctacctcggttgagctatgaaactcacgaacccaatactgtgagtagctggtgcaagctacctgatctttacgagaccagctgtggatggggttcccgtttgggttgccggaaatgttgcccagtgttaagctacttgaccatgttgatagatccaaggacggacaaggaatttaagcgttcgtcacattgcctgaagagaacatgtcgtcctttgagcagacccagagttgacgcctttgctccataaacctagtgttttggt

SEQ ID NO: 21341 - DNA, 608 bp, Arabidopsis thaliana
aaagagaaacttgccagaatatcgagtttgccgaagcgggtcttgacaaaagcagcaagagaagcgatggtgtctgggttggagacatcaagagggtgaaaggagatggcttgatcagaaaaaccattctcagtcttgagcttttggacagcagcaagacccttgttttcatctctcgcagttaaaaccacagttatcccattgttagctagttgcctgcaaatctcaaacccaatccctttgttggaaccagtaacaactgcaactctggagacaaacaggaaaaagaaaaaggaacaatcaaaatctgaaaaagatttcaagccgaggttagacagagagagaagaagcatgaaccttgggtctgccattgaattgttgaaaggacagagaaaagtcaagcctcatgctgttaactaaaaaagtatatacaaaaaaatagggataaacaagtgtgtgcacatggaagattagacaccgctatatttcttatattttttgataagaccaatatttccaaattagcatcaaaggagaatggatcatcattatagtatatattaaaaaaagtgaaaggagttttttcagtgtcatactatatttattta

SEQ ID NO: 21342 - DNA, 497 bp, Arabidopsis thaliana columbia
ttcggtaaaattaaacattattgttttttatttttttttaataatacttttattcaaagatttataattcaaatcaaagttttctttcaaatgattatttagtttataaagatttcacatattataaatattctaaaagtttttccgttaaatattctaaccgtttaataaactttcaataactaaaatatttatcttttaataaaatataatattaacaatgtcctaagatttctcctttttgtaagtaattagaattgatgaaaatatattagataagaaaatgctgacaattagaaatattaattaaagtgcatgcaaaattaccctaaaattacgtacgcaactttacttgcatagggtatctataaatatccggtaaagtcccgactaaccaaagggttaaatggcgagctgattctggcctttctcatagtgcatcagctaatgtaaaccaactatacttttaaacatctctctatatatgtatatatatg

SEQ ID NO: 21343 - DNA, 1490 bp, Arabidopsis thaliana
agcacccctgtccttggctctttctgaaccaaaacagatcttcctacatccattgtattagctccttccgataccacaacatgactcggtccttccacagccaaaatagcgtctctgattatcctcataggagtcaagaaattgaaaggaaccacatctttagcaagctgtatctcccatcttctcaccattctctttcgccttcttcgaaatcgattccacccatgaattagacttccctaaacaaaaaggatcgtctttgatctctctattcaacaatccaatcacagttttagcatctccaacaatccccaaatgaggtttccttagctcaatctcttcctcagagacatccaccaatataaattttacatctttatcccatttaggcgactctccgaaatgaagaagccagttaagcctagctccaaccaccaacgcgacatcacatttcccaatagcaagagacctcgccgcagtcgccgagaactcgtgtgtgtccggtaacaaacctttacccatcggagttggtaaaaagggtattccagtaatttcaacaagcttcttcagctcatcttctgctctcgaatacgcagctcctttaccaaacacaatcaacggcctctcagctttcctcagcaacgaaaccgccgattcaatctccgatctcagagatccacgaatcggttcttccttccgtgatctctcaacctcatccaccaatttatcagcttccgattccgatatcttctgacgcaacacatcagtcggaatatccagataacacccaccgggtcgacccgaaacagctcgatccaaaaccctagaaacacaatcagggatttcacgaacatctttcgctttctctgataatttcgagaaagctttaaccgcttcgatctgatcaagctcctggaaatctccacgaccaacatctctctgatcacaagaaccagagatcatcaccatcggccatgtattaacccaagcgttggaaagacccgcgagcccatgaacacaacccggacccgaaaccgttaaaaggatacccggtttacccgtgaggtaaccgtaagctgaagcggcgtaaccagcggattgttcgttgtggaaggcgatgaaacgtatacctaaagccatagctcggctagctagagacgtgacggggattccaacgacgccgaacatgtgggttacgccgagatgagagagtgacttggccacgagaacgttgccatcaattgacggtggagtggtttctgatttatccgccatgttctcttggatttgctcaaagtttcagtttcttctacttgctttagtttctttatatagccttttgtatttgtgttttactcttactgtgattacgtgttttgcattaatgctactattagcctattattgacttctttatttgcattttgtgtgttctctgaaaattttatctacaaacttgtacacgtaattatgtgtgttttgctaattta

SEQ ID NO: 21344 - DNA, 591 bp, Arabidopsis thaliana
tcatcagtaggcagttgaaagggaaacaattgcatctgtccatttatgaaaaagagttattggcagtgatctttgttgtgaggaagtggaggcattacttgatttctagccactttatcattaagacagatcaaagaagcctgaagtatttgctggaacaaaggctcaacactcccatcccaacagcaatggttacctaaactgttggaatttgattatgaaatacagtacaagcaaggcaaagagaatctggtggccgatgctttgtcacgtgtagaggggtctgaagttctgcacatggctctatctgtggtcgagtgtgatttactaaaagagattcaagctggttatgtgacagatggggatattcaaggaattatcacaattctacaacagcaggctgacagtaagaaacactatacttggagtcaaggagtgttaagacgcaagaataagattgtggtccaaataacagtggaattaaggatactattttgagatggttgcattgctctggaatgggtggacactcgggtaaagaagcacacatcaacgggtgaaagggttgttttctggaaaagcatggtgaag

SEQ ID NO: 21345 - DNA, 531 bp, Arabidopsis thaliana columbia
tttttgctttctcttgaaaaaccttttgttattgttattggttcgtacgttgttcattatttgacaagaaacaagattacaaaaaaaaaaagtacatcaacccaaaataatggagttgatgaatttggcttcaaaagaaacaagctattggatgattgcactgcctgccggttttggatcccaaaacctacatgatgtttccaccctaggctatctattccttgccgtcgtttttctctctatagtcacgtgggctctcgccggagcgtggtgtcgcttggaagaacggccgtaaccggttgggtcgtgtcgcgatccctggtcctcgtggcataccagtattcggcagtcttttcactctcagccgaggcttggctcatcggacgttagcagccatggcttggagccgagccaacactgagattatggcttttagcgttggttcaacgccggttatcgtggcttctgaaccaaacatagctcgtgagattctgatgtcgcctcacttcgcggaccggccggttaagcagt

SEQ ID NO: 21346 - DNA, 1291 bp, Arabidopsis thaliana
tagtaacgtccgccagtgtaggctcgaattcgtctgctttctatgcttctcttaccctttatggtcaacacatacttttcttttgtccctatgcagacaaaaaataacacacctgcagcccaaggaaaatgtattactcgcctgttgctttatcatttctccgtaaacttgcccctgatgttggcctcctaccctgtcttccgagccatgggaatgcgaacgagttttcctctgccgtcctggtattgatcttaaactcgtccatttggcaataaaaagaaagaaaaacataatcaaaagatgtcagtgttgagcatcatgaaagaacctgagctcatgtttgatcaggtatataagaccctctttggtgatggtcctgcaggaaagaagtgtctgcccagatattattctactttatcattgaggattttgtcttctattggggtcatcggatcttgcattcaaaatggctgtacaagaacgtgcatagtgtgcatcatgagtaagtttcaatgttcaccattttttttttcagtcttgatacttgaaactgtgagtttctgaaaagcaaccatttcatgatatcacagatatgccacaccatttggtttgacatcagaatatgctcaccccgctgagattctatttctgggttttgctaccatagtcggtccagctcttactggccctcacctaattactctctggttatggatggtgttgagagtgctggagacagttgaggcacattgtggttatcatttcccatggagcctctcaaattttcttcctctgtatggagggtaagatcacacatctagccagctcttttgaaacttaaaaccataagacatttgtattaatagattttactattattatttttgtgatttggttacagtgctgacttccatgactaccatcaccgactgctatacacaaagtccggaaactactcttcaacttttgtgtatatggactggtgaacctctgaacttgtttaatatctcttcgctttccagaacagatctttagttgtcctgatattaatatccagtgtataattcgtctctggtgttcttcaggatctttggtactgacaaggggtacagaagactgaagacccttaaagaaaacggtgacatgaaacaaacgtgaaattgccactttggattgcagagtacatttgtcttagagaggtcttattctgcaacctctccttttctttaacattttgctttcaggttgctgcaacgctcatgtgtcttagtttattatgtctgactagaat

SEQ ID NO: 21347 - DNA, 570 bp, Arabidopsis thaliana columbia
cttctcttgaggatgtcattgccatattgaaaagtgtaagcactttgtggttaggctcagagttatgtccatttcttttgtttgcttcatgttcagggtgtcagatttatttgaattggctttcaggatgcctctattgatccatctgaagtttttaacagaatagtctcttccatttgttctctcttaacggagcatgaggtttgttttactccttcttttgtgtaaattttggttcctttggatggttgtggtcccatcatgttgtgctatgtcatgtagcttgtagcagccttgcatagttgcactgcagctatctgtgacaaaatcaggcaatctgctgagggagccattcaagcggttactgagtttgtttcaagaagagggagtcagcttagtgacaatgatatatcaaggtacatcaaagcttgttgtcatagacgggctatagtccttttttattgttatctgacaaccttgttctcctttcttcttttggttttctctggcaggcaactcactccttactctcggcagcagttcatataactgataagaatttacgtgttg

SEQ ID NO: 21348 - DNA, 355 bp, Arabidopsis thaliana
gccagtgtgctctaaagaagagtgctttaaagatattggcctcgcacatctgcttggcacgccagaaatcccggaaggcactcagcttatccaccgtatcgaatgcccttacggcccactggttgaagagaaactcgatgcctggctggcgacacataccatcgcggaagtaaaagaacgctttgctgaactagaatactgcctcgccaaagtgctgaccggaccggaactggaaagcaatccacagtatgtggctcgcgaatcaatcactcagtgggcaaacgatggatggtcgcacctgcaaagggccgaacatcatgcggaaattcagaaataaccccggacaaatctggcg

SEQ ID NO: 21349 - DNA, 496 bp, Arabidopsis thaliana columbia
ccggcgattcttcttactatcttccgtgaaaatcagcttcgtacccggtcctccacgatggaatacggaaggaacgaagcgtgcctgctctgtctcaggatcgaaagctatgatactcccgtcgtttctcagccagtgaagagtgccgtccaagtaaacaggtttcatccatgtcgtgagtaggctttttgagctagtggtgatggttgtttccgataacctccatgaatctccgtcactgatctcgaacccgtacaccgtttccatctcgagtatgcatacgatcttgaaacctttggtgggacttaccacgaaaccaacacgcatccttctctccttacgagctttgtaatcttctataccgtcatcacgtgaggtgatttgactattacgaccaaatatgggagacagaagctttgagccagagttattcaaaggtcgaaacctctttgtgaggggatttgcgaggaagaggccatcgatgaatagtaagaga

SEQ ID NO: 21350 - DNA, 365 bp, Arabidopsis thaliana columbia
tctcaaaactcggaaaaaggcagagtgtcaaatcggagctcacgaagaagtacgatctccggtcgttgcgttcccttggctgcggaggagctccactcggcaaagacatcgcagagaggtttaagcagaaattcccagatgtagatattgtacaggtaataactgataagacagttagtgtcaaaatatgactttgtatataggactgtgtccagtttcatgatacttggttttcatcaagattttgaatcattaatatgactttaactttcctggttgggtatggcttacagggctatggcttgacagagagctcgggaccagctgcctcaacgtttggacctgaagagatgggaaaatatggc

SEQ ID NO: 21351 - DNA, 1414 bp, Arabidopsis thaliana columbia
gaattgaagcggtgcttttgttttcaagagagaaggaagaggattttttttagagagagaagtcaattctgttttttgttgcataatgttttagcttacgttgtgttttcaaatattacaaccctttttccgtcaaaatgattcatatattaacaataacatgttattacaaataggaaacgagggcaatcaatctacagaaaatcattacaacaacgtattgcatttatcaatttcaaacacatactctagccaaaaaattaaatttgtgctacataaaattgcgaaaatcattacaacaatgtatttgcacttacaaataggaaataagggcaatcaatctacataaaatcattacaataatgtattgtatttatcaatttcaaacacatactctagccaaaaaattaaatttgtgcaacataaaattgcgatcggtccgcaattgtgacacttttagctatgaggaaaactcattggtttccacatcgagcttctagtgtcacctttcaacagggatgaggaaaacatgatggaatataaatgccagcgaaaatttaacccccaaaaactaagttggcgggattctaacccccagaaactaaatcccaacatagggagataagcaaaagacataaaactaaaacgatctaaacttgattgaaaggatttgacgcagagaaccaaatttcttactacccgagccaaccgagaacgcaaaacaagcaggaggtcgccgaaggagctgacaaccaacccaaaaaattccgatctactagcctcacttgataattaagagtcttcagaagaaaaaaccttgggataccttggatggcgggacggtagaatctcggcaaaaacatgcagagaccgtcggaatcgccggaccggatgtgtcaaccaatggacgtgaaccggtaaaggacccaaacttaggcggatcttgccctagatccatttgttgaagctgtgtgagaaaacctaaaaattaggtcgcccaaaccgaatcaccacacatcgacaatgagtggcttagagccaacgcggttagggccaaggaggactcaggcaaagaagaaacaagaacctgcaacaaaatttaagtaacaaaaatctagatctagaaagagacaaaagcagagaaggaatcaaaatgaaaccaatccacagatctctccacacaaagacatgaaactagataactaaacaagagactgagagaaccaaccgacgccgtgaccatggtggcccacacgcgccggtcggagcgaagaacacaagcagcggcgagttgaagagagaagggagaaaaataagagagacgccgacccaaggtagttctctaactcttgagttatataattacattgtttagcacttatgtacagttacttaccttaaacaagttgttatt

SEQ ID NO: 21352 - DNA, 523 bp, Arabidopsis thaliana
ggtcgaaattacttgacgggaaccattcctcctgagattggtcgcatgaggaatttgcagatagcactcaacttaagtttcaaccatcttcatggatcattgcctcccgagttaggaaaactcgacaagctcgtgtcattggatgtctctaactagtttgctcacaggatccataccgccactactaaaaggtatgatgagtttgatcgaggttaatttctcaaacaaccttttgaatggtccagtgccagtctttgttccctttcaaaagtctccaaattcgagctttttgggaaacaaagagctttgtggagcaccattgagctcttcttgtggatattctgaagatcttgaccatttgagatataatcacagagtctcctacagaattgtgctcgcagtgattggttctggtgtagctgtctttgtatcagtcaatgtggttgttcctcgcttgatgatgagggagaacaagtagaagcagcggctaaaaatgttgatgttgaagacaatgttgaggatg

SEQ ID NO: 21353 - DNA, 531 bp, Arabidopsis thaliana
  unsure (1)..(531): unsure at all n locations
nnnnnnnnnnnnnnnnnnnnttaaaggttttatttgtttaacctcgctggcgctcttttgttatggaaaagacaacatccttgacaacaataagaaaaaaacgggaatcctgttgctggcgctgatcccttttttagtttttccccttctggcacacaatctgagcagttataacgctgactattctttgtatgtcgtcgattactgtccggacaaccatactgcgacctggggaatcaactatacaaaaatattggtttgtctgtgggcatttttactgttctttattatcatgcgcacacgattagccagcgaactatggccgttaatagcattattatgtctggcatcgctatgctgcaacttacttctactgactctggatgagtataattatactatctggtatatcagtcgcgggattgaagtttccagtaaactgtttgttgtgtcttttctgatttataacatttttcaggagctgcaactctccagcaaactggcagttcatgatgtgctgccaatatttat

SEQ ID NO: 21354 - DNA, 595 bp, Arabidopsis thaliana
  unsure (1)..(595): unsure at all n locations
nnnnnnnnnnnnnnnnnnnnctaaagttgatgacatggcattagataactgcgtcaataagttggtgagcaacgtcatcgccgcgttcggatcaatataatgcgccactaggtcaactgagacgtcaatccctacgcgttgcaacaacggttcaagcgcttgcagcggcgtcataaatagagttgcgatattgcggtaacgtccgcgtcaactcgttgagcgcggaacccagataagctaatagcaacaccatcgccatcacgatgatggtcatcaaaatcgacaccgccagtacacgcggcacacgccagcggaccatgtgttgcaccagcgggttaagaataacagcaataaataatgcgagaataaacggcacgatgatctcggcggcaaaacggataccgcagagaataatgaccagcattcccaacataatgacgatttttaggccattgagcgtgatgatcggctttgcatgcttgtcccgttttttctcctttgctaataataatgtctttttcgctcgtcatcataacgaaaatcaaccgctcaggtaaagaagtgaaaatattttgagttaattcttaagctatga

SEQ ID NO: 21355 - DNA, 478 bp, Arabidopsis thaliana
gaggaattgacaaatttagttggtctggcaggctagttaatatcaaatttgtttggtttggtgtatttcgatccggttctgtttttatctatgttcgatacaagtcgatttggtttggtttggtatgttctgctgtatataatatccggtttaaactaaccaaattaagtaaattttgtgttggggtttgaacaggctgatttcgaggacgctttgtctccaagctgggagaatctgatgagagggcatgtgaacctgaaagatgcagtggatggatccattacgttccacgacaagtcaaggaacagagtttacaagctcaacgaccaaaccgctaagctttttgtccggccaagaggttggcatctcccggaggctcacatcctcatcgacggtgaacccgccactggatgtcttgtcgaatttgcctttacttcttccacaactacgccaaatttagcagactcaaggtccggtt

SEQ ID NO: 21356 - DNA, 722 bp, Arabidopsis thaliana
cgagtgtattcacagaagcaactacttgacccggcggttaaaggaaccataaatgttctgacggcggcaaaagaagccagtgttaagagagttgttgtgacgtctttgatatcggcgattactccaagtcccaactggcctgctgataagatcaagaatgaggaatgttgggctgctgaagactactgcaggcaaaatggagtatgttattctctaatttaaagaattggtactgcaaaacatcttattggttatctttatagatgatgtgttgttgttggtagttgtggtatccactgtcgaagacgcttgctgagaaggcagcttgggaatttgcagaggagaaaggattggatgtggttgtggtgaatccaggcactgtcatggggcctgtgattcctccgtctcttaacgctagcatgcacatgcttctacgccttcttcagggtattttggttctctatgaatgtttgattgaatatgtcttgagttccatggaacatctttgaatttgaatagatatggatgcttagggtgcacggagacatacgagaacttctttatggggtctgtgcatttcaaggatgtggctttagctcatattcttgtatacgaggatccatattcgaaaggaaggcacttgtgcattgaggctatctctcactacggtgattttgtagccaaagttgctgagctctatcccaattacaatgtccccaagt

SEQ ID NO: 21357 - DNA, 588 bp, Arabidopsis thaliana
agacttgagcaagctttactttggcaatttccagattctggacattaatggttccacatgtttccttaccaggactgggtaaaatttcatgtttcactatctgcttctagtcagatttgcttggttcaagtagacaatagctcaagaggaaaagttctgaagatctcataggtaatgaatgtctctgttttggtttttcaggtataccggggaagatgggtttgagatttcggttccagatgagcatgctgtggatctagcaaaagcaatcttggagaagtccgagggtaaggtaaggcttacgggtctaggagcaagagacagtctcaggttagaagcaggactttgtctatatggaaacgacatggagcaacacatttctcctgttgaagctgggctcacatgggccatagggaagcgtagaagagccgaaggtggatttcttggcgcggatgtgattctccagcagcttaaagatggacctacaatcagaagggtcggtttcttctcctcaggaccatcctgcaagtcgcatagcgaggttcatgatgagagtgggacaagattggagagacacaagtggagggt

SEQ ID NO: 21358 - DNA, 597 bp, Arabidopsis thaliana
ctttgaatttctgtggtatcagttgtaatgtttcctttttcatctctgattttatttattttgatcttctctctttttttttagtctggctaaagatttgtcaattttgtttaacttttcaaaaaacgaacttttgttttatcttacgatctttgtattgttttcatcattttaattttatttatttctcttctgatctttattatttcttctactaattttggatttggtttgctcttgcttttctagttatttgagatgtatcatttggttatttgaagtttttttttctttttttgatgcaggcacttataactataaatttcccttttagtgttgcttttgctgtatcccatagattttgatacgttgtgtttccattatcatttgtttcaagaaatttttcaatttccttctgaatttcttcattgatccactggtcattcaggagcgtattgttaatttcctcatgttcgtacagtttccaaaattcctcttgttattgacttctagtttcattcccttgtggtcagaaaagatgtttgatattattttaatttttagaaatgttttaagacattttataacctaacatat

SEQ ID NO: 21359 - DNA, 563 bp, Arabidopsis thaliana columbia
acctcccagaacctctgtcttacaaatccatgtgagggaagtggaccggtgttactgtactgcacttccataaaaaacatttcattaacaaaactatacccttcaacaacaaagaaaagtttttttttctataaacacatacttgcggaaacaatactggaattcctccacgaatcggtgttggaggctggaatatagcctgcacaatacgtaacacatgttttagatcactctgctttggaactcatacacacacataaaattactactactttagaacaaagcagattattaagctatacttatctattcatttacaagcctctaatgaagtaaagattcaaaacaaaaaaaaagaagatgtaaagattcatctttgcataatttacttagtcaactattgcacatacaaaagcaaaacaaaaaaaaaaacattatcgcagatacagccaatcagagaacaatatttttagccaatcagagaacaatatttgtagcaatcatatgatcctaaaaggagatagagtgaatctgactgaagttccttgctactcataacaagt

SEQ ID NO: 21360 - DNA, 463 bp, Arabidopsis thaliana
aagagacatatggaaccgccttgatagatatatttctctcctgctcatcgactcttgtatccgtatatcacatatgcatgtcgttttcagcattaagagtagacatacgatgcgtctgctctaccaacatatccatgaagacagttttgccgtgctcggagatgccccacaagagcaacattcctcacaagcgcaggattagacatgaggccgataagaaacagtgttgacacatacgttgttgtttgatccttgatgacccccacctcaaatctaatatctctaacgggtttgataatgggttgctcaagagactgctcatcttcatccataaccaaggtctcaacatcctcaccataaacctccttagcaatagggtagtacttcttatcctcaggaagaacaatattttggttctcattgatagtggtatccagccattagaaccccaggctcttggaga

SEQ ID NO: 21361 - DNA, 526 bp, Arabidopsis thaliana
  unsure (1)..(526): unsure at all n locations
aggaatnagtctgaaagccntgtgctgcaagctgaggtatcacaacgaaagcggtgcagagccttaatcgtgtcaatagacaaaggaactgtatcctcattttcagaaccaaaaagctgagtgtaatatgcaacaatcatatcttttaactggctgacattatccacctttgaatcatcatttcctctgaggtacttgatgagattaacagcttgatgagcaattaccatttcatgaaagaacctcgtatttgcatctccctcatgaagccatcttattcgagacttctgtctatagaacgattctaaggccagagcaaagaagttctaattttttctggccacatgctcttgtctgaaaagagaagtattaggagtggaaagaaggagcctctgaatgtcttccaactgagtaagagcgtctcttgttttctgattaccaaaaccagacctgttcaagactctacaagcaagctttgcattctttaagngctcctctaacataaatatattagaacaataagagt

SEQ ID NO: 21362 - DNA, 1111 bp, Arabidopsis thaliana
cttcagtactaaatttcaagaaatgaaatatacacttgtagaagcgaatgtcaagttcatgttgaactataaatattcagaacgttgatgagtctagacaaatcagttttgtttgagagtgatacaaactattctggttttagtagaacaaccatcgaatttaagaatataaaaaaagataacttgagttaacagcaaaggtaaagaaaacctgaggagtgagatgagctgaaatcctagcaatcctctggttggcatctccacgaaactccattgttgtgttcctcagtttcctctcgttaggaagctgtttaagagttttaatttgtatcagacaagaaacaggaccttaaaacatggggactagattgaatgattatgacgtaagtatttgtattataagatttttattatgagaatttgtgtggaaagaaatgttgtccatcatgtaggaagccttccttatccctttatcttcaagttgtttttgtctcttgaccgttgtggctctcaaattttccgaggttttacatgaataaacctataaatggtagtagattccggtgcgacgattgtattggtcgcttaaaggaagcccactaaaggcccatactgccgtttagtgaaaaagattataaaacaaaaacgtttatttatttagcaaccgggaagtggtttcaccaccgatccagcataacaatatccaacaaatcttgagtttttgatccagcataacgtaaccggctacaaacagattcggagattcccacacattttacagctttacacaggtttttgctgagaatgtgacacttttaccataaatggctttcagtttcgatcaatggagccaccaagtaaagacattactagcccaccgccgtgaactctctcctccggaaccatgaagtcatagatgtttgtttctccttcatgtgaattacttggagatttcattgatgaaggtactagaacctgcatcggtatcatcatcttcttgttcttctgcctattctcaaactgtattcgttcaacagaatcagtacaatcagagacagcgctagctccagactgagaatgatcagaagtagagccaaaaacaaggccacta

SEQ ID NO: 21363 - DNA, 553 bp, Arabidopsis thaliana
cttggttatgtatgcctattcgatagaagtatctatgaacacttgaagcaacaagtagctacgcgggaagcctcctattcctctcctcgatctactgtgattgatcaatctccttacaacagctgaaacaacattaagactttctaattatatcctgaacattcttatgcttgcatgttatactattctcctacaaaaaaaagtttgtaatttgactttacctggttacagtaaaatctccagcgacctcagaaccaatttgctagtcagggaaaacttcgtcgcgctcattgtctgctgaagacaaatgtacatgtccagggctggtgctgttgtggttctcttctgacatgtcttcttcttcatcatccgttgaggttttgtcgtaagagaagggtctctgacaaatgcaagattgcgggtactcgtggaattcaccgcgtcctggtttgaactcatctggatccccatgaatccacgttgacaagatttcacttttttggcgaaagtttgccactccatcttttcccggtccatgaacaatgcactgagc

SEQ ID NO: 21364 - DNA, 1143 bp, Arabidopsis thaliana
cctgcaacatataagaaggatcgtttaagcaaacttttgtttataaatcccagacacaaattgacaattaaatgaagcactcacctatcagcgatcttttctacatcatctttcgtcacagaggcaggatcttcgaattcggcaacataattatgcaaactgatagcagctacctccggtacagcagagttcaacgcatatacgacagctccaccggcggctccagcaacagcagccccaccaaaggcaatattcctggagccggctaaacggagcccaaggccgtaaccagtagctaaagacgccgctaatacaacagctgaagtcgctagcctcaccggcggtgtcattttctcaacaatcggttgcaatccagtgagctccttcttattcccatggataccgggattcttcgcctgcgtagatactgatagttggtcggaggaagcagctgagctacgagggaacgaaactcgataacgacggcgagatagacactcagacttggagaaacggtgaggtaaagtaggtaggaagtgagaaagaagaggagaccgaggagaaggtgaaattggagcgttaatggcggtgacgagtgagggattcatggttccctctactgagaaagatccgagcagtcgttgaaaaaaagaagaatcgtagggtttaacgaaaaacagtagacaacggaagaagatagagatgcgaacgaagaaaaggggaaagagatagggcctaacaaaacatcaaaatcccctttcgaacgtccagacgttttttaataatattataaaactacgtgttgttttactcttcggtaacggtaagatgtttacataaaaaaacaaattagacgccttgtgtaaattggaaacgccacgatttcttctctcttcttggctcttagggctcgctaaattttctcagggctgtgaccatcgaccatcgtcgtcttcgcggagctcagttgaaagatgttaacggctgatataccaccaaatcagtcaatctacataaaacatatcaatgagaagatcaagaaagaaggtaatgcttacgaaattcatataattgcatcggtgattttctaagagtttttgcaatgcttaagtagcttggtaatgcttgtgtgagcttctcttg

SEQ ID NO: 21365 - DNA, 1647 bp, Arabidopsis thaliana
  unsure (1)..(1647): unsure at all n locations
tccagcctcgtccacacgataaccagcttacttatgtaaacggcgataccaaaatcatgtcggtcgatcgtggtatcagatttccggctttagtatcgaagctctccgccgtctgcagcggtggtggtgatggaggagaaatctcgttcaagtatcagcttccaggtgaagatctagatgcgttgatttcggtgactaatgatgaggatctggagcacatgatgcatgagtacgatcggttgcttcgtttgtctactaaaccagctaggatgcgtttgtttctcttcccgtcttctcccatttccggcggatttggctccgaaggttcgactaaatcggatcgggatacgcttaatccaatccctagccgacctgaatcggagaaatctgtaaccgctcctccgaataatgctgatttcttgtttggatcggagaaagtagctccaattccgccgtcgccagtgaaggttcctcaaccggtaccggaaccagtggtgcttgaaccgccgcagatgttcgtagatcaacggatgttacaaccggaacacggcgtaaatccggcggagattcaaagacaaatccaggaatttcagatgattcaaatcagagaccaagagcaacaaatgcttcatcagaatcagctacatcaacaacaacaacaacaagaggctatacatcaaaatcagcttcatcaccaacaagaggttatacatcagaatcagctgctacaacaagaggctatacatcagaatcagatgcttcaacaacaacaacaacaagaggctatgtacagaagaaaaaccgaagacgaagccggaaaaaacttccctcccacatacactcaaaatccggcgccggtgacgaatcaacaacctccggttggctactggcaaggaaacaccaacaacagtaatattcaggggaatatctacacaacaacgtcacagaatctaccggagcaacaacaacaacaacaacaagtatacatgattccaactcaatctcaagctccagggacattataccaaagcgtcatgagaccaacggtacaaggaaaccaaggttattacccatcacctgttcagcgacttcatcatcctgatgcatacatggaacagcagaaccagccaggttacaacgtggttcaaccacagccaacgttttcaggtggtccacaagttatgactagtgttggtccgcaagttatgactagtgtcggtcctccaatggggttacaggaaccttattcacagatggggaagcctgtgtactatacggtggctggagaaggcatgatggttcaaccgccaccagcccagcctcagcagcagcagcagcagtaccagggaatgggtcaaccggttagtggcatgaccgatctcagaaccggaccggatgggaaagtggcggttaacatggctgcaccacaagtttcagattcggtgtgagtgtgagattgagttaacattgaggttaatgttatgattatccatttctttaaactttatgatatatgtgtaaaagtgtttttttagatcaaactaggaatctggatttctgatgaatcaattgaagcacttttgatgtntttattttattttattttggtaacttctttcagagttctgtttttttacttttgaagta

SEQ ID NO: 21366 - DNA, 576 bp, Arabidopsis thaliana
ctatattctgttgacgatgaatggtggatattaccttccctctttcgtgttgttggaggtggtggctctttacagacgaagtaccactttggtaattactctagaaatatatctgttgtcatctagtctggtatggacgtggggtttttccccatttttccgggttcgaatcccggcaacagattctttggatgatatgagtaatagtcttttggcaatcatagaaggtagctaataagactaataagactaagttttatgatatttgtatccatctttgtattttttacgcatatactttccatctgataaaacttaacaatactttagctacttggacgagcatgggacattttgcaattgcttactctttttccgttattggtggtaacaactgactattttctttgtagaggtgggcgcttataagaaaaaggtgtcacacttcgacctctgttagccaatgtggcctacaaggaactgaagcgaaactagcagttaacgatgcattatctttagctctgggaaattggccccttcaaataagcttgcaataggtacaagtagcagaagatc

SEQ ID NO: 21367 - DNA, 587 bp, Arabidopsis thaliana
tgtttcagtattagatgtttcattctcctgattttcatcatttatttggcaagtcccaactcgtatgttctacatcaggaacttctcaacttcatgcttgttacaatgtcgacacagcttctctctggaccttcacatggaccaacagatgcgaacccttttattgatgcagcaatgactcaggtaaccaaattaattacttttttctttgtctttagcatagatattacctcatatcaatttccgccatttcctttggttcaacgattttcaggaaaagtctctagtttctctagtagtcagaaggttgctacttaattatatttcccgacaccgtactcctccaaatgcaaaatcctatatgtattctgatggagattcacaaggcattttagagagagttggttctgcagctggtaggtgttcgtatattacttcatatatgatgtattattgtactaacttgtaaatgttgatctttttctattgcctttccgactttccgttcaattatgttttctaactagctacatgaaacagtccatgtactcatgaaaacttttctgttgcatatacagcaagtttag

SEQ ID NO: 21368 - DNA, 480 bp, Arabidopsis thaliana
ggggggaaaagtggttgaagcttatctgatggattcatttttttatagattccactttccaccaaacaagccaacttagttttaaattagttaatatgttataagttaatgtcatagtgttcacttattccaatataaaaacttagagaaagatatagattgctaacataatttaccatgaaaacgacacaaacgtaaaaaattgacacgaaatataagagagaaacataaaaagcgttacatgtaatacaaagcaaagtccactctctactcttagattattcatccaaaagatgaacacacagaaactgtcttcaagctttaacgaaaacgaaaaatcttcaacggattaaaacctcaagaagctctctatccctttttgtcaatcgatctccacaatctgaggccttctctctgcagctttcttgcgtataaagatacccatctcaaagcagctttaagctttacgcatcaacaaca

SEQ ID NO: 21369 - DNA, 802 bp, Arabidopsis thaliana columbia
agctccagcattcgaccgatgaaccgaaagaagaaatcggcgccaaaattagcgagattcggggagatatagtaatgaggttgatgggaatttcagccaacgttgcggatttacttatagcattggcagaaattcacccaaaccccttttgtaaccacaccattacactcggtataagcggtttagtttcagcttgggccggttggtataggaactggccatcgtgagatgtaataaaatcaaatgtttgttgttttgaatgaacgtatcaaacgtgtaatgtaactcacttgaatatatgaaacatttctattttacattatctatagtcgaatcgaaatcagacaaaactaagggtataccaaagtataatccacatacgtgggggacatttatgaaattcataaaacttggtaactgtaaaatagtaacttcccactctctcaccctcttcactgggacggttatttgtgtttttaaattcatgtgcatcaaaagtcgttaccttccagtaatatttatagagtgatagcgatgcaatactcactatagaaacagtgacagagataattttttcgaaagaaattgatgagaagaatgattccaacatcgttttcaagtaagtttcaaggagtactaagtatgaatgcgttgagatgttatgtatcagagtttatctcaaccttcttcttcgtcctcgcagccgttggttctgtcatgtcttcaagtaattactctgtttcttgatgagtttgatccttttttgcaataagaagaaattgttaacctgtgttttttctta

SEQ ID NO: 21370 - DNA, 482 bp, Arabidopsis thaliana
aattacgtagctccattatttggctaagttctctatatacaatttattattattcagctcattatgctacatattttctgatttcaattgctgggattcaattgctgttatatattcaaaacacttaaataactaagatagaagtcattatcataaatatcatcaaaccattacaacaagtatcaaacatgtcatcagtgatccatagtcaagtatcaaattctcattacaaaagctagaataaacccaacatgaatatataaattaaagtacaaaatgcttcttacttcaacttagacaagcaccactttgtcaacaggccatgctacagtggtacccaatgcatcttccatgcactcaacagcatcagaaggcctccagacctctgcgtcattttccctgactacatccacccaaacgcgaactccatttggtcctagaggcttatagtgtactttcatgtcaggatcatttgaagacca

SEQ ID NO: 21371 - DNA, 493 bp, Arabidopsis thaliana
gaattcactccctattaataaccaatcagaagcaacagtcgaagtggagttaacacccaacgatgctaagttagatgaggatgcgacatctagagataagtgggagagcaaacagcaacaagaggctgataaagattgtaacgaatcatctgtctgcaaaaatattgggacagatgataatgacaacgacacttacatggctttgaaagaaaaagttaaggagatgcagaagaaaattgaataccttatgagcatgcacacagcagaacaacaacaatcaccctccttcagaagagatttcaagagtcctccagaatattttactgccaaaagaagccgaagttgcagagaaaatctcttgagtgttagatctcctcattggtttgagagtttggaagttagtaacaatacatcacctacctggagggttatgcagacaaaagcttctcctggaagacccaacacttcgagcatttcctttgattcagggagt

SEQ ID NO: 21372 - DNA, 1502 bp, Arabidopsis thaliana
ccacctcctgggttgggccgtgttgggctgtagacataaatccgaagaggttacttaacaagtacagggacaactagataggtaaactaactctccatttctactcatagttactcaaaatgtacctggcaaatgcagactgcaacggaggtggcagcatcttggatttaacgttgcctaaggccaacagacgatcctttactggtgatgtaaaggaattgcgttcaactagaatgctgcggtaatcagtacataatcttttgggcgatctaatccccccattttgtcctatatggcagcaaatttgacaatttttggtaagaaaatcataccattaacaacaggttggaaaactgctttaattcagaaacaaataaaactacctggacaagtttcatgcttttgtacagatgatgcatgatttgctccgtcagagaaattaataagtgctgcgattgcatccagagatggcattggttcagctagtaaaccgagctgatttatctccaatgcaagcgatggcctggcaacaatcagagaattgtacattgaagagcctttctcccataccatactctctagaagccgttcctccagtgaattcagatgtcgtctcaactctctaggcagagaatcttcatgtcgtatgaaactctcaattaccttgctgagatcaaaggctgtgatcccagtcctctccagaacagctgggaacaacattgtaattgttttgtgggtagccagtaccaattcagctgagcaagcaagcatgcatctatggaacctctcatttgtcaataaagagttcagattatttgcatgcaaaatctgagcttctgctttacacattgcctcaagaactctgtagtataacttacaagcttctaatctgcgctgctctgcccatatgtcatccatcaggtcaacagcttgcaaacttccacctccacattgggcaccaagggaactatttgggaaaatagcttccaatattatgtgtgctcttcgtgtgacgtcatttgttatatccctatcacatgatttaaggaaatgttccaacccaggagaaggttttggcagaagcggggatatgacagtcctgagccacttggcagttgtcattgctgtgctcactggtgttgctgccaacttggtagcaccgctaataccatttgtcttagcagcaggcgacttatgaggagaaagtgggcttataaatgtccttgcaggtgagctcaaagcatcaattttcctcttaacaccagtaatattaacagctcctgcagataagcttccagatccaagtaagctatcctcttcattgatgaataccctctcatcaagttcgcctttaccatcatagtaatccttttcaagtgtaattaagctagttgagatggacgtctcttccagtaaatcctcaaagtaggtcaagccatctgcagtaaaacaccatatagattcgaagaacaatcaggcaactgttcaatgaactcacatga

SEQ ID NO: 21373 - DNA, 634 bp, Arabidopsis thaliana
ttaccacaaacaagagaacgtcaaacgatctgcagatgatttttcagccccagcccccaagagaatcagagccccagatatggatatttcagatctgatagaagaaaatcacctcactctcatgggaagactgacaaatcctgctgctcaaagactatggtctctaatatcaggctctcgaaccgttggaattttaaagggaaagctataggctcagatctaggcaatggttgcttctagttcatctttgagattgaagaaaaccttgaaaaagtactggctaacagaccatatcacttcgaccaatggatggtcattctccaaagatgggagccaatcatctcttctactttcccgtctttgattcccttctaggttgagctccaaggtctcccaaagcactactaaaacaacaattgatatacaagataggagaggaaattggagaggtgctggaccatgagattaccccttcagctgcaaagataagacttcagatcaatggccttgaaccactaacaaaagaaacagtagtggagttcactgatggtcaagaagctttagtaaccttggattacaaaaacttaaagaagcattgcacacactgtcataggctctcacatggaatggataa

SEQ ID NO: 21374 - DNA, 578 bp, Arabidopsis thaliana
ctattatttcaatccagattatcttcaccaattcaacatgcacaccaataccgcaatcgataaactcagcgaactaaagacaactacgccatttggaaactgcgatttttcgatctccttcaattcacgaacaaaaccgggttcatcgacggtactctcccaaaaccagacccttcctctccaatcctatgagccatggaaacaatgcaacgcgaatggttttccattggctgagtaataccgtgaccgatacgcttcaaaaccatgtgttgcaagcagagactgtgcataaagcatgggaagatctcagacgtatattcgttccatgtattgattttaagatctacgagcttcgtcagagactcgcgacgctgaggcaaggtggtgactctgtggcggagtattttgggacattgagtaacgcttggctggagttgaacgcgtatgatcctgtgcaggactgtaagtgcggtcgtatcgattgcgagactgagacacgagctacagaggcgatagagaaagagcagcgttacgcgtttctgatgggtttgacaaagagtttgactatgtgaaaatga

SEQ ID NO: 21375 - DNA, 644 bp, Arabidopsis thaliana
aatatcctaaaacagagaagttttatcaaaaattgtgagcaaaaggaaactaacaatccgagagagctgatacgagaagtggaattgccgtcggagaaagtaagcgacgactccgattccgattccgactcggagagacgacggccacggattagccaatcacggaggacgagagcgttcgaagtattcgaagctttccttaagggggaaacttagcaaatctcccggtggaatcggaccattgcttgacttcgtcggagaatctatggtgcatctcgaaggtgaagattcgaccattgcagctcccgaagctcagtaacatcaaaatcgggatcaagaacagagtagtcttgaagaaacagcacgacattggaaacgatttcgaaactcgagagattatcctactctcctgaagatttttctcgggaaaacaaagagcaaatgagaaatcatgaccagcaaaactcaggaaagtattcggaaatcaaaatgcgagatgattttagatcttcgaatagtgagagcaaaattagggtttatttggggtacaatgaagcttagtgagtttgagaggaagagaagagatctatgttggttcttcttccgtcgcgttaggtgagtgtacagtcgatgtgttgaaagag

SEQ ID NO: 21376 - DNA, 766 bp, Arabidopsis thaliana
tcatgccaccttatttgccaagcatgacggtttcatatgctgtaacaagtagaacattatatcatcaacacataccttgaccatcatatccggggatgcaatcagcttgtcaaactccatgaagcctcctttaatctgttcgattaaatcatcactgcccacaatatctgcccctgcacttttggcttcatcaaccttctcacctggaagttcagcatggaaatggtgcaagccaaagatttagaaagaataagccacatgatacacaagaactccatccaatcaatatataaataaaaagtcaatcgcaccaaacaatgttgcatctagagaagtactgactgactgactgataccgtaaacattatctctgtcctaagtcctaacagtgaatttggtgactgaaatggtaaagcataatctctgtcctaagtcctagcagtgaatttggtggggcaatataccttgtgcaagaacagcgactataacagtctggccagttcccttaggcaggctcacctatacaaaaagacaatgcattgagattaaaaaatgttgtggaatgaagcagcacaagatagagtgtatatccagcaaaaggcaaagcagaccgttgcacgcagctgctggtcattgtacttaggatcgatgttgagacggaaatgggcttcaacagactcaacaaaccttgtgttggcagtttgtttaagcaaagagatagcagtgttgacatcatactcctttttggtttccttagcttttggat

SEQ ID NO: 21377 - DNA, 782 bp, Arabidopsis thaliana
tcgtagtttacgtttcctaaattgggacggagagtcgtgaacgcgtagtgacctacacggggtttagctcgggataatgcaccaagaagagtgcttttccctgcgtttggcatcccaacaaggccaacgtcggcgatgctcttgagttctaatatcagaacagcctcagaaccgagcaaaccggctttaatactcgacctttcatcatcctcttcagcatcgtcttccatgctcctcaaattggtttgacggattgtggatttagcaaacttactgcctcttacataacgtgtagcggaaacattacccaaaccaccttcaccgccacgagcaatgattactctctgaccttgttgtgtcaattcggcaacattatacctgatttgatcaatctcttcatcgtcgtcttcaaaatcagcttcctttggcatgcctaactgtctcgttaaactctcctgctcagtatcatcttgatcagactcagacatagtttcctgatgaacatcagaattctcctcggatgcaggatcctcaaccagtgagccaggaaggtcccatggatccaaatctttgggagactcattttcaacctgagatggaatctcaccctcctgaagatgaatcactgtcccaataggcactagcaggacctatggtaacacaaacaagcgcgaaacaacatcttaattcccgaacaataaaagaaagaagcacaggaacaactaatgagaacataataaaaccttgtcttctcctctgtttcctatcctgtttttggaagt

SEQ ID NO: 21378 - DNA, 1069 bp, Arabidopsis thaliana
  unsure (1)..(1069): unsure at all n locations
ggcttttgaagggtccatgtgaagaaacaatgtaaggttggtaataacttggaacagagagattcgagtttggagatatgccatactgctggaagtaagctgggacagagagagaaaagaacagcgacaacccaacaattatgatattccgcgagcttccagcttcactataacgtaagttggaaagacctaaagccgtaaacattgcccacatgaagcacagaagagaagcaaccatgacttgcggaattgatgcgagaaaccctccaaccttacctgaggacatcaaaaactgttttagtcaaagagagtaaaaaatggtacctgttgtacagttgagctaattttcagatgctattgatgtatagttacttgtatttgctaaagaggtcatgtaaattatgaaatagagttacattcaaaaaaaaaattatgaaatagagaacttgaaacttgaagataaataagcagtgccacttacttaccaacaagagaaaatataaccaaaacacacgcgcctaactcaacaactctgcggcttcccattttggtcacagcgattgtgtgaacgttttcggttagagtggttgaaccagtacctgtaccccattgaccggctaagacacttgtgaaaccttcaagaccgattgcccgactcacaacaccacgagttggaggcctcgatgctactaatagagaagaagcatggtacgaaccaacctgacagtaaaataaaaaattaccatatatgcataccgtaccgtaaactgattagtaaaagtgcaaaagtttgacttccaacacataattttgatggtttaatcaaagatgataggaaacactaaccgaatctactgaagcaattacggagaccacacacataacaaaagccattttccagttgaataacggtacaccccattgcaaggggtaaggaaacctagaccatggggcggaactcagcgcatgagaagtatcacccgacagtacttcattctggtcatgtatttctgcagtgggtcgatacacatttgagacaggaacgtntgggcacaacctttgtaggtgt

SEQ ID NO: 21379 - DNA, 433 bp, Arabidopsis thaliana
atatagttatagttatgcatgttcatgttgattgtgaatgttgtaggcttgggttgcctctggttttcaagtcaagtttcgataaagctaacagaacttcatcaaagtccttccgaggtcctggcatggctgaggggctcaaggtaaatcattccctcttctttgagttgcaagcatggatgactctttatctggtgctcttagaactgcgcatttgaaaaactttcaggagtatattgatgtcaaagcgatcttatatctataaattcttacgtcttttagaaccttcagtatgagctgacaccagcaattgcatttagctcctggctataatgcaaccatttacatttacggaaactagtattgatgtggcttcatttttttgtgtgtagttcctgcacaagtatactacaggtagtaacttttctgtttc

SEQ ID NO: 21380 - DNA, 627 bp, Arabidopsis thaliana
caattagtttttggagcttatgggaccaaacatgcacacagggcaaagaaagtagaagagtttcttacaggaaaagtgatatctgatgaagttttgatggaagctattagcttacttaaagatgagatagtacctgataagggtacttcgaatcccgggtatagatcaagcttggctgttacttttctcttcgagttcttcggatctttaactaaaaaaaacgctaaaacgacaaacggttggctcaatggaggatgcaaagagattggttttgatcagaatgttgaatctttgaaacctgaagctatgctgtcatctgcacaacaaatagttgaaaatcaagagcatagtccggtcgggaaaggcattacaaaggctggagcttgtcccaagcatctggtgagtgctctttgatcattttccaggtgaaaatgtgaaacattgcttctttgttaatgttgtaatatattttcaggtgaggctgtttatgtagacgacattcctgctccggaaaattgtctatacggcgcatttatttacagtacaatgccgctagcgcgaattaagggtataaggttcaagcaaacagagttcagaaggagtcttggcattattacttcaaagata

SEQ ID NO: 21381 - DNA, 556 bp, Arabidopsis thaliana columbia
gaaatgggaagagacctcggctggtgcttcttcgtggcgacggttttgttagcagcggtgttgttacccgcaccaaccatagcgggtcgactagagctaaagaatgaaatctcgggggtcgctagtgtccgtaaagcgaactacgccgtgcggtgctggtcaaacgaggatgacctcgggtggaatatgctaaagccgaagcaatcgcggatatggaagttcacgacaatgaacatgtggccctttcagaaaaccgagttccgttgccagtttcgtagcgggtttggaaccacgaacgaagacgtggtgacagtgttttctgtcaaggacgggtttcgaaagcaatgcaggggtgggaggggacgagtgcttttgggtagcgaagagagatgggttctatctaagaaggattgtaaaagatggaggaggggatagtcgcaagaaatatgttgatgtcccaaaagcaaatgggtttggaaatggtgaaatctcaatttaattctttttatccacaatctttaattttattttttttgtcaatacatgcaatttatga

SEQ ID NO: 21382 - DNA, 523 bp, Arabidopsis thaliana
tttgagctcttctgcttggaacttttcatatcagttgtgttttattgacaacttgtttgtccactgtttgtagttatgaaaaagctactgtagaggagaagccttatcgccaaaaagatggtgcgatgctggctgttggagctctttgtgacaaattgaagcaaacggatccctataaatctcaactagagctaatgttggtgcaacatatttttcctgatttcaatagtccagttggacatcttagagcaaaggtatttttggctttaatctgtgttgtggatatctcagtaatccattgttactagcttaccggaatgaggattttgttttgcatttccacgaagtctgttgtacttcaatttattctagaacgcttagcattgttgcttagttggctactgcattgctgtcgatagtttagtatagacttcccgttgttacccagtatttgatgtcatattctttgtgatctcctttgatctgtttgacggttgcatttttttggatgtaggctgcatgg

SEQ ID NO: 21383 - DNA, 746 bp, Arabidopsis thaliana
tatatatatatatatatttttgaactgtcaagatagaaagaagttgaatgtaattaaagacgtaatataattaattaccaggtccaacacaactacgaacttccataataaactctcctttggaagaaacagaacgagaaagctataaacggtcacaatcgcatttgcgatcacaaagtacctgccacacatgcgaatgcaataacatatcattagaatacatatacacttctctaaatactctaataaaacacgtcaaatagaaagaaaagaaaaattctcacttaaacgcagccaaatcgctatacttagccactagggagatgacaaagaaggaagatctttcacggctggtgatcattgcgataaccgctcctaacgcggcacaaaatgccgcaaatcgcagtaccaacccacccaatctctgcgttaacttcaccatcagtttagtttcttggatctccaaagagtttaaaactgtagaatttaactatggaagagaaaaggagagggagagagagagagagataattaagaaaacaaaatcacgaaatataaaccaaagtaaaatgaatatgttattcaagtgttggatgggttggttgggttttcttcaactgtctccaccggtcatgcaatatttatctttttgtttcaagatattaaaaaagccaaagaataatgaaaactaaatttttagtaaaccatagacgtttttcaagctaatattctttaattattataga

SEQ ID NO: 21384 - DNA, 1607 bp, Arabidopsis thaliana
gggagatattggatgtctttcctttctccactagggagagccaactcaaacggagtaggtttctatagatatgacttgcgggacaagaaactgattagagactaaacccctatatatatggtggacaggtaccatataccgagatctttcatgaagggggagaagaagaagaacatgctggtgattctcgaggaagaaccaggggtgaagttagagtctattgatttcgtgttggtgaatagagacacaatctgtagtaatgtcggggaggattacccagtatcggtgaaatcgtggaagagagaagggccaaagatagtttcgagaagcaaagatatgaggctaaaggcagtgatgaggtgtccaccggagaaacaaatggtggaagtacaatttgcaagcttcggagatccgacaggaacttgtggtaacttcacaatggggaagtgctctgcatctaagtcaaaggaggtggtcgagaaggtaatgtgtgatgattgaagcatcttagttattgagtcatttttatatatatagttgatagctttgtgttaatttatggaacaggagtgtttgggtaggaattattgttccatagtagtagcgagggagacttttggggacaaagggtgtccggagatagtgaagacattggcagtgcaagtcaagtgtgagaagaaagaaggaaaacaagatgagaagaagaagaaagaagataaagacgaagaggaagaggacgatgaagatgatgatgaagaagaagaagaagaagacaaagagaacaaagatacaaaggatatggagaccaaaaatcaagatatgtaaacaagactacttctcattattttgagtcttggagtttttaaactcttttttgttattagaaaaaaacaaatatttaattagtaatttatagcatgtggtttttgttatcttttgttcaattaattatagcttaatataaaccactaattatgtaatttgttttgctaaattccttttacagttaggattccttgttttgctttaagctcaaggattgtgagttagggtttcgtttaatctcgtaagcaaatcaacgaatagaagatggtgtttctctcgattcccaacgtgaagaccatgtcgattaatgtgaaccctagtgcaactaccatctctgccttcgaatcgaacaattggtccatcaacgcacgcatcttccccaacctctcctttgttactcgctctgtctccgaaaccctagtcttgattccgattctgccctggtgtcggatctaggttttggccctttctctacggtagttgttaatgtccctctaatcggtggagcggctccgctcagccccgcttcaatttaatgcctccgtcaaactatgtcgctggtctgggtcgtggggctgcagggtttactacccgctccgatattggtcctgctcgtgctaatggcgatggaaacgctgacgtgaatcacaagtttgatgattttgaagggcatgatgccggattgttcgctaatgccgagagtgatgaccaagacaaagaggctgatgctatttgggacgcaattgataggaggatggattcgaggaggaaagacagaagag

SEQ ID NO: 21385 - DNA, 543 bp, Arabidopsis thaliana
tctttgttgaaaagaaaaaataccaatatctgtctcaggtcaagtgacaaaagacaagaaggatgcaaatgtgcagctagaaatggccagctcggttaaacatggagagggtaaatcaacttccctaggtttcgacatgcaaactgttggaaaggaattggcttatactcttcgaagcgaaacgagatttaacaatttcaggagaaacaaggctgcagctggtctttctgtaacacacttgggtgattcggtttctgcggggttgaaagtcgaagataagtttattgctagtaaatggttcagaatcgtaatgtctggtggagctatgactagtcggggagattttgcttatggtggtactttggaagctcagttgagagataaagattatccgcttggtcggtttttgactactcttggactttctgtaatggattggcacggtgatcttgctattggagggaacatacagtctcaggttcccattggacgttcctctaatttaattgctcgtgctaatctgaacaatagaggagcagggca

SEQ ID NO: 21386 - DNA, 748 bp, Arabidopsis thaliana
ctgctaaagccagccagggtatccgcggtttcgccagactgtgacaaggtgatcatcaggctgttacgacgcacggcagatttgcgatacggaattcagaggcgatttcgacgtcgcacggaatacctgctagcgattcaaaccagtagcgggaaaccataccggagttataagaagtaccacaggcgaggatctgaatatgctcaaccttcgacagcagttcgtcggcgttcggtcccagctcgcttaaatcaacctgaccgtggctgatgcgtccggtaagggtgtttttgatcgcgttcggctgttcgtagatctctttctgcatgtagtgacggtaaatgcctttatcgcccgcgtcatattgcagattggattcgatatcctgacgttttacttccgcgcctgcttcacgcagctcgtccgccatccaggcagcgttgtcgtggtcttcctgcaagcgcgcaacgttatttgtcagggcatatatcccggcggcagccagaatgccggaatatgcatcgtcgtcacctgtcatgttccgccagcgaatggcacgtttaatgtaatcacgattaccgacgagtaatgaaccgactggcgtcccaagacctttcgacaggcaaatggtgaacgaatcacaatattgcgtgatttctttcagttcgcagccgtaagccaccacggcattaaagatgcgcgcaccgtcaacatgcaggccagattgcgctcgcgggtaaatctttag

SEQ ID NO: 21387 - DNA, 1104 bp, Arabidopsis thaliana
tggaaaaaacaaaactcatttactagattctatctttaaggaagagtaacatggaacttcttgtcaaggctgtctatacagattattttaatgcttatgtttagattatagttataattattctctttgacaaaagaaaacataatcaactagtgcaatgcttaagatatagaggataacatgaaagtcttgatttcttttgtctcattgatctctgttcctctacgtaaagttttgctcatatgtacaaacttccacaaagaaattgtgcagacaaacaggagtacactgtacacatgagaaagatgggtatggttatatttgcttgcttgctcttgctgattatatttccaacttttggctatgcagatataaacacatcaagtcctttgtcaataggacaaactctgagctcccctaatggaacttatgagttagggttcttcagtccaaacaactctcggaatcagtatgttgggatctggttcaagaacatcacccctcgggttgttgtctgggtggctaacagagataagccagttacaaacaacgcagcgaatctcactatcaacagcaatgggagccttatcttggttgagagagaacaaaatgttgtttggtcaataggagaaactttctcttctaacgagcttcgtgctgagctattagaaaacggaaatcttgtactcattgatggagtttcagaaagaaacttatgggaaagtttcgagcatcttggtgatactatgttacttgaatcatctgtgatgtatgatgttccgaataacaagaaacgtgttttatcttcttggaaaaatcccaccgatccttcacctggagaattcgtagctgagcttacgacacaagtacctccgcaaggcttttataatgagaggatccaggccttactggagaggtggtccatgggcaagggtaaggttcaccggcataccagaaatggatggatccatgtaagcaaattcgacatttccaagatgttgcagccggacaggatctttgacttattcattagaacgaagaaattcgaacctgtcgtacactacgctcacatcagcgggatcgttaaagatcatttggaataat

SEQ ID NO: 21388 - DNA, 495 bp, Arabidopsis thaliana
gctttctcgaactaatagccaaaaccaagatctccgtctctcgctgcaatcgttcccggatggtccaccgtcgcttctgcaccaccaacatcaccaccacacctctgcttccgcctccgagcctactctgttctacggacagagcaatccgttagggtttgacacatcgagttgggagcagcagtcgtcggaattcggaaggattcagagactagtggcttggaacagcggcggtggcggcggacaaccgatacaggaaacggaggagggtttctgttcgctcctcctactccttcaacgacgtcgtttcagccagttcttggccaaagccaacagctttattctcagaggggtccccttcagtccagttacagtcccatgatccgtgcttggtttgatcctcaccatcatcaccaatccatctccaccgacgatctcaaccaccaccatcaccttcctccaccggttcaccaatcagcaatccccggaatcgga

SEQ ID NO: 21389 - DNA, 581 bp, Arabidopsis thaliana columbia
aaagaagagatctagaaggcacatgggtgagacagatgagtttgttgcaaacaacagcgagcccaatttttgggatatgtctgcaatgtcggctgcataccagaaaatgacaatggcctgcaagaatgtaaagaatgagatctatactgatattgagatccaaaatgaagatatacttcccaggttagtatacaagtgaaaaatagttatgttcaactattattctaaataatttatataagagataactgaaatgctactgtagtggatattattatttgctgaccaagcctagtcaactgtagtggatactgtttttgttggtgacagactcttaagttttaaagtagtggcagtattatgttcatcttacaagagacagactcgtgaacttattagcttgacggccaaattttcttttccgaaatttggtagcaacttctttttcttcccttagcttctcttttaatatatggttaacctagttaaatcaccatactatttatcttatgtgttactactatctgtgaacactgttgtgcattatagtacatattttatgtattgagaggttagatgtg

SEQ ID NO: 21390 - DNA, 549 bp, Arabidopsis thaliana
tctagccatggagaagtaaacatcgagaccgatctcaccactggtaaatccatatctagatggaacagcaccaagcatggcggtggtgtcaagcacctggtcataatgagaaaaggtgttgcttgggatatacttaatcccagcagcagacatctgtttccagatatcagacctgagatcagcagacaccttctgcaaatcatcggcactgctcttgccatcccagaaagactccaatgcaaacttgagctctctcttaggtcccatacgtggatatccaacaatgtgggaagccatttttgtttgttttttgtttttttactacatttgaaccacaaacaaaaccaaaatcagtcagtaaaccaaacacaatcctaaaatgtacttcttgtcatatggtaaaagccaccaatcgttaaaaaagtaaaaaacttttgcagttttttttgtcgtatttattgaaaacagagtatgagagagtttaaagatcaaaacgaatcacaactagggaaaacagagatctacgcagagaaagatcgcaaacagaga

SEQ ID NO: 21391 - DNA, 549 bp, Arabidopsis thaliana
tatttagacatcccaaggcataaaaagagtgattaaaggtatacaggggaagataccttcagaccctcggccatgccaggaccacgaaatgactttgaagaagttctgttagctttatcaaaacttgacttgaaaaccaggggcagcccaactctacaccattcacacacacagacacaacaaaagtagcatgaggatcttgaaaaaagaaaacacattgttcaaagttcatctctcagttgagttctctactgtaatcaattttcatatagagatcaatacacattcatacaaagatctctcagggggaaaaacggagtacaagaaatcatactttgtggaaatgtctttaatgtgctttgccattcgaagaatatgttcctcggattcaatcacatttggaccagccaacaagaagaatggttcagcagcctatacacgatatacgtattagaatcaaactcgattttaccgtaagaagccaacattcaacattctgaaaacaaaaaggcgagactcaaaccttgagctgattgtcaatagtgatgt

SEQ ID NO: 21392 - DNA, 1344 bp, Arabidopsis thaliana
agtcgactctagacaaatctctcttcctctttgtttgcattgcttatgtttgatattctgtgtggttttgccagactgggattctcttgagcaagtcgtttcttaaggagaatacaccggctaggaaattcctctcgacggaagactataaagagactctgtttggtttagtgggtgcatgttcctacatgatgtttttggttcttgatgggagttaaaatggacttgagtttgatccgcagcaccgggagaaaagctgtagctatcggtctttcctcagtgttactctctataacggtttgcgccttgatcttcttcttgatcctaagagatgtagggacgaaaaagggagaaccggttatgagtttctttgaaatcattttcatctatttgatccaatgcctttcgtcgtttcctgtaattggaaaccttctttttgagcttaggctccagaattcagagcttggccgtctcgctatgtcttctgcagtgatcagtgacttcagcacctcgatcctctctgcggttctagtctttctaaaggaactcaaggacgataaatctcggcttggatcagtttttatcggagatgttattgttggaaaccgtcctatgaagcgtgcgggcacagtggtcttgtttgtttgttttgccatatacatattcagaccattaatgttcttcattatcaagagaacaccttctggtcgtcccgtaaagaaattctatatatatgcaatcatcattcttgtctttggatcagccattcttgccgattggtgcaagcaatctattttcataggaccttttatcttaggcttagctgttccacacggtccacctctaggctctgcaatacttcagaagtttgagtctgtggttttcggcacattccttcctttctttgtggctacctccgcggaagagatcgatacttcgattttacagtcttggatagatctcaagagtattgtcatcctagtgtctgtatcgtttattgtcaaattcgctctcacgactctccctgccttcttatacggtatgccagcaaaggattgcattgctctgtctctaattatgtcattcaaaggcattttcgagttcggtgcttacggttatgcgtatcaaagaggggtaagtaaatgtatttgacatatttccttcaaaatgtatctaacacattttgatacactcagaaactgagcttagtattcattttgattgcagactattcggccggtgacctttacggttttatctttgtacatcttgttgaactctgcagtcatacctccgctcttaaaacgcatttatgatcgttcgaggatgtacgcaggatacgag

SEQ ID NO: 21393 - DNA, 559 bp, Arabidopsis thaliana
tgttgcagtatgattctctatatccagtttttgatcaagactaaaaagataaaaaagagttcttgcgagtgtgtgctacttagaaaatccacctttttgttgtttcttatctaatgatcaaacaaaactttgaacttttgagtcaaaaggctatcttcgaatcaaaatctttactcgaccgggctaggttcaacataggtctgagtaggtcttaaatcggacggtgttgcctccaaatctgtacatgccatcaacaaatctgggcctctttgtaatgggccaatttctataacgagctaagcctgttaacaagtttcttcgaacttctctctcttgtatttgtttgaaggaaatgcccaatgagacaaacactaattttgatttacctccataaaggttttacataagcatatatggtaaattggtaataaaaaacaaataagagagccacatcatcctaattttacaaaacgcccctacagctgtgtaataaaaaacacaggcggggacttcaggagagggctctctttactctattttacatttttcattttgtata

SEQ ID NO: 21394 - DNA, 696 bp, Arabidopsis thaliana
tatcaagtatattaccgtactaattcatacctcaaacataaacagtgataccaactaattatataccaatactactaaattccaccatttttctattactctgtttcgcgctaaagtttttatttaccgttttatgttaccaattcgacctatacgattaaaactctttaataagagaactaattttctaatcatctgaaagtattatatcaaaaggaaaaatataacagtgatttaattagtgtatacctgataatggctctatgttgggaacaccatgagagtagtaactatagctaacgaagcacttctgaaggtaaacttgtcccgagttcgactctccacactcactctttgctttctcaaatccatctttcacacattccccacaatctgaatttcccaaactaccctcacactgtcccaacacatacaccgactcatactgccccgcgtaaaaacctcctccgccaccaccaccaccggatgatccagttttcacgccgttctccgccataccaaacgccgtctcccttttcccgacaaacccaggatcgttagaatcttttttcccacagacacggaacaacatctccgtaccggaagtttgccggaatcctgaactctcataccggatataacatccagcgaggtgaacacgagccgccaccacattaccgtcatctctgccgccac

SEQ ID NO: 21395 - DNA, 923 bp, Arabidopsis thaliana
gtttcttctgcaataatgtctcagcttctctccaagctctctcctctcgtaagttctttctttggcttgtatttttttctatagattcgatggtttactttttctactttagattagatagacaagattcggagggtagagattgctcctaagcttaattagagaagatgcttcatttacttatgattgggtcttgatctctgtgtagcttaacttggcagattcacaaaagcagtaggaacattcgttcgttttcatcctcaacgaccggcccatgtgtttctatttgtaccgttgtggaaccctctccggacggcaacctcggacaagtcctgttgttcaacataccagatatgaagttagtcacagcggacaaaatatatcccgacgagctttatgacgcccagttggtgggagcttcccatggatggggacttttctccgatagaacaaatcggtcggcacttatcagcgactatttgaacccctatgcttccaagtcaaaaccaaagatgattcatctacctttttttactccaatgtactctggccaaaccgaagtcgtgtgcaacgtggcaatgtcctctcctcctcctgatcaagacgacgaccatgaagattgggtagttggcatcaagttcttgggtagacagcttagcctctgcaggcctcgtcatgaccttcgttggactaacatcctaaccccttttgagtcgtgggaagtctcagaactcatgtattctaaaaaagaccaacggttctatttgcttgctcctggaggcaactacttatgctcctgggatctcaacttcaaggaagacaagaagcctaagttccatgagttggtcttgcacaaccttcccaacatgccacgttccctctggaagcagttagatcctacggcagagaggacattgggtgga

SEQ ID NO: 21396 - DNA, 1036 bp, Arabidopsis thaliana
gtgagaacactgctatgtttgtttttttctatggaaaaatcacatgaaattaatttcatcttcaacttgttctaccaaagacttcaatttcatgtgatttttatgtattctcgaatcctcttgtcttatcttatttccctcgaaatcataatctaattatgatgaactcaaactaaactaacctcgtttttgttattgtttgtttccatgtggcattctcaacaatccttatatagatccaaatggtgagtttttataatttttgggtcttattacacatcgttaattgcatacgagatactctagttaatttatggtttttcgaaaacaggtccagtatactacaaaggtctctaccatctcttctaccaatataacaccaaaggtgcggtttggggtaatattatatgggcccattcggtttctaaagacttggttaactgggaggctcttgaaccggctcttagtccttcaaaatggttcgacatcggaggtacatggtccggttcaataacaatcgtaccgggaaaaggaccgattatcctctataccggtgttaaccagaacgaaactcagttgcaaaactatgcaatcccagaggacccatcagacccatacctaaggaaatggattaaaccggacgataacccgattgcaatcccagactatacaatgaacggttcagcattccgtgacccgacaaccgcttggttctccaaagacgggcattggagaaccgtggtagggtcaaaaagaaagcgtagaggaattgcttacatctacagaagccgagatttcaagcattgggtcaaagctaagcacccggttcactctaaacagtcaaccggtatgtgggaatgtcctgatttcttcccggtttccttaaccgatttccgaaacggtttggacttggattacgtcggtccaaacaccaagcatgtgttgaaggttagcttggacattacccggtacgagtattacacgcttggtaaatacgatcttaagaaggaccggtacataccggacggtaatactc

SEQ ID NO: 21397 - DNA, 1624 bp, Arabidopsis thaliana
taattaacaaaaatcatatataaataattgaattagtgagttaggaaaacatacggcttggcgtcagagcacatgagaaccttaggcttgttggatgcggcatctttgaagactctaaagaaaacaggagtgtattcttctaagtcagatgtagccaacgtgatcaaaccaaaaggaccaactccaccattcacattcgaacctttcaagttacataactctagtggtttagttgcgacgtttcgtcaaacttttcggccttctctagatttccaacgttgaatgtcacatccacatccacctgagcaggagtgattccttgacctcaaagcgttggcccatctccattttctggttggtcatttggacattctttcctctcaatgactcaatctcttcaataggccaaaacacgagttgcttaccgctagagtcaagcaagattgttcttgggataagctgaattccggcccaacccttcacggtatcatcttgaacggtgtcggattcattggcccacccccaaagaattcttctgttcgtcttgtcatcaaagaatgtctttgacgcatagtagttaccataatcaaatctcaaaccatcccaaccgtcaggagtgtaaccgtctggcctgtaacgatccttcttggtgtcatacgttccaagagtgtagtactcgtatctggtcaagtccaaactaaccttcaacacatgcttggcgtttggaccgtcgtagctgaagtccaaaccgtttttcttgtcggttacggataccgggaagaaatcgggacattcccacataccggttttctttcttgagtggataggacgtttgcttttgacccattttttgaagtcacggctcttgtacatataagcaattcctctgttctttctctttgagccaacaagcattctccaatacccatcttttttgttgaaccaagccgtggtcgggtcacggaaagcggatccgttctcgccattatcgggttttacgatggggttatcgtctggctttatccatgtcttgaggtatgggtcggaaagatcttgtggaatggcgtagttttgaatctgagtctggttctcggtgataccggtgtagaggataaccggtccttttcccggtacgtgggtagctgaaccggaccatgtaccgttgatgtcgaaccatttggatgggtaaatggctggttcaagggcttcccaattgatcaagtccttagaaaccgagtgagcccacacaatgttaccccaaaccgcacctttgggattgtattggtagaagagatggtaaactcccttgtagagcattggagctgttgcaatttttgaatattgttacatgcaatcatatatataatgtttttgtcattaacttataaaaagggaaaaatatttgtaatggacttaccattcggatctgttggagtcaagaatgccataacgaaggcaaaacaacaaacccaaggaatttatgttagaacaatgtattttggttgatataaacaaccctagtaatagaagttgaataaatatgaacttgaataagatgtcacatatgttgtaccgttgatccaatggcggggaggttgaaagtgataagcggttctgtgaagag

SEQ ID NO: 21398 - DNA, 841 bp, Arabidopsis thaliana
atattagttagaagaattctttgatttcttatggagatggctgatcaaagtgttactttaatctgtaaaggtctctgagggaggtgagaacttcagtgtggggcaaagacaactgctgagtctagcgcgtgcattgctaagaagatctaagatcctttttcttgatgaagcaactgcatctgttgatgtcagaacagattctctgatacagaggaccatacgtgaggaattcaagtcttgtacaatgcttattatcgctcacagattgaataccatcatcgactgcgacaagatccttgtgcttagttctggtcaggtaaggccaggattattgttcatagaactcgcttaagaagattctggtacagaatagtaacgtccttctgtgactgacataaaactacgtcaattttgttaggttttggagtatgatagtccacaagaattgctatcaagagatacaagtgctttctttaagatggttcatagcactggaccagaaaatggtcagtacctttccaacttggtctttgaaaggagagggaatggaatgagtcaaggtggatagaaatggacacctgccttccaagaatgagtttttaagtttgcttgatgacggaatttgcattgttaccaatttaccattaaccagagtcccaaagtaacaaggtgttagtcttcttatgctgaaaaatctgcagtcatgagtcatgaccaatagcactcttgtgtacatatgacattcttggcagtaggaatggctaacaatatatttgattgttcaaaatgttctgtaatgatcccttttttctggtgtgtagatagagtgataacaatgcaa

SEQ ID NO: 21399 - DNA, 594 bp, Arabidopsis thaliana
ctcttatcatctctgctcccaaatcctcgtcttcatctacatcgagatcaataggaacttgagcaggaggatttgcactcgggtcatataaaggcgccatgtaaggatgttgaagcgcttccgtgacactaatccttttcgaagggtcaagaacgagcattttctgaagcagatcaatggctaaaacatttgcacccgggtaaagacgagagaatgatatccctggtgagtaagggagtgattctatgtatcttttggcttttgggttatctataaactcgagatcttcctctctctggctacccaaaatgttaatgatgagtttaatctggtttagacattctgttcccgggaatactggttttcttccaagaagctcggcgaatatgcaaccgactgaccagacatcaatggaggttccatagttgtcacaacagaggagtagctctggtgctcggtacatctagtccaacatattcagtcatgaactgacctttggtgttgctcgtctcgctagccaaagtcacatatctttaagcgcagtttgatcacaaggaggttacgggttcagatccgatggagatgttgctgatg

SEQ ID NO: 21400 - DNA, 1108 bp, Arabidopsis thaliana
gggttaaaagttctgcaagaacgcaacaaacaaacagagaaacagaaacacagctctctctatgaacatatgttacagacacacatcaagcttgtaattaaaaaaaaaacacagctctttctatgtacatatgttacagacacacatcaaacttgtaattaaaaaaaaaaaacagctctctctatgtacatatgttacagacacacatcaagcttgtaattaaataaaacagagcttccatggcatcactattcgcttaaactataagttagtcttcatcttatttttcaagactatatacactatgagtctatgatgacaatcagacataagaagaagaagttttctgtaaattacccgtacaaacaagacttgagctcagagctcagtgtttaaggttgaagcttgtggatggtagtgaagcatctcattccacatcatttctcttatcatctcctctctcaaatcctcatctacatcgagatcgataggaacttgagcaggagggtttgcattcgggtcatatagaggcgccatgtatggatgctggagtgcttcagagacactaatcctctttgacggatcagaaacaagcattttctgcagaaggtcgatggccaaaacatgagcgcccgggtaaagtctggataaagacatcccaggtgagtacggaagtgatctaatgtatcttttagctttcgggttatctatgaactcaagatcttcttctctttggcttccgagaatgttgacaatgagcttcagctggttaagacattccgttccttggaatatcggtttcctaccaagaagctcggcgaaaatgcaaccaacagaccaaacatcaatggatgttccatagttgtcacaacagaggagaagctctggggctcggtaccaacgagtcacaacatattcagtcatgaactgacccttggtgttgctcgcacgcgctagtccaaaatcgcatatctttaaatcgcagtttgcgttgacaagaaggttaccaggtttcaaatctcggtgcaggatattggctgaatgaatatacttgagccctcgaagcaactacacaaaaagaacaaagcaaagcaaaatttcaggagaa

SEQ ID NO: 21401 - DNA, 1442 bp, Arabidopsis thaliana columbia
ctttgtaataagtgatgagtttatgtaccccatgattatcttctactttgttagttatgtctactactttgttagttttgacttttgagcaagtcttgttaagattcgcattatccaaaagaaaatttaaagccgcattaacagtgtttagctctggtgttactaaagaaaaagtgattatgcgggtcaaacacttctcaaatagtttgctttgatttctttggagaactgaaatgcatgccgtttcgaaatattagaatgcatgtcgtttcgtggatttcagtaccagtaaaggctaatgctgatgcatcgttgcattttaaaaatcgtgtcgtttttcattccgttttagtggccactcttcgcaaccagataagaactcgaagattttctttttctttatcaaaatgcaatctttatctctgcaatcgcttccatggaaaccaaattcagtgactttacctgaaattaatcttttgaatcccaagcaattgactgcctcgagttctcagtatcgtagaactcgaaactggagaattagaagttcgtcggaagataatgtagcaatttcgagtgacggcggagatttgaagaattctctgtccggtattgtgggaaatcaagtggaggagctattgagcagagaagagaacaaaggtttgcttgatggtctggaaaaagcttcgttgagagtggagattgcgaagagagagctcgaagatatagagagacaagaaattgaggcgaaattgctacaggattatattaatcagctcgaatcaagagccgcagaggtgagagcttgttctcgaaatggtgttagatatgaaaatgattgaacatttgattcttttgctctttggaatttgaggtttttgggaggttctactatagagtatagattaaggttgcattgagaatgattggtttatattacaatggactagtgaatttgtgcagtatatatttatatgccaggataagctcaagttgtgcattgtatgcttaggataggataggtaattcaaagtatcaatcaatatcaatggtgttgcttttgtgcttgaaacctggaaatggggtttctcttagtttgtgtgaaggtacttcattagataaggttactaactaaatcatgagtttggttgcattttgtgttttctcgtgttttggaacaaagtctctagtttggttttgtatttgtagacagagcatgttaatcttattcaatatctgattcaagattgcagaatgccagcaggagattgacgcagcaagatcaatggttgaggaagcagaacgctccttgtcattagcagataactcgacaattggaagttcggagaaaggttattcgattgataaagacaaggagaggttagaatctgcaaaagcggcagtgatcgcagctgcggttgggaccattgcggaactcccatttg

SEQ ID NO: 21402 - DNA, 692 bp, Arabidopsis thaliana
cctaaactactagtctacgagatatcataacgttaccataaaactaatgaaagaaatgataaaaattccacactttgatatttttttaaaaggtttaatatgattgaccaaaacgtttaataatttcgaatggacatgttacccttattaacagcctaacgatgctacacattttaataagatacgactcaatagaaaaagcttcacggatcgaaaccatggcagccgaagtgatccttctcggtttctggccgagcatgttcggaatgaggacgatgatcgcgttagaggagaaaggagtgaagtatgagtatagagaagaggatgtgatcaataacaagagtcccttgctactagagatgaatccgattcacaagacaatcccggttctcatccacaatggtaaaccggttcttgaatcccttatccaaatccaatatatagacgaggtttggtctgacaacaactcatttctcccttctgatccttaccatagagctcaagctttattttgggccgatttcatcgacaagaaggtaaacaacaagtgtcattaaatttcactgtccttgactgtaatttgtttttgagatcgttacaatatatggagtttgtgggagttgtaagtacaaggagtttcactacaaactaacagtattagacgagttaaagaaagatattggaatgaaaga

SEQ ID NO: 21403 - DNA, 762 bp, Arabidopsis thaliana
aattacagtatccacgtagattcacaaggtaacgatgtttgatgctcccaagaatctcgaagatccctttcaaaaaaccgatcaaaaccttcatttaacttaacaattcttttcagcgcaaaaacattgccatcgtccatagacagcttgtacactgtgccaaagcctccacagcctattatgtgctcttcattaagagattccagtttcttgataatgtctttggaagcgtagggcaaatctccatggaacatcactatagacgcacctggatagaaaaaatcgtctcttatggtgtcaagttttgagagaaaaatataactcttagagagaatatctacaatatgagtcagcatggctcacctccaccgacatctatcacaaggcttttactctcaactctaccaagctttttatagagaaagcatccccagaaacacatgagcgccactaggagcagcccacccacagtagctgaagcacttataagcagccttttagggttattacctccttggcctataacacgggagaaaccaaaaagcaaactcatttcacgccaaatactacagatttctcaaaaattaagttataatccatatatcctgacaagaaattgattaaaacacagttgctttacctgttggagaccagaagctgtagaatttcactgtcattgcacacaatatcgatttgttttccacacaagttacgatttccgttgaagctgcaagagtgatcaacagtgtacgacttggttat

SEQ ID NO: 21404 - DNA, 542 bp, Arabidopsis thaliana
aacaacattaaccgtataagaacgaaactaaatcggattaacacataaaccaacccgttttattacccaaacaacccgactaaattcagaaaacccccaattcaaaaaatccctaattcgatagaaccctaaaattgaaaaatccccagtttttgaattcgatggatgcgaatgaatttgagacgaatgctttaattgttcatcaggaggctaccggaactggtccgcaagagtttgaaggagaagaaattctaatggaggacgatgttcctgacgacgaagatccgagggaccgagacgcgtttgaaatcgagaaggccgtaaatgagttcagagatgagccttcgattcttcacgacgagtatccggacagtgacaatgatgaagatgaggatgttgttcgggagagaaagcgtgagaacagtagacgtggaggagggaatctctactatcaccagacattcttcaacgagatagcctttaaggaagttgtactcgaccatgccttgaagacaggatgcaacattgcacaatacatgtat

SEQ ID NO: 21405 - DNA, 1331 bp, Arabidopsis thaliana
tcttgtttcagctacaaagtgctctatcgcggcgccagatctcatcattggtcgattttcgccgtgtttttcctcccgagacaccgaatcataagaacaatatcactctctccaggttccactttctggtacacactttcttcattctcttggagctcccgacaaatttccaaatagattcaacgacgacaaagacaagcaatctgctcttgatgttcataacatcataaagcatcaccgtggaagttcacctgaaaagattaagcggattctcgataagtgcgggatagacttaaccgaagagcttgttttagaagtggttaatcggaatcgatctgattggaaaccagcttatatactttctcaattggtcgttaaacaatctgttcatctatctagctcgatgttgtataacgagattctcgatgttcttgggaaaatgcggcgatttgaagagtttcaccaagtgttcgacgaaatgtctaagagagatggatttgttaacgagaagacgtacgaagttttgttaaaccgttacgctgctgcacataaagttgatgaagctgtaggagtctttgagaggaggaaagagtttgggatagatgatgatctggttgcgtttcatgggcttttgatgtggttgtgtaggtataagcatgttgaatttgcggaaactttgttttgctctcgtagaagagagtttggttgcgatataaaagcgatgaatatgattctcaacgggtggtgtgtattaggaaatgttcatgaagctaagaggttttggaaagatatcattgcttctaaatgcaggccagatgttgttagctatgggacaatgataaatgcattgacgaagaaggggaaattgggaaaggctatggaattatacagagcaatgtgggacaccagaagaaacccggatgttaaaatctgcaataacgttattgatgctttgtgtttcaagaagagaatccctgaggctcttgaagtattcagggagattagtgagaaaggtcccgacccgaatgttgtgacgtataactcacttttgaagcatctctgcaagataaggagaactgagaaagtttgggagctagtggaagagatggaacttaaaggtggtagttgttcgcctaacgatgtgacattcagttacttgctcaagtattcgcagagatcgaaggatgttgacatagttttggaaaggatggcaaagaacaagtgtgaaatgacaagcgatttgtacaatttgatgtttaggttatatgtgcaatgggacaaggaagagacagtgagagagatatggagtgagatggagagaagtggattag

SEQ ID NO: 21406 - DNA, 1126 bp, Arabidopsis thaliana
tctatttatttagtcataatcttattggtttataaagaagcagtgtaatcacagtgtagtgcatagtttattacattaggaacccaaaaatgattgatgaaaagcacttgatcttggagagagtttttggcaagtatgtatgccggtatgttgttatgcctttttgtccacttgaattgaatcgactcaaacttctttgcccaccattgaatatcccgtatccagttgtagactccgacatgtttcgatgttcctcggatcagttcaaacatctccttgttgtctccttcaaagcagacttgtctataacctttaccccagcaatgttgcatagctatgattagagcttgtagttcaccttcgagagcgttatcaacacacttgccgatggccagacctgcaatttgatagctcccattatgatctcttacgacgcatcccgttttccccgacgtatccacattaatgagggagccatcaaaattgcatttcaaccaacccctctgttggacgtctccaaccgttgctattatccgaagctcgcctttcgcagtcatgattgttgtatgttagtgaagtgaccgcgtcagtccactcttgcacatccgatctagccagtcctaagttgatctcccagggaacatgtatgttctgaaagtacaaaacattcctacttttccaaagtatccataatggtaaatgatggaactgttgtgtttgagttgtggttgccacttgaaaaatcgctcgtagtttatcatctagagaggaagtagtgtcagtgatgatgtagttgtggacaccggaagcgcgctaaattgacttagcatagtcacaataaaaaaaagaaatgcttcgtagtttcttcctcttgacagcaacggtgacaagttgtacgggggcgaatgtgccgatatgtcaacgccgctcctgttgctaagaccccagagcataatctccaaataaaatgtttaatcttcggagctgtgtgcaggcgccatatttccttctttaagttgatatccctggagtaggtatccatcggcatgataatttaaatgagttcttagccaataccctcatttgattgtgtaacatcctcttttgtgtagtgctatccaatgta

SEQ ID NO: 21407 - DNA, 826 bp, Arabidopsis thaliana
tagtgacgatttctctaggacgtgaaggaggaacttctcctatcgaaatggcggaaaaggtcgtcggatacttagataacaagggttatcttcaagcataacatacttctagatacacaaatttgttatctcacggtcttagttctattttacgagccaaagtataaaagtaagcaaatccatggctgttttatggaatcacaagttcgacaaaataaatatgaatctcataatttttcttgtccctttttttttgtatcataaatcttgatgttatggttctgtatataatatgtgtgaaataaggttaagcctactaaccattttatatgatctataatacaatatactttgtatgcactaatgaaaccaagacttcatggcttatccaaaattagggacaaaatggttgtgatgttcatgtagcgtgtacgttttgggggtcgttggagtgctttttgcaagtcaaacacattttgttttttctggctgtacatagagtcattcttcttacggaagacggcaacatctcaatgttttttattcagtctcaatgatttgaccttaaccaggttggaccactactaacatagccaggtcaaacacgttttagagctttttatggatttgtttctagtcatttcaactaagaaattgttacttgatttctaatagttttttcaagtcattactctcgagaattagggatgatggacaacaacaggataccctagaattattggatgtccaatcaagattccgatccgtccaaatacttatactctctatgattcacacaaaacatcatgatattcgtgggtatcag

SEQ ID NO: 21408 - DNA, 580 bp, Arabidopsis thaliana
gcaaagccttgagaactattttgtaccaatgcttttgagtttcagacaattaattattatcgaactttgccacaacggatgacatttcccggtatcggattttcatctctaaccggaatagtcgaaggatcttcttctccttcacctttaactctcatataaagcccttgaccaagataccattgctctgctttctgtgatctcacgttccacattccttgattatccatagctatcaatattgctgtccacgaatatggataaacctaaacacacacagaatcaattaaccaaaactaatcactggtttaatactttaaattacgagattagatatggcttaacctgaactgttgaccgtgaaacagcatctactaagttatatccagcttttttgctttcagaccaagctccaaatccatatctaacattaaactcaaataaaattagtacacctaatttaatcatcatacacataattatgatttaaatattgtaatttttcccgacaacgaagaaattgtaccatcgatgtgatactctccaatccaaatagagggttctggacacgatgtggatg

SEQ ID NO: 21409 - DNA, 485 bp, Arabidopsis thaliana
cgatcacgcatactcgttgccttttgcacgccaagcatcccaaccaataggaagaacgacgtcggataatcgtgaacggtcgaagatgacacgtgcgtttgatccccatgctcgtcccaacaacgttttcccgactcccgtaacggtacagtcactgaacacaaatcctccctcatctgacggtgacggcctttgatgcgcagttatcgttccatacgggttatccggtgcatatatccccagcgtcatattcaatgtacattcctttgatcaatatgacacataaaatattatataatggtcaattcttgtgatagaaaattaacataaatttcgtaacatatataccttgaatagtgattgaccataaccaaatatgaaatcgatcccgccagaaattatacatcgcttgtaataatgtctgccttttccgtcaaataaagtatcttgaagtcgacgaaactagaatcggtcaccacatatct

SEQ ID NO: 21410 - DNA, 482 bp, Arabidopsis thaliana
actatgagacgacccaccatgagtccaagctcgttcggagctaaccctcacctcttcagctttagtctttatctttcgtccttctttatcctcttccgctacaatcttcttcaccaaagacgccacttcttcccggctgatcactttcttcgacggtaactctgacgtacgaatagccataccaatctcctccgtcagcaacgtggcattcatccattgctccgcataaagaggccaagcgatgatcggaactcctttagttaaactctccaacaccgagctccaaccacaatgtgacaaaaacccaccgattgatctatggcttaagatctcaacttgcggtgcccattgcgttaccacaagccctacaccacgtgtgcggtccaagaaacttctggtagacgtcacttacttgatcatcatcttttgagcttgctccaaggtaagaaggaggcttacgtagaccccataagaactttgac

SEQ ID NO: 21411 - DNA, 483 bp, Arabidopsis thaliana
gcgagcagctatggatttcgtctcctccatcatttctcaaagtctgaatttcaacagttgaatctttgtttgattctcttatctctgcagcatagtcttgaagcctagcaaactgctcatcatgttctctctctatccatctcaatgcttttctccttgcagcttgacattgaggcctagatacagtgatcttccatctttttttaatggcctcctcaatcttcataggcatgaaatactgaggctcttctctaatgttatctaaaaataacctagaaatcacaggaaccttcaacatttcacaatcaccatttggaatacatgtatgcacatccttgaacacattcactctccacttaggacattttttaggcactgcacaatagattcgccatacacaaccatcaccatcacacttaaaagcaaccttagtctttatcatacatgtattgtgcaatgttgcatcctgtcttcaaggcatgg

SEQ ID NO: 21412 - DNA, 810 bp, Arabidopsis thaliana
aaagatgccgcgggagtggcaatatccgacggcggagatgagctgctggaaataacgacggctaagatcctcgcagaacctgcccttggagactttggcgaatagctcaccgcccttgggacattccatgacgaagaagatcttggatttggtggcgaggacctcgaacaggcgcacgatagaagggtggcgcagacggtgcatgatagcgatctctctctgaatgttgccattgagtcctcctttctgcagccgttgcttgctcaccactttgatcgcaacgctctgacccgtcgctgtgctcctcccgtggtacactttcgcgaaggcgccgcatcccaccaattttccgacctcgtatttgccgaagagctgtccacggcggttctccggcggaaattccaccgggtcagaatctaccattaaaaacagaatctgctaggtcaattatggtacacagaaactgaggtcattgcgaatgaatcaacgccgtagaaaaaaaagaaaagaagtctgagagagagagtgttgttattaatagaagaagcgaaaggaaaattagtagtttgaaaagtaaaaagatatgaacaaaagtaacagatatttagagagatctgttagcagagaaaacaaaagagagacagacaaattgggaggattcggataagagataagccatgctctgtatcgagttgttacatatatattactgtcttgaggtaggagatgagggtatttttgtcaattactatcagattctttttccttattttcttcttctttattttctttgtaaagacgtgggagatt

SEQ ID NO: 21413 - DNA, 747 bp, Arabidopsis thaliana
atctttcctcttgtttgtctagccactcgaatgtactgtttggtttttcaataagcacattagtcctaacaataggtccaataggataaaccggtacttttataacccggttcaaatctatgtcctctcttagcgcactatgagtcttcccttgtaactccccccaagtatttaccaaaactccatcgctcataggtatctccaacccaatctgtacacaatcacggtattgttggtcggaccggtctaacattgtgtccaaaagctcttttggtccgaccggtttacaacctggtattttcataggctccttaatatcaacatactcaccttccattaccttatccaataccggcaagtagacaattaatgccaagaaccacgcgtgagacggtatgtacacatacttactcgtcacacctacatcggttatggacaacaacgctgtaccaaaaaagtcaacaatcatgaccgtcggtttttgcttcattgatttcacggcatcacgaaccgtggacttcatttctcgcatcttgctcactatttagtgaccactgtcgcatctggctccactaggtggtctatatcgacagagggtaattcgataatttcacaggtccctctagccgcggctgtatgtatggtctaggtttctgtgagggaagaggagccggaggtgattgcaagaatggtgacgtggacgttgaggacgaaggagagacggtttccgagttcgagggcagggat

SEQ ID NO: 21414 - DNA, 1525 bp, Arabidopsis thaliana
agatgattcggcttgagggggtgtatgaacatatagagtatattagtattaagtctcctatactttagtattataaatactctcttctatcataactttaagattaatgagaaaaacactttaaattaaagtgttaatatgatttctaatcaatatgggggttatcaattttatgttgtatacaagtattaggcaagactgtataccattgttagcaaataagatcttatggtgactctctctctcaaatgaaacgagtagaacgacctgtgtccccctagcaagtttcacatacgaccacgtctccacagatttcgaatcacgtctccagtccacataaaaaaaagttaaagactacgttccacctaaaaagaaagttaaagaactcgatccgcatattttcgaatttagtggtttattattggtttactgtaccaaaaacacgattaaccgataaacaaagaaacaaaaccggatttacccaaaaaccaacccgaactaggacccattaaccccgaatatgactcgaacattcccaaattctaaaaacccccaattctagaaatccctaaatcgacaaaacccctagaaatccagattgttcttgagaccacgaaatcgaacgatggattcgattgagttggagagaaacgtgttagtcgttcatcaagaggccaccggttctattccgcaagaggaaagctcgatcccagatgatggacccgacaatgagcctgacgatgaagacccaagagatcgagatgcgtttgaaatcgagaaggcggtaatggagtttagagatgaaccttcagtttttcacgatgagtatccagacagtgagagtgatgaagacgacgaagctggtcgtgagagaaggcgagacaacatcagaggcggaggtgggaatttgtactatcaccaaaaattcttcagcgccattgcctttaaagaagctgttcttgatcatgctttgaagacaggatgcaatatcgctcaatacaggtatgataaggataagctgggatataaatgtgatggggatggctgtatttggcgtatttattgttcaatcacgaagaaatgtgctaggtggagggttaacgtgtacaaagatgtccacacatgtaatccaaatggagattgtgagatgttgaaggttccggtaattgctaggttgtttttagatagtattagaaaggaacctctgtacttcatgcctatgaagattgaggaaatcattaaaagacgatggaagatcaccgtatctaggcctcaatgtcaagctgcaaggagaaaggcattgagatggattgagagagaacatgatgagcagtttgctaggcttcaagactatgcggaagagatacgagagtccaataaagactcaactgttgaggttcagactgtgacaaatgaggcagacaagaggtattcaacagattctacgtttgctttgatgcgctaaagagaacatggaaagagtcgtgtaggccacttataaggataaatggaacctttataaaag

SEQ ID NO: 21415 - DNA, 1320 bp, Arabidopsis thaliana
caaaatttaacacaccttaatatatattcatatagaaaaagttgatatcttaaacagaaattgttgttcatgatgttattctcgaatcacggtacaagataacatcgttttgcccattcgaatagagaattataagatgacccgtctttactccaagctcgttcggagctaaccctcacctcctcagctttagccctaattttctgtccttcttcatcctcttccgccataatctttctcaccagagatgccacttcttcccttccgatgactctctccgacggtaactccgatgtacgaacggccacaccgatctcctcagtcaataacgtggcattcatccactgctccgcataaagaggccaagcgatgatcggaactcctttagtcaaactttccaaagccgaactccaaccgcagtgagacaagaacccaccgatcgatctatggctcaagatctcaacttgtggtgcccattgcgtaaccacaatccccacaccacgcgtgcggtccaagaaaccttcaggtagactggcacttacctgttcatcatcgctggagatcgccccgagatatgaagcgggcctacgtagaacccaaacgaacctttgaccacttaactctaaacccaaagcgagttccactgtttgctcaaacgtcaacgttccaccgctccctaaacacacaaacaccactgacctttcccgttgctcgtctagccactcgaatatactattgggtttgtctacatgctggttagtcctaacaattggcccaataggataaaccggtactttcatgacccggctcaattcttcgtcctctctaagcgcagcgagagtgtttccttgtaactcctcccaagtatttaccaaaacaccatcgctcataggtacctctaagccagctcgtacacactctttatattgctggcccgaccggtctaacatcgtttccatcagctccttcggtccgaccggtttacaacccggtatcttcaaaggctccttaatatcaacatactcaccttccactaccgtatctaacaccggcaagtacaccatgactgccaagaaccacgcatgagttggaacgtaaacgtatttagccgtcatgcctacgtcatcggctacggacatcagttccgtacccaaaaagtcaacaatcatgaccgttggttttcgtttcattaatttcacggcatctcgtaccgcgggcttcatggctcgcatcttcaccaccatcttagtgaaaattgtagcatctggctccacgaggttgtctacatccacgagggaatttccgtaatttgacagattg

SEQ ID NO: 21416 - DNA, 907 bp, Arabidopsis thaliana
acaatttcctgcattggaaacccggctgatccctcgtgttctcgggatgatcgcgagtagcatatacgaccgggaagcagaaatgcaagctcacggctccgtgtttgatccagatgacgcccttagatgcaatggttctatctgtttcttcttgacatcactcataatgtctggattctgcatcatcgcttgcatgttgagtatgattcttgtgcgtcgtaccaagtctgtctacactcatctctatggcaagacccgcacctaagatctctgttcccttttatatatgatcgtgctcagcttcttattctttggtttttgtcttcaattctacgatccagatgttttcgtctctgtatcgatttttttgtttgtttctgtatcgattttgttgttgttgtcaattttgtaattgatttgtatgttttttgtattcatatccacggcaacatctaccatgagtagacttacacaaagatctttagacagtcgcatatatgaaataaatttctgcttgttttcaaataatgttttggaatctgaataatcctgaaaaataggtcaacccctacaatttgagaagttccattgtggattatgacattttagtatagcaaaagcttaaatcaaaagcttcataatttatatgttttaggttatagacatttgttcaataaagctagttaaaagcagagcagtcccttcgaatctcgccttgattcccaaccttaaccccaacgcggccaagattcctcatagcagagctaaaagcgctgtagaattcttcagcgttgttagcaaacctgaccaccgtagcctgagacgagagatcgttaaacagagcttgatcggaggtgaaaagtcctttccgagccacgaggttctggtagtagctattgtcgaaggt

SEQ ID NO: 21417 - DNA, 1465 bp, Arabidopsis thaliana
accagtccttccacaaaacctgcagtatctaggatgcacacgaatgcgagtcacttgaaactttggcaaatccattgacgcctttgacagtaggagagagaatccattctatgttcatctttagcaactgttacaaactgaaccaagacgcacaagcgagtctcgtgggtcatgctcgaatcaaaagtcagttaatggctaatgcttctgcaaaacgttattatcgggtatttttttatccttctccctttcaccatcaaaactagaacggaagctcattttctgtcttttgcagggatttgttccggagcctctggttggtatctgttacccggccactgaaataccgagttggttctgccaccaaagactaggacgttcactagaaatcccattgcctccgcactggtgtgatattaactttgttggacttgcgttatctgtagttgtctcattcaaggactatgaagacagtgcgaaacgtttctcggtaaagtgttgtggcaacttcgagaacaaagacagttccttcacgagatttgatttcactctcgcaggctggaacgaaccatgtggatcccttagccatgaatcaagaaagctcacttctgaccacgttttcatgggatacaacagttgttttctcgtcaaaaatgtccatggagagagtaacagctgttgctacacaaaggcttcgttcgaattctatgtgacagatgatgaaacaaggaagaagatagaaacttgtgaagtgataaaatgtgggatgagtttaatgtatgttcctgaagatgatgattgtatgtcgctaaagaagacaaatatagttcagctgagtttgaagagcggaccaagttgttcctacgatcatgatgatgttatggatgacgttagacccaagagaggactttgccagtttgttggtggtgaagaaccaggttgtaagagaaggaaggaggagaagatcacagtgagatagaatcttaagttatgtcaaaaattttgttttattaaatgtcagtacacatcaccattaacagaaaaagagagaatgtgcaatactgatttaaactatggacagctactaaaataatcaggtaatcattatgtgcatccatatattcaagaaccgtatatctattaaagatcaacaatgacaacaagaaaacaaagatgatcttagaactttaaacttgtgaatgaatatcttggctttcattatgcagctagaaagaaccgaactttggagctataagctaatttcgaaatgtcgattccacatatggagctagaactacacacatacatagaagttaagagagcacttaccacggttgtcaaatcactcagagtgcattgtatggttgcataaacctcacatgtaaatctcaaacggcataatgtcacctgaaacttcataccaaaccaattttcaaagattaaacatatactggagaaaatgatg

SEQ ID NO: 21418 - DNA, 666 bp, Arabidopsis thaliana
gttgttggtgtaatgatatcacagagagaagaaagagaagagaagaagcagagagtgatgggagataagaaattgatttcatcttcttcttcttcctcggtttacgatactcgtatcaatcatcatcttcatcatcctccgtcttcttccgacgaaatctctcagtttctccggcatattttcgaccgttcttctcctttaccttcttactactccccggcgacgactacaacgacggcgtctttgattggtgtgcacgggagcggtgacccacatgcagataactcgagaagtctcgtttctcatcatccaccgtcagattctgtgcttatgtcgaaacgtgtcggagatttctctgaggttttaatcggcggaggatcaggctcagccgccgcgtgttttggtttctccggtggtggtaataataacaacgttcaaggaaatagctctgggactcgagtatcgtcttcttccgttggagctagtggcaacgagacagatgagtatgactgtgaaagcgaggttttttctcaatctctgttttttatcttttgcatgttttaaaagttgattctttgtctctttcccgagaaaatgtttctacagagatttctctttaacggatctgtactttattttcccccttaaaatccgcaatttttttgg

SEQ ID NO: 21419 - DNA, 864 bp, Arabidopsis thaliana
cactccaacactctccgccactcagcctatccttccgccgacgctggcggtggccttgatcgtctatcccacgtatggtcgtcaccgttgctccgcgattgcgatcgacgctccgtcgtctctgactggcgtgacgccgattcgttggggttacacgagtgttcaaggattccgagatgagatggaagacgacatcgtaatccgttctgatgctgtcgatagcttctcctacgcagcggtcttcgacggccacgctgggtcgtcctctgtcaaattcctcaggtaacttgtgttgcttctcatgcaagctctgtcttctagggtttaagtgttgacgatggtgatgatgattgatagggaagagctgtataaagagtgtgttggtgcattgcaagctggatcgttgttgaatggaggcgatttcgcagcaatcaaggaagctttgattaaggcctttgaaagcgttgaccgcaatttgctcaaatggtgaaaatgagcttaaatttctcagagcttgaatgaattttgatgattttgagtgaaatgaagtgattcatcatgcgtttggatccaggctagaagctaacggtgacgaagaagatgaatcaggttcaacagccactgtaatgatcatcagaaatgatgtttccttcattgctcatattggtgattcgtgtgcagtaagtcttcttatttataaatggatcattgtaacttggtcatgtctaaagtcttgttaatgcattgaaataggtcttatctcgatctgggcaaatcgaggaattgactgattatcacgtccatatggaagcagtagacagctattccaggagtgaaaagggcaaagaacaggtggatgggtgt

SEQ ID NO: 21420 - DNA, 644 bp, Arabidopsis thaliana
ataccgttactattcccctgaggtacagagatcttaacgtccttttgatgatcgttcgtagcggtggagtaatcggcgtggtggtttcctcctccaccgccgaacacatctgagaccggcgaacgacttgagctccacacaaacatgtgaagatctcttccgtttccgtcttgtcttttcccaccaaccaccggagcgtttcctttcgccgccgtgcctccaccaccgccagtgttgggcgaaaacatccctgggttcggcgccggataatgcgctcctccaccgccaccacttcctccagattgataatgaaacctcccagctccagcagcagttccagcagccgtcggtttagcaggaccaccgtcttcttcgtagttggaaggtctcggagtaggacctttagaaccaaacacagcttctccaggaccaaagttagagttccgaccaccaccagaagccatcatcgagtaaaaatcagtatgattaacactagagccacgtggcgttgggtttcttgaactctgaagcgaatatatctcagcgttggttagattcgaaggtctaggtgtcgcagataagccttgagaccttctcgagtaaatatcagaccttgaagcattagaacgacgaacagtaacatg

SEQ ID NO: 21421 - DNA, 490 bp, Arabidopsis thaliana
agttgaagctggtaacgtatcacttgtaaatgcaatgttgaacagccatgttaataacgttcaagacaaaacctttaacttagccacacaattgaaagggagaaaatcgcttgtgcatgcagctttaaaggcaaagaatacaggtgcgtaccaaattaagcgttcagacttctttactcgaagaacctaaccaagttcctacttgtatctgcagatgttcttgatgttattctcggtaaatacccgagtcttgtcaaagagcgagacgaaaaaggacgaacttgtctttcggttggagcatctgtagggttttatcaaggcatatgcaagctgttagacacatcaacgctaagcatctttgattgcgacgatgatggttcatttcccatccataaggcagtggagaaaggtcatgagaatgttgttaaagagcttctaaaacgttttccggattcagtagagcagcttaacaaagaaggtcagaacattt

SEQ ID NO: 21422 - DNA, 969 bp, Arabidopsis thaliana
tacctctctctggccgagaacaaattcaccggcgagatccctgactttctctccggcgcgtgtgatacactcactggtctcgatctctctggaaatcatttctacggtgcggttcctccattcttcggttcatgttctcttctcgaatcactcgcgttgtcgagtaacaacttctctggcgagttaccgatggatacgttgttgaagatgagaggactcaaagtacttgatctgtctttcaacgagttttccggcgaattaccggaatctctgacgaatctatccgcttcgttgctaacgttagatctcagctccaacaatttctccggtccgattctcccaaatctctgccagaaccctaaaaacactctgcaggagctttaccttcagaacaatggcttcaccgggaagattccaccgactttaagcaactgttctgagctggtttcgcttcacttgagcttcaattacctctccgggacaatcccttcgagcttaggctctctatcgaagcttcgagatctgaaactatggctgaatatgttagaaggagagatccctcaggagctcatgtatgtcaagaccttagagactctgatcctcgacttcaacgatttaaccggtgaaatcccttccggtttaagtaactgtaccaatcttaactggatttctctgtcgaataaccggttaaccggtgagattccgaaatggattggccggttagagaatctcgctatcctcaagctaagcaacaattcattctccgggaacattccggctgagctcggcgactgcagaagcttaatctggcttgatctcaacaccaatctcttcaatggaacgattccggcggcgatgtttaaacaatccgggaaaatcgctgccaatttcatcgccggtaagaggtacgtttatatcaaaaacgatgggatgaagacagagtgtcatggagctggtaatttacttgag

SEQ ID NO: 21423 - DNA, 828 bp, Arabidopsis thaliana
taaaaaaaaggccacatatttttagttagccttgacccttgagcctctactagtagctactactatatccacaagttgaccagtttttgtcctttttttaataggatcaaccatgaatgtactctaaacacactcaataccgaaatcttagggactagtcaaacttatgatcccagtaatcactcagagctagtcaagaacatccacgatctaagtatgatcaagaacatgaatcaatctactcatttccagctagatctcatgaactgaaagctaaagatatctcaatggtgaaaactttacctgggaaccgaaactgaatgcggttttagaatcgagcgctggaggaataagaacggcgtggccaggccacttctcgttgactttatacagagtaatgtaatcctcagcgatcacgaggactttgtcttgatgcttttgtctagaaacactaatcaaccagttgttgagaaaaggcaagaatggtgagctcacggcgcagactatcacagtgccattcttggccacgaacctagccgcctgagcaagggtatagtcgcgccatttggactgcggagacggtgacaaagaagaagaaagtctatttggatgcaggaataagtgagatcctggtcagcgctagagtacaccgaggagcaggacgagagcgagaaggagatggaggagaccgtagcggctaaggagagagatgggacggtctgagattgaagaataagaactaggagaggaagagaatgtactttgtttaagaatatgttgtttctgctccattgttgtagcagtagagcgacaatctttgagggggga

SEQ ID NO: 21424 - DNA, 556 bp, Arabidopsis thaliana columbia
tgagatccaaagcggaccgcttgagctgctgcgagagagacgaatacggcatagcaagcagattcctaagcgtatctcctccagatacactttccttctccttcacgaaatcaggcatcacgttatcgaagaaccgacccgccattgtcgtctctttccgttaaagctcaaaatcgattttgtgttctagaagaaagactaaacgacatcatttttagacgaccggttcggtgagttggttacacgtttttggtcaacgtggcatttttataatgaaatcatcagatctacgcaaaactttgaaagacgacagcgtttaataatctccttctcttgtcttgcttccttgtgaatcaaaaaccagcgatcaaaagtcttcttcttgtgaatctgtgatctcaaaagctcctttaaccatggcgacttttgatgatggagatttcccagctcaaacccattctccgtctgaacacgaagactttggtggctacgataatttctccgaagcacagcaacctccgactcaacatcaatccggtggattctcttctttcaa

SEQ ID NO: 21425 - DNA, 551 bp, Arabidopsis thaliana
gagtttcttcatcactcttggatgtctggttagctctgtcatcgtccatatcattgtgattgttcctgcgttcactccccccaaaactatgtcctgattaaatgacatacgtagtttaggttctaaatttaagagaaaacaaaaataaattagaaaatagatgtagaagtacaagacaattaattatgtctatattgcgagttaactttctaaccaagctataacttctctgcttaagttacagaacctaaaagaatggtactaactaagagattattcgcactcaccgtcatcattgctatgagatgatcagaagtgatcttgaaagaaccgtattcagtggatctattgatcatatccaacatggaactgacgaggtttgagtgatcttgggattgtccaatcttcaactcctcatcgattacatgttgaaagaacttggtgagttttgaaaaggctttctcgatcctcgaatgttgaccggagatccggtctacaagccaaccgagacccgttgggaagaagtcagtgaatgcgactgtgaatacgtt

SEQ ID NO: 21426 - DNA, 825 bp, Arabidopsis thaliana
gattcagtggggactttgctgggagcattgacaggggctttgatcggccaagaaacagagagcggtttcatcagaggagccgccgttggtgctatctcaggcgccgtcttctccatcgaagtctttgaatcttccctcctcctttggcaatccgatgagtctggaattggatgccttctctacttggtaacaatcttcatcatcatcaccaccagattttcttttattttcttatgctcaaatgcttttcctatcttatctttatatatatagattgatgtcattgctagccttttgagcgggaggcttgttcgtgagcgtatcggtcctgcaatgctaagtgccgtccagagtcaggtacaactaccatttcttttctttgatgcatcattcattatccttctcaacttttgtattaataataaacagatgggagctgtggagtcccagttccaagatcatacagacatctttgacactgccatttcaaagggtctcactggggactctctcaacaggatccctaaggtccgaatcacagacacctctccggagattgtctcttgctctgtctgccttcaggtttgtctcacttcccccctctgcttttgaacatcatcttccgcggaacgtagattagaagaaaccattatatattgttgcaaaaggttgagagaggttctagatgtttctattaggtgacaagtggttgaaagacaaaattaattaaaattgaggtgacgaaacaggactttcaggtgggagagacagttagaagtttgccgcacgtgcatcatatgttccactaccatgcatcgacaaatg

SEQ ID NO: 21427 - DNA, 938 bp, Arabidopsis thaliana
ctaaagtcgtcaagcctttccagttactaaagtttgaaggactgaaccgtttaatgagttgaagccaacatcaaaacgctctaaactcacacagttagatagctgagctggtagagacccttcaagaagattacgagaaagattcatgtaaccaaggttttgtagattcccaagttgtggaggtatctgccccgtgaatctgtttcgagataggttaatactcgagagattcttacagcttccgaggctgcccgggattggtccttcgaagttgttgctattgaaatcaagaaaagaaagactatgatcctgagaaaactcaggaagaagacctgaaaggttattttctctaaggatgaatctcctgatggtcttacagtgaccaatagaagctggtattgtaccatgaagcagattagaacccaagttgagtattctcaacttccttccatggcatagatttggcggtatctctcctgtaagtttgttaccaataaagtcaacctcttctaagctgctgttcacacctaaacccggtggtatcgctccataaaagctgttgttgaacagcgtacagatctttagcttcttcatctcagtcatttccacaggtagttcaccagtgagattgttttgataaactagcaactgcgtaagactctgactcttccatatctcaataggaatctcacccgaaaaccggttttcgaaaagctccagactttctagcttcctcagcttacctaatgcacttggtattccacctacaagctggttatcgttcagcttcaacaagttcaagctactgcagttcccgagctctgcggggatactcccagagagacgattctcggaaaggttaagaattgtgagattcttcaacatacccaatgaggaagggattgtacctgacaagttaccactcacaatgactaaag

SEQ ID NO: 21428 - DNA, 998 bp, Arabidopsis thaliana
caaatcatagttagttgccgagaacaagaaaaaaaaaaacataaaccttaaacatatatggggtcatcaacatatcacttactactacaacatttgacaacttgttccttcggatcatgcatgagttttacttttacaaacagattctgcaaactttaaaagaagtttctaatctcttctgaaaccgaacaaggtttttattagttacctccaagcacaagaagtgataagaggttgattcttccatcctaaatacaatgctccatctctttcttcaagtgtatacttctctgaataactctcaagcaatcctttgattgttgcgttcacatacgagctcaaaggatacggtttaaatcccgccatgtgaaaccgagacctccatttccctagtggctcgtgcctctcttctctttcaacaccttcacaagctataagattcacaacctctctagccaaacaatgctgctcaacattgatcctttccttgtgatctctagcgagtttcacatctattgattcgaaaactgccaagtaatggttcattgtctcgacaaaccggggaagaaacggcgcagtgtttgtattcgcttcttgctcaaccagagtcacaacgtttggtgacaagtgtttgaccaatctcaacaatctatctctgtgattctccacagttacactctcatcaggcatgtggtgaagaacaagcgggaagttaaccgcgagcgcttctccatttctaactcctagcttctcgatttcgacttccgtgcagcataaagcagctccatggaactcaaacggaacaccgcacatttcagctagcttcccaagtctttgtccaactaactcaagtcctccttgacgagcaaacgatgatctcggatcatcaattcccgttatcctaacgttcggaggtcaccaggtctagcaccaagagcacggatcaaactcacccattgaccaccttgagaaatctggaaatcgataatgtgcacaaa

SEQ ID NO: 21429 - DNA, 547 bp, Arabidopsis thaliana
gattctctctattaactgattacaagttgatcatgcagaaccgtggcttaccttatgaacttagccacttatggttcgttaatttatccacttttatctctcctaaatgcagcttttggaagaggaagaagttgaagtatcggtcacaaaagatcaatcagaggaaactgctaagatggacactgacaaagcttctgccgaggcagctcctgcttctggtgactctgatgttaacatgcaggacgccaaagataccagtgatgcaactggtactgacaatggtgttccagagtctgctgagaagccggtgcaaatggaaactgattcaaaggctagtttctctcttacctcatactgtttgctattcgcttgtgaacaataaataattatggatactttattattggattgtgcaggcagaggctccaaagaagaaggtgaagaaaacaaatgtaccactgtcagaattggtctatggtgcttgaaaactgtggaagttgaaaggcagtggagaaggaatttgagatggctctgcaagcagagttat

SEQ ID NO: 21430 - DNA, 564 bp, Arabidopsis thaliana
tggggaatagttgagggtcattccccccaggagtataattggactggttacaggcagctttttcagatggtccgcgatcttaatcttaagatacaggtcagtcttttacctgcatgattggttaagatacagttttcttaatgaagttgcgttagaatgattgttctcaagcttcatatgtatctcactttctttctttcttgctaggttctaatgtcctttcatgaatgtggaggcaatgttggtgatgatgtttgcatcccacttcctcattgggtggcagaaataggacgaaccaatccggacatatatttcactgatagagagggaagacgaaacccagaatgcctttcttggggtattgacaaggaacgtattttaagaggcagaactgcacttgaggtatagatactgtgtccatgctgtgtcttttctttacacatgaatatttgcttcttgttatcacagatatttgaaataaccaactcatgaatcacttttttggtgaatttatttctaggtgtactttgattacatgagaagttttcggatagaacttgcaga

SEQ ID NO: 21431 - DNA, 644 bp, Arabidopsis thaliana
gtacatttgttttcttcaccttcttctttgggagcctcagcctgcacaatccattaataagtatccataattatttgatgttcacaagcgaatagcaagcagtatcagttaagagagaaactagcctttgaatcagtttccatttgcaccggcttctcagcagactctggaacaccattgtcagtaccagttgcatcaccggtgtctttggcgtcctgcatgtttacatcacagtctccagaagcaggagctgcctcagcagaagctttgtcagagtccatcttagtagtttcctctgaatgttcttttgtgaccggaacttcaacttcttcctcttccaaaagctgcaattaggggggagaaaacaattaacataaattaaaggatcccaagttcataaggggaaggcacgactctagatgatcaatttgtaatcagttactagagagaatgagcctttaaatagttcatgtagcgaaacttacagttgcagattcaactgagacgattccatgaaggttcaatctcactttcactttaagctttgcctctcgccttttgatgactgaacggaccatctacaaaaggagatcaccattagaaacagagcactacagttatcatagtcatgcattgggagaaga

SEQ ID NO: 21432 - DNA, 1425 bp, Arabidopsis thaliana
aaagcagaaactttaaaagaactatgctacaaaagagtcgagggaccttgatcattgaggtgacacattaccaacactgagacactctcccaccaatatctcatcattatgaatttttaccttatgtttgcatatatatattaactatgatactacactctaaagtgaaataattcagttattccttataatcacaataattaggattttaatatacaagcttatcccttattgtggtaaagtataagcctgataaaataataataaacattttgtagatcttttttttttttggccaaacattttgtagatctaacattagctaattaatgtatgataaagtgatcaacagaaaagtaaaaactaaaaaaattcatttcatgtcatgaggaatgcaacaaaagctttctagcaaattccaaaacataagattaaaaggaagaaataagtaaattgtcatcatcaaaatttagattagcaaaatttgatctaagaagataatccctaattaaattattggaaaaataaaaagggatcaaatcaaataagctgtctgaaatctgggccaacgttgtggtggatcaagtaatcatcaccgtccgatgaaacgtcgaaaatcatggcagtgtccgtaccgtgatggtgatgtatgaactcatgatgggccctactcatctccttctgtcgccggagctccataactttccgatgagaatttgagtgtttcgccagcacaaacgtcggactcgccgcgggccgatactccggcactaaacgtcccgatttgtacctaacaccgcaagcgttgcacaacgtcttcgggcccattggcgtgtccgccattgcggagtcttatccgtggcgcagtggagacaccgtctctcctctgcgccaccagactccggtgaagaaacatccttcttccgtcggtgtcctccatcaacggcttgctttttccctagcggagccatcaacaaaggcggcgaggttggcggagacaagtgttgttggctagagagaatggtttctccggtgaaaggactgtcgtaaaacgtttccttgagaagccgacgtgaggcccaattacacgcagcggcgcgtgagcgtttgcttctagctttggccggtacagaaacgtcggtagtaaaaatcggactgctgctattcgggttttccgggcttccggtatcggatttcgggtccggtcgactcttaaaaccggatattagctcgagcttgtgtacatcttcaggcgacaatgattcatccacaatgttcgaaagccactctaactcatcagccaaatcatcagactaacaaaaacaaaacaaaacaaattacaaaacataacttttttgttctttttattacaaaacataactaaaattcaagaaataccaaacatcgttaatattaacgtacagg

SEQ ID NO: 21433 - DNA, 847 bp, Arabidopsis thaliana
ccagaagatgaatagggtgttgtttatcatcgtgagaaagcaaatgaatattggaacaaatcttcttctgttcaattgattgctcgggtgccgtgtaataaagacgatttttcgcataaagccgttgatggtttctctggtggtggaagaagagcgagtggtcttattgttcctattgatgatagtcatgatggtaagacggttattgtagagagaccttcaaggtctcaaagaggaagaagagtttcggataatggcaaaggaggaggattgattatttcgaatgttccgcgtacgcagaagcagagcttattgcagctggttggccttattggttaacctctgttgctggtgaagctattaaaggttgggttccgcgacgtgctgattcctttgagaagcttgacaaagttagtctctttcaatctcatttgtcttgaatcatacattggattggtttagtggactgtaatgttgtgaacattgtatttgcagattgggcaagggacttatagcattgtgtataaggcaagggatcttgagacaggcaaaatcgtggcaatgaagaaggtgaggtttgctaatatggatcctgaaagtgtaaggttcatggctagagaaatcaacattttacgaaaactcgaccatccaaatgttatgaagcttcagtgtcttgtcacttcaaagctatcaggtagcttgcacttgtatttgagtacatggagcatgatctttcaggcttggctcttaggcatggtgtcagattcactgaaccacagggtatttcaaaaagcttaaataaccttgttgtgtctctggcaatcaataactcactagttgttttgtg

SEQ ID NO: 21434 - DNA, 1363 bp, Arabidopsis thaliana
tctattctcactttgatattttcttgtcacagcatttcatgcgaacaggaacatgtaaatttggtgcttcttgtaagtatcaccatcctagacaaggaggaggaggagattctgttactcctgtctccctaaattacatgggattcccattacgcccggtttgttcaatcccgccatgctctcggtttcataggtcttttgttttgctgtattgtggtgaatgatctctcaaagtttccttacaaatggattgttacagggggagaaagaatgctcctatttcatgagaaccggtcagtgtaaattcggttccacctgtcgatatcaccatccagtccctcctggtgtacaagctccatctcagcagcagcaacaacagttatccgctggtccaactatgtatccatcgcttcagtctcaaaccgttccttcatcgcagcaatacggagtagttctagcaagacctcagctcttaccaggctcatatgttcaaagcccttatggttacggtcaaatggttcttcctcctggtatggatccatactcgggctggaacccttaccaggtattgctccaaagaaacctttatttgttctaacttttctttctcttgtcttagtaaacctcattccaatcatgtaggcttctgtaagtgcgatgccttcccctgggactcaaccgtcaatgggaaccagctctgtttatggaatcactccgttatctccctcagcgcctgcttatcaatccggtccatcttctaccggtgtttcaaataaggaacaaacttttcctcagcgacctgaacaacctgagtgtcaatactttatgagaaccggagattgtaaattcggaacctcttgcagattccatcatcctatggaagcagcatcgccagaggcaagtaccctcagccacattggcctcccacttcgtcccgtaagtcatatatacgccattaatcatgaaattctcatgatcaagagtagagttttagtaatgacttatgagaagttaaaatggaaaactctgtttcttgatgtgattctgaaactctgttttgcagggcgcagtgccatgcactcactttgcgcaacacggtatttgcaagtttgggcctgcctgcaaatttgaccactccttgggctcttcttcactaagctacagcccatccccttcttcactcacggacatgcccgtcgcaccttacccctcctcgctcggcacattagctccatcatcctcatctgaccaatgcactgagcttatctcttccagctctattgaacctataacaacaacaactggtggctcagaaactgtggctgctggagtctcttctatgaccagtgatgtgagccatccc

SEQ ID NO: 21435 - DNA, 1177 bp, Arabidopsis thaliana
ttcttaatctagctttttaatacacaacacatatgcacgtcacttttatgtctgcacgtaaaagagatacctttttccaacaaatggaagtggccagagaggcacaaatacgtgcactcgttaactcgaacttcaaaagattacgagacacatatcaacatgatccagacaatatccgtatttttttcttcttggtaaatcaattcacatctatgtctaagtctcaaatcatgtaaacttccgaccatttcgtctaaatgtgaccgttgtttgtttcataagccaacgatatcccggaaatttacttttattgggctaggcccaaaactgtatatctttgaatcatcgaaaaataattttaagatttttttttatctttacaaccagagattaagattaccaacctaattacatatattcccccacccaattaatctaatcacccaatcaaaaaatccagaaccctttttgatctttaagcttggcatcttaagaaaaacgccaacagctttaagaaacaagagcttgttgtggtttccttgtcctgtccaggcatcacgacattgtaacatttcctgtactgttcgcttcttcaactcttttagaagaagaaggagcttcttgtttcataaataatgcatagaagagctcgttccacgtgtcaggaacaccgggaaggcaccagtggctacagtcttggcgatgaagcggtgcaggaccatgcggaccgagatagtagagtgatgggtgaccatcttttctttgagcagccattgccgttatgttcaacagtttcactttaacagtctctgatctgtttgagttatgtgacaacacatctctgaggatctttaactgttcccaggtctctgatgaagccaatgaggttccaatctctggtaatgtctccatatgacatgttcctcctgttttccaatctcctcccctgtttcatacatacaacgacgaagatatattgaaactaaatgcagaacattctacatcataagacctaaacctaatcaagcaactgaatattacaaacgattgagtctttatcaagagtaataccgtacaaacctgaaatgcacgggggcgaaagtgcgaaagaagacttgagttttgtttgaatcgagctcggtatgtatcatttccaacggtatcagagctcgttata

SEQ ID NO: 21436 - DNA, 573 bp, Arabidopsis thaliana
cttagtcttaaaagaagagccgtcctgaaagaaacaaaaagggttgagcaactgatacgaagaaagaagctaatatagtagcaatgaccacagctgacctgagtgacaaagaaaaggtccacacaactaaaggttttcccagtatcggcatcttcccaagatgactgccaacaacgtagtataataaccaatcagtgagtgtacttagaagttttcagtattcagagaactaactactagggaagtcacaaaacgtgacttactgatgcaaacgtgagtagccacccgagccgcgtttccccttgggagaaaagcccaaatccaagtttagtttcgagttcatctgccgctgaaactttctgcacattcaacctccgatcacatctccttccgctcatatttggcccacgccgatgatgctaagagactcttgtattgattgcttgtgttgcgtattaaataaattagggttcaaaacaaagggattcgtgattgacactggtacggtgaagagatggaaccagatcaaataagagaagagagaatcatctagaacctgagattcttatgacg

SEQ ID NO: 21437 - DNA, 506 bp, Arabidopsis thaliana
tagtaaaaggtaacttagttattataattttgacaaaaaaaagtattcagcgaaaggtatcttagtaaataaaatcagccaaagataaaactgtaatgaaagaagtaataatgattttgatgtcaattcaacacaatgatgttatccgctacatctatctccacatcatgatctgttgcggcgcttagcctagtgtttatttccttactgataggtttcagaggcctaaagttcttcctcggcattcgaatcagcggttgaatatctaaatatgtctataatgacttcttattaacactctgatcgtatggttgaatatctaaatatgtctataataactctactttgcttgttgtcaacagcagcttcagaaatttcttcctgaagtgatgggatcattcttaggcagtctatcaagcatttctttgtctgcatcaacaaagctcgttccctttgtttcagcttatacttgttcagcacgtatcttttctgcgtactcatacttt

SEQ ID NO: 21438 - DNA, 643 bp, Arabidopsis thaliana
atacaggagatgagaaatgtgtatcacacatgtcactggtactgcatgtgttccagttaaaccgttcaatagactcacttacgaattgaatgtcatccaccatgagatcaggaccagcggtttggatcagatcaatgcccttctggtaatcaagtcttcctataaaaccaatctgtaaaaagtattaaaacattcaagctacatgagtgattataagacaaaatagaacatttcttataaaaataaaagtggctttgaaatatcaccataggacattcaggcctaatggggagacccaattccttttgtagtgccatcttgcatttgatctgcgattcccaaagcagatacaaaaagtgaattccaccataacaaagcatcggattttggcacttttactcaagagaacttcacatcaccttctcggagacatcatcagcagagtaatggaaaggaatgtgttcatccgtggatggattccattcatcaacattaattccatttgtgatccctgtaaacatcaccggaatatcagctcagaaagatgttttaagtgaaagattataaaagtcggggtttatagaaacaagtcccatttataacactttccgactagacagcacatcttgaagaccataaccac

SEQ ID NO: 21439 - DNA, 930 bp, Arabidopsis thaliana
gcaaccatttttaggtttagacttttgtaatttctcaaaaatattaagggtattattgtcattttcacgtcaatcgcaacttaacgctgattttaattggcgttaataatttttagccgcaacgacttgcgtttgccgcagcgtttggtcgcaacgacgtgcgtccatccaacgaacaacacctcttgcgtctgccgctgccgcaatgacatgcggccactaaacgaacacactagttgtaacagaacaactgaaatactaaaatttaatatccatttaaattggaacagatagaaaacagtgcattaggaaaacagtttggttttatacaatttaaattaaaacaattacttggtatatgacagaatgtgattgtcacattcaccaaattgaaatttctgttttaaaggagaaaacaaaaaaataaccatatacaatcaaaaacctatatagcatactaaccaatcacaatcattaccaaaaacaactctatttcagttgttaattagtaacaataatcaaaaaaatttcctgacaggtcatcgtgccaagctaactctatataagcagattaagtaggccaacactttcattatctcttagaacaagtattgataaacaacaagttttcttatttctatatataccttacacaaaagaataagatggcatgcattgcttttgtgttgaaggctttgtgcttgtctctcttgttaatcgtcgttgcaagtcgttctaccatcagaccaaaagtcttcaacgttcaacgccatggttctcaaacggacggaaagactgataacaccaatgtatgtaaacgaatatcttcttatttttatctttaccacaattagttttcgatgaagatctttgagtattattcaacaccaacatatatgatcacaatatacatcatgacagataatatag

SEQ ID NO: 21440 - DNA, 558 bp, Arabidopsis thaliana
aacataaaacgtacttcttcttcaaaacgcgaaaccacactgtaagttacgtacaccaccacctatcctcaccattcatcatcgacacgtggctggtttaactcaaatcaacggtgaattctttttgcttttttattttaaataatgaatgaaaagattcttctataattccagcgaagaagaaagaaaaaaaaaagcgtattcctcgtgagcactaacttctcactcattcttcttcttcagctgaatccaaatacccatttccatttttaaccgtggttggattgttttgagagttgaaggaagaagatgacgtctgacggagcaacgtcgacgtcagctgcagctgcagcagcagcgagtggcgacgaggaggaaaccgtcgtggagagagagggagaacaatcggagaagagagcggcggagaagagctgttgcggcgaagatttatactggtcttagagctcaaggtaactacagtcttccaaaacattgtgacaacaatgaggttcttaaggctcttctgtctgaagctggttgggttgttgaagaagacgg

SEQ ID NO: 21441 - DNA, 1182 bp, Arabidopsis thaliana
cttggccgttccgagaagctttacgaggcgtttcttctctctcagaaacaaacgttaacaccattgacatacaatgccttgattggtgcttgtgctcggaacaacgatatcgaaaaagctcttaatttgatcgctaagatgcgtcaagacggttatcaatccgattttgttaactatagtttggttattcagtcgttgactcgtagcaataagattgattctgttatgttgttgagattgtataaagagattgaaagagataagcttgagcttgatgtgcagttagttaatgatattattatgggttttgctaagtctggtgatccttctaaggctttgcagcttcttggtatggctcaagcgacgggtttgagtgcgaaaaccgctactcttgtatcgattatctctgcgttggcggattcagggaggactttggaggctgaagctttgtttgaggagttgagacagagtgggattaagcctagaacgagagcttacaatgcgttgcttaaagggtatgtgaagacgggtcctttgaaagacgcagagtcaatggtttctgagatggagaagcgaggtgtttcgcctgatgaacatacgtatagtctgcttatcgatgcgtatgttaatgcaggtagatgggaaagtgcgagaattgtgttgaaagagatggaagctggtgatgtacagcctaattcttttgttttcagtagactcttagctggttttcgcgatagaggtgaatggcagaagacatttcaagttcttaaagagatgaagagtatcggtgttaagcccgatagacagttttataacgtggtgatcgatacctttgggaagtttaattgtcttgatcatgccatgacgactttcgatagaatgttaagcgaaggtattgaaccagatagggtgacttggaatacgcttattgattgtcattgtaagcatggtcggcatatcgtagcggaagagatgttcgaggcgatggagaggcgagggtgtttgccttgtgctacaacttataacattatgatcaatagttatggtgatcaagaaagatgggatgatatgaaaagattgttgggaaagatgaagagccaaggtatcatgcctaatgttgtgacacacactacacttgtcgacgtttatggcaaatcgggtaggtttaatgatgcgatagag

SEQ ID NO: 21442 - DNA, 545 bp, Arabidopsis thaliana columbia
aattatctttctattacttatatatacaaattgttctttttaaaggtttgactaaattattataagattaacaacatacatataatgttgatgcacaggccggtcaatccaccttgatccagggttttcagtacgtactcgcccaatcggtccggttctctgccgctgcagctaaccaaccggtacttttctatcgcttttgattttcgttttatgtactaatgcaaacacaatcttgtgtttattacctcccttttgcacttttgaatttttgtgtttgtgctaaagccaacggagaggaacgtgaacatgaacgcgcagtcaccggtggagatggacaatgatcctccatcaccgcgcgctccaagaccgctgaacaaatcactatctgcgttgcgatcgctagagaagcaaacaagcagagggaggaagtggccgccaccaacaccaccaccaacaccaggccgagactccgccggaacatttaacggtgatgatggagtaacattcctgatacattccgggatcaccctcactgatgctcg

SEQ ID NO: 21443 - DNA, 916 bp, Arabidopsis thaliana
catacacaatcattatcgatgtgagtggcaatcaaagaaactttcctcagcgctttctcatggcacaatgagactctcaacatctggacgtatgttttcgttttcttctgatttttttttcccttggttgaaaatttgtaaacggggttttgaaatttggcaggcatttgtgtggatttgcgatatttacttggatgatggttgtgagttcaatggagacgacggagcttagcctcgccggctttgttagccttctctccgggtaagaaaaatctcgaggtcaaaatcgtcattttttgttttgaggaaaattaaacaaatttcaatctttttgggggatttgtgggtcctaatgacagagcaacaattcgctggccatggccgtcaatggcaatgtcaaaagatgtttacttctccagcgatcaaactctgcatcacgtaaagattcttccttttttattctgtgacattgtttattctaatttaagtagtagacatgcaacataagtgctttcaaataacaaatcccatttttgttgtgtgctgattgcaattagcagtagtgctaaatggtaactttcacccaccatgtcatgttctctttggattttttctatctttctgtttttaactttggtttttatggatacttcagtttctctagacttgctctttatgctcacctactttgaaatcacgtgatttcctaccgaaattaaggaacaaactttatgattggatttgtttagtttagcataaatcttgtaacctgccccaactatttgatgtttctctcactttagttttctgtagattttctttgtgctcacctaactttccaactaacatgattttttcaacgggtttaagaaaagaaaggctgtttttttgtcacataaacttatgatttggtggt

SEQ ID NO: 21444 - DNA, 560 bp, Arabidopsis thaliana
catacaactctatatcatttctcgacaaaaattcacataatatgagaggaacatttaccacgaaaaaagccttgatgtgattcttagtgatcttgtactctgcattttcgtctccataagctgccaacaacacgtccaacataaccgtaccttgatccttctccggtttctctctatgttccacaagaactttctctagcagcacatcaaatttgttggaaacgcccatgatatccttcttgaatagtgagattccaagtttctgaagctgtctgcgcaacaaaactgccaagaacatctttttcatcaagccaatcgactcggtaactaatccccttagtttctctgtctcaccattctcctctgaaaaactccttcccatgctcatcttgcacaaaatgttgttcatgagattcattgcttctttaccaatctcaacgctctcctacattccttgctttatcgagccgattcctgcaaaaccgctgtatgtcatctgcacggatgtctcgtgactgctcttgtgcctgcggtccgagaagcttcatgacagtaagctt

SEQ ID NO: 21445 - DNA, 1151 bp, Arabidopsis thaliana
atatccttgataaaagtgatgtgcaatatcagatactatatgactaaatgtaagaggatatacaaatatacaacagacacatggtttgatacagaatgaaaaaaaataacaaaattatgaaacctataattacagtagaagatgaaaatgtttagaacaagtctaaatttgttcagattagcttatgagttgtataagagcatttgcatgtctctgagctctgtttgttccagaggtggttatttctaccagatattcataaactccgaattgaagcgctgcgaggataacagacgagttgttagagcctagttcaagcagcaccgaggtcgcacactctttgtttttcggggtgccttgtctgatgaattccacaagtgtttcaatgaaggagagttgtccaatggcttgacgtccttcagggtgttatgcaagcagcaacagaatcgaaagcgcttcatcgatcatccctaagtttttatctttaagaaggttaagcaaaggttgaactataccagcatcgatagctcttcctttaatagctgagttaagagacaagttaaagagtgcagtgagagcatctttcttccctcttaatgtcccatgttgtagtaaatcgactaaaggcggtatcccattcgataatccgatagttactttgttctcatcgagcatcgataaactaaacaaagctgcagcagagttctctcttgcctctctgtttccattttcaaggatttcaataatgtttggaatagctccttcatttgaaatgagtttcttgttgacctcgtcgatagatagattcaacaatgtcgttaccgcgttttcttggattcctgaatcagggtaagaaaggagttgaactaacaaaggaatcgctcctgcattcgctattaaaacgcggttctcgggattttctctggctagcaaacgcatctgcttcactgatcttcgttgttcttccagttggcttgacgataacgcttccaccagcaaagagacctcatctttctgctcattttgtgagtcaggacttacttctttctctggaatcttgaaattgttcttctcacaccactgcataatcaagttctttaaagcgaagttaggtgcaagagagagatgatctaactcctgtcttgttttag

SEQ ID NO: 21446 - DNA, 1152 bp, Arabidopsis thaliana
ataaactgcgataaaggctcagaaaatggatgcaactctggagagtgttgttgctcgcatgattatggtgtgtgatgtgcattgtgcagcattggagaaatctggtgatgagactgattggtacaagattcttcaagtggagcaaactgcagatgaaaataccattaagaaacagtataagaagcttgctcttcatcttcatccggacaaaaacaaactccctggtgctgaatctgctttcaaaactattggtgaagctcagagggttcttttggacaaggataaaaggaggtttcatgacatgagacgaaaacctgtctttagaaggcctgcaccagcaccagcaccagcaccatcatttcaaccaccccaacaagccccgaccacaccttttttcactcagcgtggtttccagacaaatgttaatgtggcaaggaagagacctgaaaaccagaagaaacctcaagctcaaccaactgggtttgatggtctcgccagctttacgacctcatgcgcattttgtcacaggaagtatgaatatcaaaggaaattaatcaacacactgatgacttgtttgaattgcggtaacaatacgttgcttttcaagaaactttccaaccaccagttcagccgactttctccttcttccaacagagcaaggttcctacacaagaggcaggcaaggcagtggagaagcagccagaaagttgtgctaaaagtttttttagtaaagagggttctagagcaaaaagctctggtgtttctgctgagaacatcaatggaaagagaaagaggaagaaggtcgttgaatccagtgacagctcttgcagcgagacatgtattgactgcaatgaagttccagctggtggacaagattcggggtccagcggtgcacagcattctcggaggtctgtccgtagcaagcagcaggtttcatataaagaggataaagaagaggatgcagaaagtgctgaggagtctgatttcagaaagaagtcacatgaggatcaaccgtttacagaaaccttgccaaatggtttaaacaggacaaagaagagtaaagcagcaaaaaattcaagttcagggagtgcgtcagatgcagaaattcagtgtactgatcatgatttcagtactttgagaagtcgagggaag

SEQ ID NO: 21447 - DNA, 452 bp, Arabidopsis thaliana columbia
tcgaattcgtattctaagaataagatcatatggaactgagcaaacgaatcttaccaaaaaagtacgaagtgccaaaatgcactctcgtttttggtaagtttagtcaactccgctcaatttatttaataaacctaaatgtcttttaagcttccatacagaaattaagagagcaagaaaaaaactcacggaatagcagctggacatgaccgcaatgtgtagtacggtgttgtcatatctatctacctggtggagaagattgtttctatcgggactctctgccacgatatagaacgttggtatatttttgtgttccacagctagatggaagacggtttcttttcctagtgttagaatgtcgagatatcttggagccttatccgaaaaatcatagagaattggagttgagcacttcatacaggtccgccaaatgcaaaggtgtgaaacatctttat

SEQ ID NO: 21448 - DNA, 1367 bp, Arabidopsis thaliana
tactgctaacgtcgtcgttaaccgaggcgttaatcccggggcaaggagcttatacagcatcaaaggcagctgttgaagcaatggtgaagattcttgctaaggaacttaaaggtttaggcatcactgcaaactgtgtatctccagggcctgttgcgacggagatgttttttgacgggaagagtgaagagacggtgatgaatatcattgagaggagtccttttggtaggcttggtgagactaaagatattgcttctgttgttggtttcttagctagtgatggtggtgagtggatcaatggacaagttattgttgctaatggtgcattcctcaaatgaatatggattatgtttgtttatctgaaagttaaagtattgaagtagtgttctaatcaataccattaagaagtttgaaactgcaggattcaaattgcaatttagtggtgacacaagaatcagcaatatactacaatgcataaacaatgctaaaacaaccaagaagcaaaactggaaaagctcatagtgctgtaaagagtagcaacatactcaccagagagaagctgataaaccggtggttatgatcactatgtccggatgttggatctccgatttgaataggaaaattacactgttctcgagaaatattcctggtagtgataattgcaaggccctcaaagtcacaagcctctgccttttgattctgtacctgaaaatacatgttgaatgcatacgaggcattcccgacctcatcaagattaccacaagaggaaccatagcccaaagctgtgcagtcggagaaggtacatgcgtagtttacgttatccccgagctggttagtgttgttgctgaaagtgagggcattagggttgaacatacaccactggtttcgcaagtactgaacattttgagctccggttaagatcttcttctgacctgctcctgacaaatccgctggaaatttcggttggccatcgtatttgaatatcccccagtgacgttcaaagttaccaggagctatactctttgcatcttcatcgatgaatccaaagagataaacttcaatgtaacccggacgcataggtgttcctctgttggctgctagctttggaagcaaacctgtgtagaagcgttctgcgtttgggatgttagcattcttgtcaccatccgttggccaaccaacttctccaactataacagtcatgtctccatgacccaaagctttaagtgaagccaagagggtatcgaaattggcgtcgaaaacatttgtatagataacgccgttatcgctgacagtgttttggccattgaagaaggcatagtcaaaagggaaatcgctgctaaggtaaagacttaggaaagggtaaatgttga

SEQ ID NO: 21449 - DNA, 659 bp, Arabidopsis thaliana
gtcttgtgtgcttgcttcacaagtaacggtaacataacgtttagagagcaagtttcagcttatgtttgcttgggaacaagacaagggcattacgcgcttgtgattagagctcatgatagtggcggtggcggtagtacggtggtaacaccgtcgtcatctccggctttgactgacggtggcggagggaaattgagccggtggaaagtggcggttgggagtgtgataggttcaataattggagcgtttctgttagggttattggtggtggcgatggtagtgaaagggaagaagaaagcgatgagagaggagatggagaggagagcttatgaagaagaagcacttcaggtttcaatggtgggtcatgttagagctaatcctaatgcttcgagatcaagaacgattccaagatttgaaaatactaggtataagtaacaagtaacaacatacttaaattaggtatcctccttcttgataagatgttttcaatttttagggttaattcaactctggttttttttcctttttttttttttttttttttttgtgttggattgtaacttctaagatcttcattatttaggtgacataatatgtggagttaactgttttccaaatgagttattgaaaatattgtaagccgctttaatttaaaattttag

SEQ ID NO: 21450 - DNA, 813 bp, Arabidopsis thaliana
tgatatgtgctactcttaaacaacaaagctaaatagactgttaaccaagtaatgatctaaaacactacatatatcaaagataatgagtagtagtggtgaagtaggtgaagtcatggtggtggacccttagctgctttagccaagaatctgctacgctcaaaaagcaaagcaatctatcattatcccatagcctcccttgcatcttgtaagtggccatcccaaatgcactcacacttatcctctccttctcctcttccctttttacatctgttccaatgccaagggactttagaaatggggaatgaatgtactaatacattaatacacacttccaagaggaaagtgaaaatgcaccttggaaagatgaagaaagcgtgtggtaagtgaggaagcaagtagacaagtcttttatgcttctattcatgggaatgtgatagattggatacctacacatacaatcaaacatcgtcaccattttactacattaaccttaactttgttttctgaaacaagaaaaagaagaaaaggcagaccaagcaacagccatccaactcgcaggagacagatcaacactcctcaatgacctcaaccctacgtatctttctcccaactctttgatctgaaagtagacagagacttatggaatcataaaacaatgaaagaaagtgcttctggaatcaaactccaagaatggggaacaaaccttatccatgagagggactctagagtaaggtgtacatctctcgaaactctgcaagtaagagtaaccgaggcgatcgagaggttcttgatgatcaaacctttcttcagacg

SEQ ID NO: 21451 - DNA, 622 bp, Arabidopsis thaliana
  unsure (1)..(622): unsure at all n locations
cagattaggtttggcgactgacggttttaacccatttggtaccatgagtgttaattatagcatatggccagtgatactatttccttataattttccaccatggatggcaatgaagaaaacatcaacgaccctctctatggttatccctggaaagcatatgtctggtaatgatatcgacgtctacttgcagccacttatcaaagagttgaaagaattatggtctgttgggattaaaacgctagatgcttccacaaagcagacattcgacatgcgagcagctatcatgtggacaattagtgattttcccggtctgggaaatttgtcgggttggaatacgtatacgaccgcgacttgtccaagctgtaattttgatggcagcggagaacgtttacgccatggaaaaaaaaattgttttatgggtcatcgtcgttttcttcctcaagatcatggttatcgccaagataaaattaattttgacggaaagataganacaagatcttcaccgaccacattgtcaggttctacagtcatcgatcaactagaaaaagttaatattacttttggtaagaccatggtgtagttggagttggaaaaaagagatcgagtggtcttcggtagtgat

SEQ ID NO: 21452 - DNA, 804 bp, Arabidopsis thaliana
tagacaatgtgctctaaaggctgattcccaaggtatctcagagcaagcaacattctcctcgacgaacaaaccaacgcacacatcgccgattacggtctctcaagactcatgaccgccgccgcagcaacaaacgtaatcgcaaccgcaggaacattaggatacagagcaccggagttttcgaaaatcaaaaatgcaagcgctaagaccgatgtctacagcttaggaatcatcatattggagcttttgactgggaaatctccaggagagccgacgaatgggatggatttgccacaatgggtagcttcgattgtgaaagaagagtggactaatgaagtttttgatttggagctgatgagagagacacaaagcgttggtgatgagcttttgaatactttgaaattggctttacattgtgttgatccgtcgccggcggcaggccagaagctaatcaggtggtggagcagttggaggagattaggccggagactgaagtggagacggagacgacgccgtttggatctggtggtgaaggaggtaaagatttagggtcaaatgaggagtaaaggaaagttttggggtttatgtgaaagagaataaagaagaagggaccgatatacaaataccacatttatattttcattgtttattctttgattcaggtaatttgtagataaaaatggtttgaagtttgggctagtaatgtaatgtaatttgattattcattcttttttggttgacgaagtaatacgagaattgatttggacctacttatttctgtgctgtagtactatcagttgtttttgg

SEQ ID NO: 21453 - DNA, 547 bp, Arabidopsis thaliana
tcgactctcccctgtctctggtgatttagtaaggaatttccttataattttccaccatggatggcaatgcagcaaacataaatgatcatctctatggttatccctggaaagcatatgcctagtaaagaaattgatgtctatttgcaactaattatcaaagatttgaaggaattgtggtctaatggaattaaaacactagatggttacacaaatcaaacatttgaaatgcgagcaaccattatgtggacagttagtgattttcccagtcttggaagtttgtcaggctgcaatacgtattcgaccttggcttgtccaagttgtaattttgatggcatcggagaacgtttacgccatgggaaaaaaacaattatgggtcacaaccgttttcttcctcaagatcattgttatcgtcaagataaaagtaattttggcagaacaatagaaaccacatttccaccgaccatattttcaggttctacagttatccatcaagtagaacaagttaatgttactctacgtaagaccacgcttagttggaagaaaagag

SEQ ID NO: 21454 - DNA, 614 bp, Arabidopsis thaliana
aactagaactgaaaccgttgttgaaagtttggaatctactgactgtaaggagcttgaaaaacttgttccacatacggtagcttcgcagtcggaagtagatgttgcttccccggtatccgagaaagcaccgaagtttctgaaagtagcggtgcattatctttgcagtctggttcggaagggaatagtccttttattcgtgagaaggttatggaagacggatacaactggcggaaatatggacagaaacttgtgaaaggaaatgagtttgtaaggagctattacaggtgcactcaccctaactgcaaagcgaaaaaacagttggaacggtctgcgggtggacaagtcgtggatacagtttactttggggaacatgatcacccaaagcctcttgctggtgctgttcctatcaatcaggataagcgaagtgatgtcttcacagctgttagtaaaggtgaacaaagaatagatatagtttctctaatttataagctgtgcattgtttcttatgatatcatgtttgtagagaaacatctggatcgagtgttcagcacttcgtcaaaccgaacaccaaagatcatggaggatacatgttcagttattcacagctgatgatg

SEQ ID NO: 21455 - DNA, 1023 bp, Arabidopsis thaliana
tttaactgaaaaccagcgcaatgagatatatccttttataatccccaatcttgctagcaattggagccagaggtcatcctaagccacaatgcctaactactgaaccaaatttgggtttctacacatcaattcaaaaacaggattctctgaagctaatcagaagtctatgaaacagttaagctgcaaactctgatctttactctttagaatgatcaagactttagacaaagagagagagagagagacacacacacagacctgtgaggcaagtatgacggcgtctttctcgagaaagagagtgagatgactggtgaggttgaaacttccggtgagccaccgtcccggaggaacataaagctgagcaccacctttatcagcgaaagactttagataaaagacagcattttgaaacgcaagtgtgttcaacgttttcccatctcccacagcaccaaaatcagtgattttgacactgtgtggtctctcgctcggtctccgaccacgatcgcatatgtttccgacgccgtaactactcccattaatcagaatcacactgctcaatgtcaacagcaaaactagtgccacctgaataaaaacatactaagagcttcaaattcagatcgggaatcaatagataacaaaaaggaatcatttttctaacggatccagtgaaatgacgaagacccagaaaccattaacgaactgggtttgtttttcaagcttcgtcaaaatcgagaatcaagcaatttcggacaagagagtaaaagaaagacaagagacttcagaactaaacttataaaaagacacttacacttactggcatctttatttgtaaccaaacaaaaaacaaaactgtcagagaacaaaaaaaagctggaaaaagtgaagaacttttcgcgccaaatggaacccgacagtgagaagaagagcgaagaagaagaagaagtgaaaagaaagaagaatgaccacagagaacaacacagagaagcctttttttctattgattgagaaaacagtctacaaatg

SEQ ID NO: 21456 - DNA, 525 bp, Arabidopsis thaliana columbia
caaatatataaaaacttgggtgttgtgttgaagctatgtctgctctgacctgaaccagtttctctgtactctctggctcaccaaagaccagtgagtgattccatctctgcaatgtccaagatccacatgtctttgggttttctcactatgcctctcattctcagtttccttcatcgcactttttttttcccttttggtatcgaaccaaaagaattaacaacacttagttatataacaaaccttagattgagccataatcaagaccaccgccaactgaagtgagagccttgtctgaccattgggaaagcatgcataaacacgcagacgcaaacacatactgtcgcaaccgcaagcatcgagtgaatgatcggagttgggaacaatcgacgtgaacccgaaaccttcctctgatactttagagccacacttgcacatgtgttgcaagatctcattagctctgagcttagtctcttactcaggccaatctgatcgatcccagtttcaatgttcagagatatttgaccg

SEQ ID NO: 21457 - DNA, 792 bp, Arabidopsis thaliana
gtgtcttattatggctgagtgtggatattatactgcttgattacaatgtcttctacattcctatattccggtgtcaatgggcaaatataggaaatggagtaaaggaagaagatggcttcatacttgtcaaccttaaccaaagtcaagtttcctttgcaagagatacatatatactagcatctcaagcaaagcaagtgttttattcaagggcagatgaatcatcgagttggtatgtagctatgagaggttctactagaagatacagtgcagaagatgctgaatctggtaatgcagacgttgggccattgccagtattagtagacatggatgtccttgcagatgacttggttgatgatgataggaatgcccaacctgactgtgaagggatctatgtgtgaaattatattacttgtgatagttttgattgcttattattgcttataatgtgtgttttgtgagattgagattatttttgcagctcaagaatttgttctgataacaaatctatgttttgtttcaggtgaaccaagatggtgaataatcgaaaaaggaaataccaaaagaagaagaagattgacgagttagctgagagacagattgagactcaggaatttactgaagtacaggcagataataatgaagtggaggctgatttactagcagatgaaactaatgaagtggaggctgatttactagcagatgaaactaatgaagtggaggctgagttagtggataaagagaatgaagatgctaacaatgaagtgaacagagaaagtgaggaaccagttgatg

SEQ ID NO: 21458 - DNA, 1052 bp, Arabidopsis thaliana
atgaatgtacaatgtatgtatctctctgtaaaaagggaattacaaagagagagataagagtgagatcgaaccgtgatgagcgtaaatgtaggcttgacgccatgaatagatgtgatcgcctggtttcacatcgtctctggagattttattggaaaggaatcccatcttctccgccgacgaacggagaaccagaaattagggattgcgtcgtcagagagagaaagatcttattttttgcttagtgtgtagggttttccatcttccttggataacatcataacttttttaaagttccataaagacattgatcttttgacttttgagtttttgaccccagaaaaaatatagtttattagaaatttaaattctaattgcttaaatcttaaacgacaccgttacaccattgggcctcaaatgacattgactcttcatttaataaaaagcccaaattaaaattcagactcgtcagtcgtcaccattatttcatcccttaaaccaaaaatcttagtttcagacggaaagagagagtatagccatggaagtctcaaatcagaccagaaaacggaaagcaatcgacgccggacatggctcgcagccgacggcgtatcgaggctcagatggtgtagatctttctctccttgaagcacttgagaagtcttcgcataatggagtagaagcgcttgatcttaaaaccctaaaaaagcttgtcctctccttcgagcggcgtcttagagacaacatagctgctcgtctcaagtatgtggagaatccagaaaagttcgctgactcagaggttgacctacacgacgatcttcagaagctcaaggtgctcgctggagctccggaactttacccggaccttgttgcttccaatacggttccttcgattgtcaatctcctctctcatgaaaactccgatatcgccaacgatgttgttcagcttcttcaggatctgactgacgaagatgccttagaggataacgatgagcctgcgcgtgtgttagtcgcgccttggttgaaacaatgtgctcgagctcttggttcagaatatg

SEQ ID NO: 21459 - DNA, 565 bp, Arabidopsis thaliana
ctaaagtacgtccgcatcggaattgcccttgttcttgcgcttcttcgagccaggggcttttttcaacgagtgggtgaggtgttgatcggctaaacgcttcaatcggtcaataagacgctgcttgtcgtcttcttttgtaggaagaatggggatgatgttttcttctgtgtagggttcgttgcactgtgactgttagtctcttgggccacttagatgtgggagatacaaacgaagacacacctgtaagcacttatcctgcttcaattgccgaaccgcctcctcagagaacacatgcccacatgggacaatataaaccgccttgacgcttggccccaactgtttcgccgtaacaggacagatccagccctcactctttccttctccattccctctagcggccgagttttctccccctcagtatcaacttcgaacttcaattccacaacatctcgaagccccttgactcgtccagcgagaatctcctcacagtcggccttggagctgattcctcgacaacgtctcgccgggcaagaggaatttcagaatcgcatctttattgtacaag

SEQ ID NO: 21460 - DNA, 457 bp, Arabidopsis thaliana columbia
cagaagtactttaacaagaaatgtatatgttttttttttttttaataagaaatggatatgttagtcttaattgtttttaaagtgcattaggttcctcaatcatgaatggtgattttgttctttcttaggttgaacttcttttaagagttcatcacagacatttggtgggacttgttggttactgtgatgatggagacaacttagctctgatctatgaatatatggaaaaaggagacctgagggaaaatatgtcaggtaagcactttaatttagttgaatccatctccttagacagtttgaaacattcaaagcctggtacaggaaaacacagtgtcaatgtcctaagctgggaaacaagaatgcaaatagctgtagaggcagcacaaggtgaactaaattatgacttatatacttttcattcacaacaatttgtgtggtagtctgaaagcaagattga

SEQ ID NO: 21461 - DNA, 851 bp, Arabidopsis thaliana
cccatgtctaaaccggtttggtttgcgaatgtgaaaaccggtgaagcctacagatgagaatttatgtcagtcatctcaagaacatgttctagtcacaaatacaaaatctgaatgggaagccttgttacttacgtttgttttgagggagcagcacaagattgcatcatagtgattccagagttgatgcagcaacgtgtcaccactggtttgagaatcagatccaaagagatctgcaccagtgtgaaggctacaaagccaaaaagaaaagaagagaaattcagataaaatactccatagatcatgtaaacaaaagcagaaacctagaggctaatgataatgaagtacctgtaactccgggagatccaacggaccagagtgagagcttcaggggaagtgggaacagatattggactgatattggagccaggacgaggagcaatggctagagcaaccctctgaatcgatcctactatcgttcgcacgtactgacgtgccattgaagcaacactgtctcttgaatggttatcaaatgtgaactggaatgctatggttagtaccgacctaaagttacagccatttgggtcggcttcaccagcttgacgtgtggatccttctaaagctgaggctaaatccagggtacggtttgcagatgcaccgttctatatgacagtgaaggattagaaatttagaatattgcgtcaagaataaatgatttgggactgatccttaaatggctttttgacatgttaccggagtagatttctgttcaagaggtatgatgcggaaacaggaaggaaacaaaggtgcgtcatcagcaggtgattcatcgataggggccaatacaagcagtg

SEQ ID NO: 21462 - DNA, 605 bp, Arabidopsis thaliana
gagcctgcctccagtaattacttggacccgcctccaccagcttattgagcaacggaggatgacccattgaaacaagtattccagcttgagaaacagcctctgatgccaattctgctgcttttacaatggagtccatattttcagcacgcttggtggccgctgtagcagcttcaaccctcttcttagatgcctctctcgcagcaataagaaccgaactggagttcaccactgcaccttcacccttcaagatagaagcaggggtaccctgaccgggtaatatgctatcatatgactttgggagtccctgatcagaagcatttggaagggatgcttcttcagccattaacttggcctgcaatgcagcattagctgcaacattggcggcagcagctgcagcttttgccaccgcagctgcagcagctatggcaacagcagccgaagctaatctgtcttgagtttctggctggaggccagcatgactttgttgctctatctgcttccatacatattcgctatgactaacagctgcagtagcaagagcagatgcatcctctgcatgcatcttagcctccttaagtttttcaatagtatctctgacaagacag

SEQ ID NO: 21463 - DNA, 775 bp, Arabidopsis thaliana columbia
tttgatcaatgacacatttgatcaaacctagttatgatacatgaaacaaatatgccagaattaaaataaggattatcgtcaatcactgataccagatatggaaagagcaaagcaaaccatcgtattcaaatgataaattgcagatttgatatgagctataacaacaaatccaatcagtggatgaagaaaacgacggcataaattgtatctacttctggattcgatctagcacgtacttaagtggatgacgctaaaacaaaaaaagaagaagtatcgaaatgaactctcgtctcgtccaaacacagaatcacttagatcagatcgatgacaggtaacatcaatcaaattgcaggtgccgatcaatcaatcaatcaatcacagagctgattccgcaataaggaataagagagtgaaatcgagaagcgataatggcggagagacgtacccatcataatagagaaaacgaggaggtaattgttcttgaatgaattgaaggaagacgaagtgttgatccgatccttgttcgtcttgctaagctccaacagtgccactacggcagccatgactccaaacaccaagtagtagaaaacctccattgttgcttctctctcactctctcagagtaccgagaagaagacgaagaagaagaaaatgtcacggagtggtatgcgcgattgtaccaaaccaattaaggtggaaattatcctctacaacgcgggttcgtacacgtaagcattagtcggtgagtttcactatttcttacatcaataataaa

SEQ ID NO: 21464 - DNA, 890 bp, Arabidopsis thaliana
tatgctgtctacttttataacagcgaacggaaatccaggagcacatctcaatcatcagatgcctccatctcacctagaaagcgaagattgtcgaattcaagacgtagatccagatcacgttccgtgcgtaggtctctgtctcctcggcgacgtaggatacactctcctttcagaagcaggtcgcggtcacctattagacgtcacaggcgacctacgcatgagggacgccgtcaatcaccagccccttcaagacgtcgccgttctccatccccacctgctagacggcgcaggtcaccatccccacctgctagacggcgcaggtcaccatcaccacctgctagacggcacaggtctccaacaccacctgcaaggcagcgcaggtcaccatcgccccctgctaggcgtcaccgttctccaccgccagctaggcggcgtaggtctccttcaccgccagctaggcggcgtaggtctccttcaccgccagctaggcggcgtaggtctccatctccactctacaggcgtaacaggtctccatctccactctataggcgtaacaggtcacggtcaccgctggctaagcggggaaggtctgactcaccagggaggtctccgtcaccagtggctaggctcagggatcccactggggcaagattgccttcaccatccattgagcaaagattgccttcaccacccgttgcacaaaggttgccttcaccaccccctaggcgtgcaggattaccttcaccaccccctgcgcaaaggttgccttcaccaccccctaggcgtgcaggattaccttcaccaatgaggattggaggatctcatgcagccaatcacctggaatcaccatcagccagctcattgtcactcctggtaggaagtaagtgtta

SEQ ID NO: 21465 - DNA, 415 bp, Arabidopsis thaliana
tttccgaagaagacaatatgtgtcgataattctggtgcagacataattttgggtatcttgccctttgctagagaaatgctacgtctaggaatgcaggtgcttcctcagttttttttttttatgcacaactatggacattttgttctctggtttggctttttgattgtgagaagttgtttattaagtatatttctaagttgttcctcattgcacctttgcttttgaaggttgtaatggctgctaatgagcttccgtctatcaacgatgtaacttatatcgagcttgcagagatcatgtctaaggtgatgaatagaggcatttgggtactcatgaccattacagagtatagacactcgatgctgactgagtcttaatttaccagctgattgatgcttatggcctattgatgggagtt

SEQ ID NO: 21466 - DNA, 627 bp, Arabidopsis thaliana columbia
aattcttggttggtggataatagatttagctccgtcccggagaaccatggcgtcgctttgctctgcgaggttccttccttctccatcgctcgatattttatctacgaagacgaagatatcctccgactcgcgctcgcttggttgctcttcgtcgcgtgtctttgctttctcttccgttcaccgttcttcttcgcgtcgcaatcggaatcagctgcaagttgtgtctatggctcctgaggaagaaaagctcactcgtcgtaatcctctcgatttcccaattgtaagttcccccgggtcgggtcgggtcttatttcggatcttttaatttccagtttcacatttctattcgttgtggtaatagctccgattgagaataaataggttttggtttagagtttgtgatttgttctacattttctatgttcctgctgtttatgaatctacatgtgttaactgttaaatcaatttatacaagtgtagagaaaagctttgtattcatggctccaaagtgatttggtagctcttcatgtgttttgtttggattaggtgggattagtgatcattgtgtctttatagaatatgaatcaccgagacactacttagaatcataatgctttcccttgttat

SEQ ID NO: 21467 - DNA, 791 bp, Arabidopsis thaliana
tattcacctgtataaagaggagaggaacttttacttccccaatcacctctctggtggcacaactggaatagaaatcttctatactctcgcaaccatatgtcaccatggacaaggctttatcaaattcgcgaactgactttgaacacagagcctttccaacatcaaatgcttttgctctgccttgaaaaagctcctagaaagtgtatccatatgcatatcccagtcaatataaaaagaactcactctaaatgagttcataaatcattattgttgcgttttataagcaatacccaaccttgtttgccagcagtatctcaactaatccccttgtaagctgttgatccaaactagtagaatacggagatgtccgtgtgatctcctcaaggtcaaagggattatcaatgcatacagcagctgtaagaggcgttctttcccctgcttccgcaagatatttcgtcaacatatttgcaccatatcctctgccaacggccgtaagtgtcgtccatggccttgtcttgcttaagaatcgcaaagcagtggatatatcatcactatcaccagctgtaaacaacctacaattcaggtgatcaaaatagattcaagataaggaactcttagagtatctacaacaaagattagtgttagctctcaccgaggtgtagtgagaggcgaaccagcacagcctctagggttcataaccacaggaaacacgcctcgcctcagagcttcgcatacaaacgatctaacgccttcttccatactgccttccggcgttcccgggatgaaaacca

SEQ ID NO: 21468 - DNA, 493 bp, Arabidopsis thaliana
tcgcattttgaagcttgctagaggttttctcaagggatggcatatctttcttggctacctctcaaaacttggttccacgaccatgggtcatcgatgacttgaacaagttccaagccaaatgggtcaagaagccttggaagaaggtcacttgtttgttttgtgctttatctaatgcgatgttcagacttcagaggttaaccgcttgacaaaattaattgtttatgacaggcagtgatttttgttgataattctggtgcagacataattttgggtattttgcctttcgcaagagagttgctccgtcgaggaattcaggtacggtacctttgaaaatgaccgagtctttttttacagtcccctgagtgatgcagagtactatctaaattgttctttctttatatcccccctgaaggtggtgctagctgctaacgagctgccagctatcaacgatgtaacatatactgagcttacagatatcgtgtcgcaggtgatg

SEQ ID NO: 21469 - DNA, 569 bp, Arabidopsis thaliana columbia
ccgatatagaactttgtttgtactgactgagattgtcactgtaatgtaaacagaaaccatcgtggtctgaggcactactggggtctccgtgtacgtggacagcacaccaaaaccaccggacgccgtggaaagactgttggtgtttccaagaagcgttaaaaagagtttgagcttggttcaatggctttgttttgttttttttgtattgttgttttttgcagaagagatagtttaagagatgttgtttcatcaaaagacggtcttagcttttacaatatataattgaatccaaaaactagtctctatttattacattctcttctctcaaaatctgctttaaacaaagttaataatagcacactcctccatacgcaagaattatataatcagagacttctattaagtgtcacaagcggctgtctctataatgcgcaaatacatcgttatcagttttaatcactatcagtaactttactgaacttaattgatcattttaatttttcatgttactctctccttcttcttcacttgttctctttctcatcgcctcttgattcacgcgaacgaga

SEQ ID NO: 21470 - DNA, 543 bp, Arabidopsis thaliana columbia
tgaaacgaatcaatacggcttaaagaagcaacacaactaagtaattcagtgtttaccttatcgaaacgatcattaaactcttgaatttgcatatctaatacagtgtaaaaacactccacttgataatgatggaagttggtcatgttgcttctttttcttggcttttttggattaacaaattctccatccataataaccaactcaatgtcatgcttcttacaaaaagaaaaaacttcattaaccaaagaatctcatccatcatctctgagcttgcataattgttgcttggtagatttcactagtgacatagcattcaaaatgttttggtctttcctttgtagagccactgataaactatttgtgagtccaagaaaaagcaacatcaactataagaatttttatgggtttttttgtttaattattttgggctaaaatattatatttgttttaattgaattgagttgaacattagagtagggcacttgacgttaggcccacagatattccagcaaatgaattaattatataagagaatatatatat

SEQ ID NO: 21471 - DNA, 633 bp, Arabidopsis thaliana columbia
gaaatccaaaacataaatagtcaaaaacagaaaagaagataggtgcaagcgagctacactggaatcattaatggaagtactgaatactgaaaattcaaaacaacgaacttgttgtccaagtgactccagtagagtttcagaacatcgccttctgagagatctaacgaatgcttcatagtactccaaccagtaccgaaataatatttaggtttatcgatacctgatactttgagcgtaactgtgtataagtcgtcttccattatgtcgtcgacttgcacttcaacaccgtttagcaaatcttggtcgttaacattcatcctcgtgaggacagacatcacttctgctttcggtaataccacattaccaacgatatcactctttgatagcacttttgttatgatcatagccggttccaatggatcgttgtaattcatcttgcttaattttttttatatttcttacgttctctattcaaacatatatataggagatttagcctaagaaaaaaggtaaaatacaaaagagaaaaaatcagaactctttttgaaacaaattagaaaattgtctaaatatctagatttctcttaatatggaattggaaagtaacatttttgcaaaatattagatttagat

SEQ ID NO: 21472 - DNA, 817 bp, Arabidopsis thaliana
ctaactatggaacatcaaagatggctcaacatggatggagggtttctttaggtttagcagctgttccagctgttgttatggtgattggatcatttattttgcccgatacaccaaactcgatgctcgagagaggcaaaaatgaggaagcaaaacaaatgttgaagaagatacgtggagctgacaatgttgatcatgagtttcaagatctcattgatgctgttgaagctgccaaaaaggtggaaaatccatggaagaacatcatggagagtaaatatagaccagctttaatcttctgctcggccattccctttttccaacagatcactggaatcaatgtcattatgttctacgctcctgttctcttcaagactcttggttttggtgatgatgctgctcttatgtctgctgttataaccggtgttgtcaacatgctttcaacctttgtctcaatttacgcggttgatagatatggtagaaggttgcttttcctcgaaggtggcattcaaatgttcatttgtcaggtaaaacaaaatgacttggtttacaaggaaccgcaaaataacaatcatgaccatagtcaaatgaaacaaaaccaattccatatatacctaatcaccaaaaagacttaatgatccgatgttctttatttattttcagcttcttgttggttctttcatcggtgcaagattcggaacctcaggaaccggaacattgacgccagcaacagcagactggattcttgctttcatatgtgtgtacgttgcaggatttgcatggtcatggggtccattgggatggttggtacgagtgagatatg

SEQ ID NO: 21473 - DNA, 867 bp, Arabidopsis thaliana
gataaagatactagagtcaattcctggagtagatattgctcggtgttcttgcgttgtactggcttcagagtttcggaatctggcttcatgtactatattgtggaagcaaatgtgcttggaagattttgctaattctgtgattgaacaaactgaatatatatatattatttttttgttggttggaagcctacgtttgttgaatgaattcatgaagatatgtatagatttatgtgttggtaagctatggtattgctatttagcccctctctgtacaaccagagataaaattatgaattattttgactaaacacaaaattaattaattgtacaaaacaactatcaatttataatgttaagctcgagaccaagaataagaacagattgaattctcgagctatgaaaactcagctggaatatacacattcaaacaaaacagaacataattaacaaagagagaaacggtaacaaattctatatcactatctttctgaaactgaaattgaaagccaaaaaacgtaaaaagtaaacaacgaccaaaccaaaaataaaaatcaacaagacaaaaaaagatgtaaaaaataaaaatcaagaagcacttgggttccgggaatgtgctcttgaagcaactccccactccattgcctcagccacggctctttcccgttcttccgctgccactgaatcctccacggacgtttcatccgacggctgaggaggatcatcgtagtgtggaacagagattgagccgtcaggagcggttcctaagaaaccgagagcggttacaacgtcactcatgagtggccgtaccgttgcctcttcttgtaaacacattgctgccactgccaccgcttgattcagagctttctc

SEQ ID NO: 21474 - DNA, 613 bp, Arabidopsis thaliana columbia
  unsure (1)..(613): unsure at all n locations
ccccgatatagaaagacgtcaacaccaacaaaaaaatgatatagagagaaacgttcgtttacacgcgtttttgtctatataaagtatacatttatacatccctggaaatttttcagattttcaaaaatcagattcaaaggaaacagaacacaaagttttgtggggtttgaccaaagagagtcaacgaagaagatgtcttcaatcagtacggaatcgtcttctaatctgtctctgttagagaatggcggaggaggaagtgataagccgacgcggagacgtcgaggcgtgtgcggagaacggtatcggcgtcgtcgttgataaggaagagatcggatctgaaactgatctccagagttcgttgggagtttatgagacgaatcttgacgaatcttcaagaagttcttctcggcaccaaattgttcatcctcttcccggccgttcctctcgccgtcgtcgctcaccgctatgactgtccacgtgtaagttccacaaatatatctttattttatcggaataataaaccaaacattcgtcttaaaccatatgttatgttaattgttattgcgtggtgtacaanaaacaggcgtgggctttgcgttgacttgctgggatt

SEQ ID NO: 21475 - DNA, 529 bp, Arabidopsis thaliana
ggattctcacatattttgtatgaagaaaacagaattacacaagatatcacagctataaagaacacatttcaacaactacacaaaatcagaaatcgtaacaacttcacaatccacacctctctatttaaacagcgtttcccacattttttcatatattcatcaaacaaatctcaatcagttcaaaatcatcttccaacacaaaaaaaaaaaaacagagcaacacttaacgataacattctccatgatgatcaagcaatcaccattcttgcttttaacaacaatcttgttcacggttgctgtgtttgtagcagcgcttgatcctgcacctgaagaccccattttcgaactctacatgcacgatttacttggaggaagcagccccaccgcgaggcccatcacgggtttgctcgggaacatttacaacggtcaagttccatttgctaagcagattggtttcctcctcctgagaacggtatagccatcccaatgcaaacggcgcactaccaacggttaacggcatcaatggtgt

SEQ ID NO: 21476 - DNA, 514 bp, Arabidopsis thaliana columbia
tgaatcagtgtgtgaatttgcagcaggtttgggtgtgacacatctcccgaaacaaatttggttacaattccatccacttctaacagactccatcctggtgtctttcttatccctctctgctctatcatcccacgaactttaaatgcctcgggatttcgttgaacactaaagtatatatcagatagttgaacaagagctgcttcctcttcctccacatttcctttctccaagtcaagaagattttgaacagctagttctccgagttcaacattcttgtgcgttcgacaaccattcagtaaagcaccccaaacagatgcaagcggtttcattggcattttctcaataagatcaagtgcatcatctaatcttccagctctgcacatcaaatctactatacagctgtagtgctcatgctttggagtaattccgtatcgagcttccatattttctaacattgttctgccttcttcaagaaatcctccatgagcacaagcggctaagacccaagaagaac

SEQ ID NO: 21477 - DNA, 580 bp, Arabidopsis thaliana columbia
tcgagaggatccctcaatcattgtgcaaagagggtaaacttaaacaagcgattccgtcttgtctcaggaatctagcccaagtcaacagacttacgagcttctgattctctgctgcggtcatcggagctctctttctgatgctctacgtgttcatcgacatattctggataatgggtctgatcaagatccttttctggctacgaagcttattggtatgtactcggatttgggttctgtggattatgcacggaaggtgttcgataaaacgcgtaagagaactatatatgtctggcaagctttgtttcgagcccttacgttagcaggtcatggagaagaagtgttgggtttgtattggaagatgaataggattggagttgagtcagataggttcacatacacttatgttctcaaggcttgtcttgcatcggaatgcacggtgcatcatctgatgaaagggaaagagattcatgcacatcttactcgacgaggttacagttctcatgtttacattatgactacgttggtggacatgtatgctagatttggctgtgtggattatgccagctatgtgtttggggga

SEQ ID NO: 21478 - DNA, 548 bp, Arabidopsis thaliana columbia
atattagtataaacatcatgggctaacctttctataactacaaattgtctagaactgttaaaatcagatatatgagacgagtcacacaaatttgacaagatagccttcatggcttcaataaattgacaaaaaaaataaaataagaaaaagcttcaacagttagaaatctcatatcagttacaaatcttttcctgccgaaccaaaaaatctattgcaactacttttcagaaccaccatcgcaaggatagctgctaccagtgctctgtgtgttactaatactgatgatacggttcactgtagaagcaagaaatcagtacattaccttaacatgatcacgtgaaacgctcaaacgtccagacagttgaggggccaaaatcaactgattaagcttgagacttgaaatggaaatatcaccatcgaggctagaaattgcagctgcatcttcacatttgtctgacccaacatctccatcttttgtagtgctgtgtcgttttatcttcccagaaatttgatccttcctgttgcttttaaatgtgtaggtcgtggtg

SEQ ID NO: 21479 - DNA, 513 bp, Arabidopsis thaliana columbia
  unsure (1)..(513): unsure at all n locations
ttaaaggaaccaaatttaaacaaaaacaataaaattagagaaaccaaaaacgaaggaagcaaaaacacaaacctgtgagcgaatatagttgatgagcttaaaagaagagtagaaatcgagcttcaattcctttctaactccatgaaagtcgaatccgtggcttagacgacagtgttcgaagagtaaatcacaggaaacgaagtangaatcacaaaacaaacacagaaaatcagattccgagtcgtcaccatcatcctcctcctcctcctctcctccttctataccattatcatcagctttccagtctccccaatctccttcgtctgagtaattttcttcttcatcctcgctgtagttgagaatctcgtgcttcaccattgtcgccgccatgagaaagataacggcgccaagttcttaagagagaggtttaagagagcggagacacccggcggggtagaaaaacaattaccttcttaccctttgttgtaaaccgaaactaaccggaaataatta

SEQ ID NO: 21480 - DNA, 577 bp, Arabidopsis thaliana columbia
ctgtagaagattccggctggtttaccggcgagttgctgagtcctccaaaggccgccggtcgcatctaaaaatgccttgaactgagcagccatcataccaaacctcgttgggaagccgaagataaatccatcagcctcagcgagctcgtttggggtgataataggagcatcactctttggtggtgcactcattttagagagcacatcttcttggagcgtttcgggtacctgtcaagaacaaacgctagctcaatacttcttccaatgattctttacaggtaacttatgatcagaaacactgacggcagaaaatagatgcagaataaaggaacatgcccttttgtgtaaataaactaagggaaagcaacactatatacattaaaagtagaggttatggtaaaatatgccaataggatactatagttttgttttggttctgaacacaaaggaaataacttgtagtgactagtcaaaataaaggagctcgagacatcgaatactgtcaagaatgttggcagctacaatgtatagtaaacaaaattaagagcgtatttcttctttctttcagggagtagaga

SEQ ID NO: 21481 - DNA, 460 bp, Arabidopsis thaliana columbia
tcatttcgttacttacagttttccattaatatgtattgtttcaaggtatctgaaggagaggaaacagtttggagcaccgttggctgctttccagttaaaccaacagaagcttgtgcagatgctgggtaacgttcaagcgatgtttctaatgggttggcgtctctgcaagctagaatgcgacggggtcagatgactccaggtcaagccagtttaggaaaggtattataacaagaaatcctttatcaaaatagagaaacatgttgtctgattacatagtcagtacgctagccgaaataagtaggggtaagatatttaaacaacgataggtgctcatgagttatgaaccatttggtagaagacctgtcatattttctatgagatgcatcacttgattccttgaatagaatgtgtagcaacatacaatgaaggtgtgtgtgtagagagattagggcaagttgtg

SEQ ID NO: 21482 - DNA, 559 bp, Arabidopsis thaliana
cggaagtatattatagcttcataggttctgcttggctataaatgaagaggctctccttctataaaaacttatctttgcgcttggggcaatgacgcagctaatgaggtattaaccgaggcgcgtctattgctggttgaaaactatttccaaaccccctcctaggcctaagcttgtcttgggcctctgagaatttctggaagagctccctttggggtaaagctccacaattcttagttcaatagatatcttttatgattacgcttcataaatatgtttctatttaatgtaatatgtttcctcctttcatgtacctaaataggtttatgttatgcatcagctttcttcatgttttctcaatttgaagtgagaaaaatatgtcatgctaatagtctgcttctgctttctgcattgatctgttacatagcagccactttcttatgtaactgagattggtttcggtataactatcatatgagaggtaacattgatgaatttttcaacctttactagcactaaataattttacacgttgctaaagtttggtaggggttagaatgta

SEQ ID NO: 21483 - DNA, 549 bp, Arabidopsis thaliana columbia
tttattactaatgttgtgacagattttgtcgagtaagaagggactattaaagaatcatcttctaccgtttcacaacatgagattcttggaactgcaaacacgtttgaatagacacaatgttcaaacactgtcatgtctgttcaagagctgtccaatgctaaacatacttaccgtcaaaatcattgatgatcaaacaagtgaaagaagggtaagtagtcaaataaataaacctttttctttgtttctctttctcagtttaactgaattgtctttgattttgcttatgttttgtagcaatggaataaggatttgtgggatatgtcaaactcagagattcagtactgggaatctcaagcctatgaattagaatctttcttgaaccacttggaatttgtggagattcacggattcgtagagtgcgagaacgaaatgagcctcgcaatctttttgctgagacatggaaaggctttaatcaagatgacgcttcggtctagtttcctctgtagagactctctccgcagacaaatgataaggtcacagctaacggga

SEQ ID NO: 21484 - DNA, 1432 bp, Arabidopsis thaliana
cctgaacaaaattatatcataataaacttgtgattttatacaaaatttatttgtatatataattttactaaccaacgtgaacgataaaaataatattctcataaaatgttgattaaaaattacttaaaataaataattatttaggattatgtattagtagtactcgaaccatttttttagttatctgcatgaagaccctaatttttcacatatatcgaaactaaaactttggatatacactgtaatttgaaaacgcttggaacggataatgtagttacctcacaagattttgtacatccctgacattttatattcattaaagtgtgtttttttcttcagaaaagaaaacactttttttttttgtgcttttagtttaaattaacaaaaaaatggacaccatgagattccactaactcatgtgtatataacattagggaagcagtcaattcatttcagcatccacacacactttgaatgctcaatcaaagcttcttcatagttaaacttccacacaacgtcaaaactcgagaagaagatgaaagagagagattcagagagttttgaatctctctcacatcaagttctcccaaacacttcaaattcaacacacatgatccagatggccatggccaactcaggttcatctgcagccgcacaagccggtcaagaccagcctgaccggtcaaagtggctgcttgactgtcctgaaccacctagcccgtggcatgagctcaaaagacaagtcaaaggctctttcctaaccaaagccaaaaagttcaagtcacttcaaaaacagcctttcccaaaacaaatcctctctgtcctccaagccattttcccaatcttcggttggtgcagaaactataaactcaccatgttcaagaacgatctcatggctggtttaaccctcgctagcctctgcattccgcaggtatattatatacacaaaacttaaaaatactattttgatccgtttaaagatcttctgaaattcattttttttttttgtgtgtagagcattggttatgcaactcttgcaaagcttgatcctcaatatggcctatgtaagtttattttacatattgaaatgatgattttttttttccttcaaataaaattatagtttttaataacatggagcgttacacttttacagatacgagtgtggtaccaccattgatatatgcattgatggggacatcaagagagatagcaatcggaccggtggctgtagtatctcttcttatatcttcaatgttgcagaaactcatcgatccagaaacagatcccttgggatacaagaaactggtcctaaccacaaccttcttcgccgggatcttccaagcttctttcggtttattcaggttagggtttctggtggattttctgtcgcacgcagccatagttgggttcatgggtggtgcagccattg

SEQ ID NO: 21485 - DNA, 989 bp, Arabidopsis thaliana
aatggcagtgagaccagtcccatcaacaccatgtgtgacttcctctgctgtggaacgagaagagaatccagatgctcctttcgatccaaaaaaccacatctttcagctttttttcttctggaaaagatgtaaggaaagaagaaattaacacaaactctgagatttgttagggattttcttctttagtggtcgaaggatttcgcttaagttctgattttaataattcatatgtgacagaaaagtgtgattactctaattgggaaggataaataatgacgaggagagaatcctcgcttctcacgtggagatttgattagaagattgcatctccaaagtcaaattaacaaccttcaataaaatagctccaccaaaaacgtgaacaattaaagaaagacctcagatgttataacagttaccagagagctaaaaagattgaactattgcggatggaatgggccgcgcgaacgcagccccccaaggcaacaaataatgacgcaggatctcccacttggccatttggggaaaccttaggcttagcgcacctcaagtgcaggaagccactagcctaggccatgggtattcatgaacaaaagattgaactactgggaatggtaggggctgcgcgaacgcaaaccccctctgccacaaataatgacgtaggctcttcctcaagggaagaccttaagctaagcaccccagacaaagtgcaggccggtcactagcctaggccactcgtcatcttgatcacgagtagaccccgtccaggtaagtgatttgctcgttccagccacttctttatttatactcctgtgtcccagtcattatttctaggctaagcaatgtgggattattatcaattacaaacatcctgccgttcgaagttactggtatcaaacaacgtgctggtctcttacatatgagtttctgtgcctctatacacatgggctggatgctctctatctagggcccaatcaaatgtctcgtagttg

SEQ ID NO: 21486 - DNA, 879 bp, Arabidopsis thaliana
tcaactcaatctctccagattaaaaatcaacatcatcaaacatggaattttcaatccaaattcttgaaaaaaaagacaactttcgaacaagaaacagtgatgacctcaatatttattagagttgaccgaatcaaagacagaccctgatgataaaaaccttaaattccaattgtctaaacaataaaagtcaagtctttttactagatatgaaatcaattcgaagacagaatcagagaggacaaaagttctggaaattataagaaaaaaagtctacaactttagacaaccccatgtcgcaaaatggcatgaaagtgttgatagaagaaaacctgtgactatggcagtgagaccagtcccatcaacaccatgtgtgacttcctctgcagttgaacgagacgagaatccagatgctcctttcgatccaaaaaaccacatctttcagctttttttgtttctgctggagaagatgagaggaaagaagtccaataaacacaaactatgggacttgttagcgtttttctcttcttgagtggtcaagcgatttcgcttttattctgatttaaataactttatttgttcatatgtgacagaaatgtgattactttactttaatcctcatgtctcacgaggttgaggttgaagtgtagaatagtgcatctccaaagtcaaatgatggggatttattaacaactttctttttaaaggatttaacaaatgtccttaaaatagctcccaccaataacatgagttaactccaaaatcagaagatgttttaagctctttctgtttggtttcttacttacttatgtctacgagttagttcactagacaactgttttgagtcaatgagaaaacagataagtaacacttttgtttagg

SEQ ID NO: 21487 - DNA, 580 bp, Arabidopsis thaliana
tagtactatcaatagaatatgcacaacatttataatcagaaaagtctacacatgacatttgaaaatgcacagtgtcgaataagatgaagcatctggtttaacagactggtaagtctttctcgaagaaaggtgaaatcccaagtaccgggttcgattcgaagaaattgaccggtttaagttcaaagctagatgctattgttggcatcactggaaaatcttcttggcacggtacgtgatggaaccctagtgtataccacaacactatgtccttgttctcaatggaccgatctctgtttcatcacacaaacagcagttaaagataaagcttatagttaaaccaaagacaataggagcaattaagtatggtgtacctgtctgaccaaacttgtagtgtgtcttcaccacggctctggtacatcaaaagccctccaggccattgctctgaccggttataccgagtcacctatatttaaaccaaaaactttcatcgattatacatcaagtttgttgaacctgtcaaaccaaccgagcttaaaccgagttcctgattgtttgtgaaagccctctaatatgtggcgga

SEQ ID NO: 21488 - DNA, 545 bp, Arabidopsis thaliana columbia
ttccttccttaacttggatcttttcctttacattggcgatcgtgtctgagctttcaacttccaaaattatggtttttccggtaagagtcttgataaaaatctgcataccacctctctgaagaaatagctgatggatagttgatcctttctggatgttgtaatctagtagcgttcgactacccacaagcactctaccaccaaagataagtctctgtctgtccagaggaattcctaccttgtgttggatcttaacttttacattatcaatggtgtctgagctctcaacttctagagtaatggttttacaggtaggggtttcacggaaaatgaaaatgtcttgacgaatatctgcataccatggcgaatatgtgagaaaaggtgaagggttgactcattccggatgttgtaaccccaagagtacggccatcctggagttggccacgcgaaagagcagtatctgctggtccgggggtgaacctaccttgtcttgaatcttagctttaacacttttaatggtgtctgacgcaaaacttctagggtaatga

SEQ ID NO: 21489 - DNA, 1028 bp, Arabidopsis thaliana
  unsure (1)..(1028): unsure at all n locations
atattctattctactactatgttggcaaggaaaagctaggatgatatatctccttcgtggctctgaaacttcagagtgaccgtggcttttggttagtagtttccctgtgcttttggataagtcacactccttactcgtatctgtattcaaaacgtttaccagttagcattcacacatcgactaggtagaagtattacacatatcattagccatatctttgaaacatacaagataacactcaaggttcaagtatagtcttagcgtttgcatatagctgataacattagagagtactagagagagtggtagttatttatttctctataacattgttagataccacaattttaggattctaagagagaagtttagatgacagaagagagagagcagacagcttctctatctaatctgtggtcgcttgaatgatgagtttggcataggaagtgtcatctctacccttgatctttcttgattctgcatcaccacctgaccattgattcctctccgacctgatccttctccataagtactctcaccagagctcttccttcttcgctcattgtgtccagctaagcgcctcctgcaacttctcttagcttcatcaaactcttggaggtcatgaaacctgtttcaagaactcaaaaaaaccattcaaagatccagacaaaaagttttttgaagggtaaattaggttgtacgttacctactgcattgttgacaaaagcgttggttaagtcctgagagaaagacagaagatgcctttgcatgaacttcacacactttgtgtctccggtgatacagttttgcctctttcatatcagctgtgcatctatctacttggcaaaccgcaacgagccaccacgattgatgctacctctagacctctaactctatcctacctactcctcttcttcatcgtatcagtctcatatcttcttcacaaggtaagacttctttttcatgtaccttgtccttgtgacncttacctccattttggagtcttataaagatggttgtggaggagg

SEQ ID NO: 21490 - DNA, 901 bp, Arabidopsis thaliana
tatttactatttttagtatttttaatatttcaatcggcaattttttttaattgttgtactattgaacaaatgcgaaaaaatatattttaaagtactaactagtaaaatccataaatttgttgacaaaatggtgtatacatattgttagaaatacacaaaactagccaaaagaaaattcagatgagtagataattcagaaaattcatattcttctcttttaaggaccttccatagtagataatccatatttacaaacagactttacgagagaaagatttatcgaatcactggaatggctgaatgatctaattatatatggttaacaaaagttttgatgtatttcattttgttcaattgattaaaatgactctaatcaacaacaacaaaaaaataaccaagaaaacatttattagtttcatcttctttcgttgtgatacttgtgttgatatataccacatacaaaactagcttgccaattctagatcgctgtatgtcagaataacgttcatttgtaattcaacgctttgaatggttcacattagttagttttacgtacgatcaataaaacaaattgcataaatagcattatcaatagagaaaatgtcatgatacacttaacgataggtgcataacaaaaccttaccacactatactagtttcccacagataaaacaacaaataacgctgctaaaaaggcagctttagaaagagtagaaaatgggataccatattttcccttctcaaacataccctttagaaatggaaggaacaaaataaccaccaaaatacagcacaggcttctgccaaacccgaaccacctcctccgcgactttgtagacccaccaaacaaccggctagagcggctagattcactaacacaatgaatgtgcccggctagagc

SEQ ID NO: 21491 - DNA, 540 bp, Arabidopsis thaliana
gatcatcaaatgattacaaaatagatttgtacaccaactttttcccgcttgctttgtctaaccagaagctcttacactttcaaaataagaaagagctaaaagactatcagagtatttcaatctctagaactaaacgctttgttttggcctcacaaacgacaaaccgaaaactcctcgaggattttcgcaggacggatttcaattcctagaatgaccaaaccacgcttctgctgggcgtatttaccctctacagtacttatctcaacctcatcactactcattaatcctccttcattatagaattccccaatctctgtctccatccacccatcttctctcaactctggtttcgccaccactttcctctttcgagcctgccccttcccatgcgtatcaaagcatatgaaacttctaaaagactcctctcccactatcccaactacagcctctatagacacacccttaaagccacaccaattatccgctttcttgaacacaatgtagaccgagtaacgagttcttagagaaaggacacgagta

SEQ ID NO: 21492 - DNA, 920 bp, Arabidopsis thaliana
ctaaagttaaagctaacccgttgctactgaaacgacaagcgacagatgactgaatggtggttaaaacgtcatacaggaatcctctgaaagcggaccgtttcgttcacgggcttgaaaaagcgcccaatgtattccaggcttatctaacacgctgataaacaagaggacggaatatgaacaagaatatggcaggaattctgagtgcagcggcggtattaaccatgctggcgggttgtacggcttatgatcgtaccaaagaccagtttgtacagcctgtggtgaaagacgtcaaaaaaggcatgagccgggcgcaggttgcacaaattgcgggtaaaccttcgtctgaagtgagcatgatccatgctcgcggtacttgccagacctacatcctgggtcaacgtgatggtaaagcagaaacctactttgtcgcgttagatgataccggacatgtcatcaactccggttatcagacctgtgctgaatacgacactgatccacaggctgcgaagtaatcaattcgtctgaaagcttgagtaacaacggaaaccggccattgcgccggttttttttggcctgagttcttaattatcttcgcgaattatttgcccgaaatgtgaagagggtcataaccacaggtcaaggagaaacaatttataaggtcaaagaaatactattgctcaggtctataccgtatactcctttcagccacaaaaaaagtcatgttggtttcgcaagttacccagagcatggaagcaggttaaggcttgcggagtgtctggctgacagataatcgtcgatgagggcagttttatggaaaagaaacacatttatctgttttgttctgcgggcatgtctacctctttactggtatcaaaaatgcgcgcacaggcagaaaaatatgaagttccggtcattattga

SEQ ID NO: 21493 - DNA, 2287 bp, Arabidopsis thaliana
tggtatttcaagactgattgaacctagatgattctaggttattttaagtgtttggtctataactttccattggaacatttgcttcaatgttttacttttgggcacacttgggatttatgagccaaactgaaactctttgatcaagttgagttcttatacccatataggacatgtatggatcactgatgaaggttttgtggatgataggaatgcgaaaaaaacttctctttcagctgaggatcacaagcagaagttgaaacgcagtgagtttgttcgagagctattgagctctacgattcttgatgacagcttataatggagtatcgcttctggtaacttgtcagcaatgaggaaactccatgttctgtctcagcaggacaaagtacgaaattattgtttgtggggagcaaataaaggagagagattatgaatgagtgtaacctaagaacacattagcttctgcggttaacgcccaattgcttgtaggtcatgagaaaaaaaacaaaaatgtatgtatttcacgtattcgcgttcaattattcgtttccagttgtttactaggataagaatgaccatatatgttgaaaatttgtcatggaaacggcttcagattttgtagaggcacattcttctgcaatcagatttatagctttattatagtttctgaagctcgttagtcgttaagctggggtatccccaaactaatcaacaacgagacaaaattacaccatttactgattgtgattatcgaaaaacttagacactgaaaagatatggtaggggctgcgcgaacgcaaacccccgctgccacaaataatgacgtaggctctagctctagggaagaccttaagcatagcaccctcccggtatgtgcaatgggagtcactagcctaggccactcgtcttcttgatcgcgagttgaccccgtccaggtaagtgatttgctcaaagtcatgactctcttatttataccctgttcccggagcttctcttgtttcttattaacgatgtgggactttttgctaaactccacattttcgtcgttctaactttttgaacatgcacagcgtgtcgtttttatattcgctttctgaatagcttgtcggaaaggtttaatgaaacgctttagttagattctctactgggccggtctccttggtggcccaaagtcaattatttactcagataatatcacgaatcctacgaccctcatggactgggaaatccgccacgtcacagaagacgcttgttttaccacctgcgaggtaggtttcacaaaaaggtttcgtttcttgttaccaagttccacactttccgccgttctcactttgtaaaagtgcacaagtccttttagttttgtttttctgaactgagtgacgggtaggcttacgctaatttatggtgggccggtggcaaactcaattactactcggataaaggccacagttcgtatccaacttgataagctttttcatatataattcaactgttcttgtctttgttgcacacagtactgcatagtagtaacagtcgaacataaaaagttaaacttcttttttaatgaaaattaatcgcacttgtatcatcatgtacaatgctaaaagtaatgattgaggatcttaacaaaagaaattgaattttctaacaaatctagacaattgaagcaagtgggtttagtggagccctagactcaaccaatggggttgtcttgtgtctagaatcatcttaactacatcttctacaaatgaatcaaaacaagaatagcaacaccctttcatcaggctactaccactactgctactgctgctgctgccaggtgtcatatgatggtgagtacacgtcactggtggcggaacaagatggacttcactgctctcgtgttcaagcccacaagctgccagtatcgtgtgtattgagcacgtggaaatctcgtcgaaagtggtttgacctgaataaagcagaggaagagtacccaaaacactacaatcagagggcagacaagagttgaatctataatgtaactggaaactggaaacaagactataacgggttaaaccaagagcgtgaagagagaattggattatgtgtacctaagtcgttttgactggacaagtttttgagatgggctttaactctttcttgcagtcgttctcctgccatggaagacattgtgtttggcatgtggctgtgtagacgttgttgattactaaccaagggatcccctgagccagtccatgatggaacctaaatcgataggtcgctcccaagaaatgtattattagacaac

SEQ ID NO: 21494 - DNA, 1617 bp, Arabidopsis thaliana
tccaaaatgcacatactaaaaaataatatagttctcactattaatatccggctcaaagaagtgtttgaggcaataggcaaaatgtacacactactctttcatattctctgaacaaattcttatatcaatcaatcaacaaatctatacaactctcttaattctcatatttatggatatgggctagaaatataaggttgcctcttcttcttctttttttggcataacgttttgggggataatttagtattaagacttcaatgcaaatacattgcttaaagttctactagatgttttgtcttcgtagaggtcaggagatcaacaaagacagaaagaacaatagtagtcaatacgaaaatatattgtgttgtcactcttccgattctgaatttattctgtggtcatcaatattgaagtaacaacaactaaacaactaacgcagacattgactgggcctagaacatccggcccatgtgtacaacaaaaaaaactcatgtagtacgttgttggaaaccaggagcttaaaaaacgacgatgtgttgacaaaaatagtcccacatcgcttagatccaaaataatgacaaggggacgcagagtatatatagagaagcagacgtttcgagcaaattacttacctggacggggtctactcgcgatcaacaagacgagtggcctaggctagtgaccgcattgcacataccgttggggtgctatgcctaaggtcttcccttgaggaggatctacgtcattatttgtggcagaagcggtttgcgttcgcgcagcccctaccattcaattagtctcaatctgttatgccttaggttagaaacctgttttcaatatggacaaaacagaaatatcaggaactcaagtgacgacgtgtacattatattgtttggtacaccaaaaagtcccacatcggaagcatatattggcttcataggttttgcttggctataaattaagaggctctcactctgtagaaagtcatctttgcgcttggggcaatgacgcagctaatgaggtcttaaccgaggcgcgtctattgctggttgaaaactatttccaaaccccctcctaggcctaagcttgtcttgggccttcgagaatttctggaagggctccttcggggtaaagccctacaattccctagttcaatatttagtttgcaattatcaaacacttctttttagtaagacataatctgacctcagttatttttagaagaaataccacgatccacatgtatttgcattaaaaagaaacctgttaatgtatacttccctttcgttattattgaatcaaagaacatcggttatgatgatataaactataaatggtatgttctgagacaagaacacaaaaaactcagcgcctgtgaaaagtataatgaacaaaacctcaagtacaagaggaatcacagcaagaattgcaaagagctaaccattaaaaactacttgtgcttgggtttgatgagttcaatgcctcccatgaaaggcctcaggggctcagggatcacacagatcatcttcttgctggtaattctccagcaacacaccatcatccttgggacggcacacgcagtcgcgtttagagtgtggacaacttagtggctggaag

SEQ ID NO: 21495 - DNA, 480 bp, Arabidopsis thaliana columbia
gtgtggtcatctggaggagatcccacatctaacaagtgtcgtgctgagcttttagacaccggaaatcttgtcgtcgtagataatgttactggaaattatttgtggcaaagttttgagcatcttggtgatacaatgctacctcttacatctctcatgtacgatattcctaacaacaagaaacgtgtgctgacttcttggaagagtgagaccgatccatcgcctggggagtttgtagctgagattacaccacaagtaccctcgcaaggccttataaggaaaggctcgtcaccttattggagaagcggtccatgggcgggaacaaggttcactgggataccagaaatggatgcatcgtatgtgaatccattgggaatggtccaagatgaagtcaacggcacaggagttttcgctttttgtgttctgagaaatttcaatttgtcatacatcaagctaacgccagaaggatcattgaggattaca

SEQ ID NO: 21496 - DNA, 474 bp, Arabidopsis thaliana columbia
ttgtttatatcgaatcttttaggtactttacacaatcctttgaaataaaaatgagttaattggttattttggctaaaacttggactgttttgtaaatttgcctttgaagtcttcataattaacgacaagcttcttccctcgacagcaaaatctgaatactttcaatctaaatggaaggaaaatgaacggctcagattattccgagcggatcttcgagatgacggcagctttgacgacgccgttaagggttgtgacggcgtcttccatgtcgccgcttccatggagtttgatatctcatcagatcacgttaatctcggtacgaccttttcgttgcaccggtcctttttttttgagcacaacacctaattaaaccgatatcaaccggatcaaaccgttggtattagaagttaccaataaaaaccgggttttgttggattgaactgcagagagttatgtccagagcaaagtcataga

SEQ ID NO: 21497 - DNA, 505 bp, Arabidopsis thaliana columbia
tcgttagcttgtcgttaaaccagctatatttcaatctttatgttgactcaatggttgctgctacggatattgatcttagcactcttgtggataacactttggctggtgcatattcgatggactttgtcacgcagacgccaaagggtagtaataaagtccgtgtgagcatcggtccgtcgactgttcacaccgattatcccaacgcgattgtgaatggattggagattatgaagatgaataactctaagggtcagttaagcactgggacatttgtgcctggtagtagttcaagcagtaagagtaatctcgggttgattgtaggttcagccattggttcgctgctcgcggtagtcttcttgggaagttgccctgtgttgtataagaagcggaaacgtggccaagacggtcattcaaagacttggatgccgttttcgataaatggaacttcgatgggaagcaaatactccaatggaactacgcttacaagtataactaccaatgccaa

SEQ ID NO: 21498 - DNA, 636 bp, Arabidopsis thaliana columbia
  unsure (1)..(636): unsure at all n locations
cctacaattaatttccgggaaaaacactaatgcgtagattgattcgatttttattttcttcaaatatgaattagaggagttcatttgtaacgcctttttggtattggttttccgttaataatagctgaaaatcatttgtaacgcctttgacgaggatgaaaagatatttttagggctttgtgggagcaacaagttatatcatctagtaatagaaaagcaaaatctatagtccaacgaaaacaaaatgacatttgccgacaatatcaatctttatcataagaaagtaccagtgcgaatggaggtggcttgaggacgtagtttgcggtgacagcacttgaagcagccattctttgtaattgaagctgcacatttcagacaaaacatagcattgaattgattatctatttgcccaaaaaaatgaatcaatatccttacaaagacacatgaaaatgtatacatgcgtttatgttgttgggagccaaacaaatttctaggtgaaagagtaagagaccagagaaactcgaacatgaactaagatgtggatgagagatagaatcagtcctcaagtttcaaggacgagtgaagtgaggagacncacgccagtggaatctgtgtgntttgagttttatggttgga

SEQ ID NO: 21499 - DNA, 557 bp, Arabidopsis thaliana columbia
ttctgcttctgcttccatttctgaagcttcttgctgaaaacagaggccgccgaaaagaaactcccggcgaaatctttcaccgacggtttctttgtttgtgagtagagatccatgtaatccttcattggcttcaattcctcttcttcctcaccaatttcgctgcttttttcctcaactatctcgccgggatctttctcaccgttttcttcatcctcctcaatttcagcttcttcagtcacctctaaaactatctcactcacgctagactccctagcctcctcctcgattttatcgacggaggcagcttcattgatgggaaggtttctttcgtcgtcacgaagtctgacgtcacaagaccgacgctgtggctcaaacccaccggaaaatccttcgttgttctttgcggaaaaggactttgtacgtcggagctccgggaagaaaccgggtctgacccgaccgtttccgttggagttgttggtacactagaggagggcttgaagagagcttttaacgaaacagcggagatagacggaggtttccgggaagaagaagacggt

SEQ ID NO: 21500 - DNA, 685 bp, Arabidopsis thaliana columbia
  unsure (1)..(685): unsure at all n locations
atccccgtgtatttcaaagcaacagatccattcaatgaacgatggcagactgcttggactataactgccttctgggatgttatcgcattcttgttgctatgtattatttgctatctctggaccccctcgcagaactcccaaaggtatgttacatcaacttaaaaggttttgatacctctcgggcataccaacaaataagcatggttttgtggaaacggtttcagctgagcatgttgtgggaagtcttggctacatgctagtggttcttatgtagtggtccaattttggtgttcctgggtgtgatagggatgctaatatgaaactaatgatggacagatatgcatattcgggagacgtggatgaagaaaacgaggaagctcaatctctgacaggggggaagcaagatggtgatattagcttagttaagcaagagaagaatgcggagtcggacagggaagaagatgttgaagaagataaaagagagtgaggagagtcagtatagaaacgacgtggcatctgtgtttgacaagagttgcgaaaatataatatcacaagaggtcactatatacacaaagcacgacgtaatcatatatatgatgtactaaaggatagtactgtgtgtntgtatttgttgtcttttaatacagatcacatttttgagcactctacccatgctgagtgtgag

SEQ ID NO: 21501 - DNA, 612 bp, Arabidopsis thaliana columbia
gatataattccacagaaaaccaaaaaaaatcagcccagatccaacccctcattgttgggtcacaaaacccatagagtaccaccatcgtcgtcgccttcgagagctttttctttttttttctttttacctttaaattttcttccttctctaccaaacttttcaaagtacgaaaagccgatgcaaatccaattattccaggcctcacaatatctcttctcttggtaaaactcctcatcatggacaaggtctggtgatgagcgtatataaaaatggtaaacgctttggccattttaactatttcgtcagacatagcaagtttagaaataccttctaccatcagatttattgtgtgagttgcacaaaaagtccaaaatatggtgggtcttacctcctttaacaactttgcagcagttatgttgttagtggcattgttcgttactacttgaacaacatgatctccacctaaatttttgatgcagtactcattgacatatgcaaagatatattcacccgtatgggaatcatcaaagcaatctttagaagagagaaacattgtaccttctttgcagttgatcacaaattgatgattgacttctttttctaccgaccaag

SEQ ID NO: 21502 - DNA, 549 bp, Arabidopsis thaliana columbia
ttacatttcaaaacatatatttacaaatataataatggtgatattatgcatgcaacaagaaatgtttggcgagtgctaagaaggttgacaagaaaaaacacaaacaaaagatcatagacctttttcgttgtcatcattttgctcttgtaatgattttttggtgatgatttataaattctgcttcaatgccatgttccaaaatcttcaaactgaagcaaatacattctttattctacaacacgaaaatgtctcgccgatgcaacaaatatgaaaaataaaacaaaactcgaaatgatcagaagaaaaatgttatcagcttgcgatctagttagctgctgcagcagctgtgtttgtttgcaaatgcgacacccttgtcaatgctagctttcaattctaccttaagagcttctagtgctttctgctcatactcagtcaatccctgaaggtctgactcaatcacagcttcaagaccgttcttccctatcttaacccgtgatgcaaagaaaggaagatcagtcagagtcgactccacaaacgagcactcgtaga

SEQ ID NO: 21503 - DNA, 2162 bp, Arabidopsis thaliana columbia
gacatttccctctatggaaataaggtgaaggacgcattactaagggctcatatgatataacgggtaagaaaaaaacgataattactaacctgtgagttatttggtcaatgattaaaccctaagcttgagagggtattctcctcatctcttttgtactttgggagcaaaaccctgttgagactccctttggaaaagatcttgtttactataactcttgctagtattgatttcttattcagactatgatttgtgtttctttgatcatatctgagtaatccacttgttaggtttagggtttctcattagggattcatatggtttaatagatcgccccctgctaggttatctgtagaattcttcatctttaattgttcttaatgctagatctagattgatcacctagaacttgaatccagacaatagatatgcagacaatagatatgccctccataggtatctgtagttggatctgttatttgatgaggctggtttataggtgtgtaataagaatcgtcctatctactaaggtgaacaatcgaactcgttaagaatgcatatttaggttaataatctctcggcttctccggttattcatagctatagatatagggagttttgcggcacgcccacgggttattccatgattagagtttgagtttaagaatggttcgataaaaacctagctattattagatctactaaccaatagtttccttagaataccctaagcctgacgtttttacattcttgtcttacaacctcacaatctactattgcttccttttgtttctttttattttcattactatcttacttagcttaattcaaaaccttggtctattgtgtgacccgagagctttgtggaattcgacccttaagtgctacaatcgatctcttatttgagagagtggtcttaaggcaattagacctatatccaaatttggcgccgttgccgaagttctctacgattcaccattagattaggattagaaatttgtctaagattatatttttatttttctttttatttacttagtctttctcttttccttttcttgtgtgttttaggtatttgtctaatcacagaactaggaccaagcgagaaacatgaacgagagtaagattgctgggatcatggctaagcttaacgcggtctacaatcaacttgtggaggttgtcgattatgttagtagcagaggttttccgaatcagagatttgatcaccaacaaggctacagaggttcctatgggaatggtccaactagctacactcagaattctcagttccagcaaccgcttcagaatagcaatagtttcagcttcagaaggaactatgatcttgcttcttaccaagccccccccccctccacccacacctaaaagcaagatagaatcactgctggaacagattctggaaggtcaacagaggatcttagagagacctatccctagatggaatgagagcagcctcactacttctcggcattctacttcaatggaaagtgagtatgagttagtgaagattgaggagagtgacgattttgcagttgcagaggcagtgtcgatcgacaccatcgcatatatacgagacatcaggctgtgacgaagtagaatcgaccaggctggacattaatctccagaatcgctcgacacacattgatagtgtcgaccgacaccacctgggtcaaaatgtgtcatgtaaacctataaatacagtttatatatcgaataaaagtgtttggtttttgttttacaaaaacagagaaatatagagtgatatatcccgatttttactgtttttaactatgttttaggtataggttttagagtctatttgttatttctagagtcttttctagtccttttcaggtctttacatgtttgggatacatttggagattatggagcattctggagcaaaaaagacaacttaagctgcagaaacaatccgaagacgaaaaggcacgtaggtgtcgaacgacatcacccctggtgtcgagcgacaccaatacctgacaaaaatttgaagacgcaacttattaatgttttgcagatttccaaattcggccaagaactttctcctatttctaaagaaggcccatcacgtgttgtaggtcatatatatcgctctccaggttattgtttagagctaagcttggaga

SEQ ID NO: 21504 - DNA, 2057 bp, Arabidopsis thaliana
gaacagatggtacttccttacttctgaaaacacaacgttcattgactctgcggagttgctagtatctatgttgtacttgtctccctaaaaatagcacctagcccatttctcaatcccaattgcccgatccagataggtggttacattaggatgctttctcctaaattctgcatacctagtgttgaacttagtcgcagtataaatatgagctaattccctaaatttggccatacctgcttctttgtcacctgccagcattttcttaatgttttgagacaaatgccatacacaatgtccatgtgatgccttcgggaacacatccgcgactcccttgatgatgcttccatgtctgtcgcttatgaaaaccaatttcgggtcatccggtataatggaaatcaattttctgaaaaaccagttccaactagcatgattctcgctatcaattacaccaaacgcaatggggtaatgaagatgattaggatcctgagatgttgcaataactaacatccctccatatatggttttcagaaaagttgcatcgatcactataactttcctcattgccttaaatccttcaatgcttgcgcccaaagcgatgaataagaacttaaacctgtcatctgcatccaattccacttccgttattgtcccatgattcagagaccttaaaatgtgcagataagcaaacaataacttgtagctagtttcagggctcccacgcacatcactaacatgttttttttttcctcttaaagctgtggagtatgaacaatccaaaccatgtcttcctttaacaatactcattttttgttaaggtttcagagtattaagaggacccggatagtcctcatgcaacacatctgctactaatcgcggtgtggctttttgtttttcatatctagttgcttccggacatcaagagcatttatgtatttgtgtgtgtttcttcacaaaccaaaaatctgtgctcgaagttttggtaactcttaaataccaatcacaacccaatgatgtttgactgcattctaacataagacggcccgggtcagatttaatagttttcacaccaaacacttcctctttcgaagctctattaatcaaatcccatactgcctctttagaacgaaattcttgacctactaaatcaccaataccatcttcccattctttgacaacggcagccacactttcttgtaccggacctgcaagacgaacatatttgatatgtctataatatgcatgttttcaatgtccattcatcatcgttttgagtccagtttcgtatcattcatcactgttttatatcatttctcatcattcttgcatactttgcatgattaggatagctttgcatacatattgcatttctgagttgttttcaggtgatttggagctgtttgcaagcaaattggaagaaacgagccagaaccagaagacatactcgacccccaggtcgagtgactttggagccattcttcccacatactcgacccccaggtcgagtgactttgtagccattcttcccatccactcgaccaccgggtcgagtaacctcagctcaggcgactcgatgacactactcgaccccctggtcgagtatcacttcgccacaccacctgacaacactcgaccaatcactctaccaagttactcgaccccctggtcgagtatcatcactcaccaccatcagcatcactcgaccggacactcgatcacgtcttcacagtctactcaaatccgcactcaaccagacaagctgagcacaaggaggagaagaggagaagacaaagtgtttggaagcgcctggacctccatcggatcacgaagtccatctcggcccattatctctctatgggccgagcgattaggttattggcccgtctactatcattttatttcgttttgtataaatagatgtcttagggttctgtcctgggacatccagtcgacattgaatttttccttcagttttattttctgttttactctgttgcgccgtttttgcttctgcaacctgtaattcgagatttttcaagttattcagatccgcatttgat

SEQ ID NO: 21505 - DNA, 567 bp, Arabidopsis thaliana columbia
gatctcgtaaatagtcgcaaaagacacagagatctcctgttactatctggttaattccctccatagctccagtcgccgagaacgaccaacatgcccctataaataatcatcatcaactcaaataatcaactatggattcatctgagaacaaatttactatttctgagaccaaattcctacattgcctactctatgaaacaataactttcataaaagatacaatgataattgcttctagactttcctaaaaagttcaatcactatattactcgcatactttctcttattatactcctaaaaaggacaaaaagagatgcaaaattagattagtgtgacaaactacgtcatgattggtcttcttgtagcatacgtactaaataaccacagaagatgaatctgcaccatcaaagattctaaagtttaagactttctccgatctaaatccaatcttaaagttcttgaatcacatcctaagtcgctgaactataaactccaatcaaatctgaaattttgatgaagaagaaagttaaatcaaataccgcagcttccttgatctttgacattagt

SEQ ID NO: 21506 - DNA, 1157 bp, Arabidopsis thaliana
gcttttgcgattgaacccaaattgcttatcacaaaactcgccgactgatcatctttaagactcagatacgccagccgaggagcatcaatgataaccttccactcgtcgatatcatcaataaaccaaccgttggaactatcaagaacgagtttgagactgttaagtgacctagagcgcacccgtaaaatcttctcggtgataatatctacaattctaacaacggttaaatcttcaagaaccgggcatgatgagatgaagttctccagagtctcaagacaataatatatattctcttctagatgcatcaccttgagatttggcaaagatacaaactcgtaacgatgcagcgtcacaaaatgaagtctcaatgaaaccaaagtctcacttaagtaaagggttagatacactgcctcaaaatgaaaactgaagcgacagtcgacttcaagatgttggattctacgattaacagcgtcttggatccacggcatgattgtacacatatcaacatcatccctctcaactgaaagcttgaacttgtgtaagcatgaatccttggagaattcaagaaaccgagaggcgaaactgacgaatgtagtggcatcatcgaaagcatcaatatctatatccaagacaggggttgaaagccagatacttctccatctggttgacaaaatgctagtagtaacagcattctttgtaggaagatttgagagtatctgacacagcaactcatcaggtaggctgcttatcctatctcctcggttgctcatttgatttctcttttgggaaaacactcaagacaagttatctgcatcacaaacaacaaagcgaaaaccgaatgttttaaaatgatgatccatggtttacatatagataccattatttcatgattcagctattccgctatttatcggacataccaatgctcaaaagtggaacgttagagagagagagagagaaataccaaatcaccatcgattcttcgctgccgaagaaaccaatagcggcgaatgtcgccgcccccacagattcgctacaaagagcctatagattctctctgcttaagaaacccttcttttacaatggatttagatggaaagataagataaaaatctaaactagagatgggagttgactgaataggatttgtgaaataa

SEQ ID NO: 21507 - DNA, 670 bp, Arabidopsis thaliana
tcccctataggtgtactaaactcctcttcatcagacaaagaagctattgtggcattgcctggactagattttgcaccagaactgttcccactagctccaaagacaaaacatttatccccaggtgattggccagcatctctatcattcccactgttcatatgaagactacctacagaaacaaactaaaccaatcagctcacaaaatatcgaaacccggatcttcaatgaaatcaaattcggcacaaatgcaacaaaaaaaaatacctttacccggcggcgcaaacggattgaaacctgagaggatctcgccggaaaaagaaggttttttcacctctcttccgttcttcctcaatttcacgagcctcggcttgtgtcgagtcttcgtggtttgtcctgaaccagctccaaatccgaaggagaacgaagagcccatggttcgttgatcgtgagagtgaacactctccggaaaaaatgcagagaaattttccatagggtttagaacagaagagactttttcaaccggagacccaatctccaccgccgcaggagacatccaaaaattggattctttcaaaataaaaatcaaaaatcgaaactttagggcttaaggaaaggaatctctcggggaaacgaatctggtcttgcgtgttgaggtgaagtaagaggaatg

SEQ ID NO: 21508 - DNA, 2556 bp, Arabidopsis thaliana columbia
  unsure (1)..(2556): unsure at all n locations
atcccccgatcaaccccgagcttcatcttttgaccctcgggaagtgatctccgagttgagagagccaaggagtaggtagagacgagctttcacacgctcgaccggacagaacgagcaacaccctcccgcctcaacttcagcccctgccaatacccaagagagtatggatgactatgtctccatctacttcacttgaaaactgaggtaacaccacctctccatagtatataccatagcatctttttatttttctttgtgtgttttgtgttttggtcttgaattctctttcagatttttattacacaagggactctgtaatttaagtttgggggaggcttcaagacaggtttaacattgtgttctattttcttatttcaaattttgcatcatttaaggcatagaaaaactataaaaatttgaaaaattttcagaaaattatttcacaaaaaaagagtgtcatgtagattccatatcattttaggattgtatatagagtgtttgcatttaggattgctcatttgcataggggatgatgatgatttcaaccgataagcatgttttgattcaatgaactaagttcaatgcccaagttgttagttctctgctgcataaccgattgtatctctgaagtatgactgcatcctgctttgaatttgtaacttgactatactactttgattcgaaactcgcttatctgatgccattccctatctactagaacctaaattgaatttgtaattatcatgtctatgcatggtttgtgaactcatggctaccatatacatacttggattatcttattcacttcaccaccctctgttaatccaaatacctgactctcatttttagagcagtttcccatacccttagcctagtcttattttaagccaaatatcatttgtgtgtgattgtggggtcttttttgattgagcttggtataacgtgttaggtatgagccgacaagagcagtcttccatgtagacctagctcacgctttttgggttagctaggactaggtggagacttgtatttgggattgggattgtttatggattgaatggaaatgagaatgagaatgaaaagaaaagaaaaaaaagagagtaagagtttagagttctaaagggggatacaaaagtgttggtctagtaaagggtttggaattcaaagaagttagacattgtgattcaaagaaaagggtaaaacgccctatttgctaagattagaagaaaagccttaagtttgtcaaagtataaaaccaaacccgctagactcttaaatcgtttcaaagagaaccccttagaacttgaaccaaaaagagagaaagaatgagaaaatgggtagagttaggacatctatgggactgggatcatcttctgagctatcatactatatcattgggtagatgggagtctgttcttgtatgtgtccatttgcttttacctttagcattctactgaagctcaatcttttctctgagagtcccctgttactcgaccaaaccactagagggacaatttttgtctcttagcctaagcccgaaaccaagtgagttcataaccattgcattgcttgatccactgtttgtgtttaatgaatgttaaagggaattgattgatgggaatgcttgaatatattaaggcaagttgttaggttgcattgtgacgagtatggctaacgtttttaagtaagggtctatcatcttgcaatctagaattagctacctggacattgagcttaccccgttttatatgcatgcttcggtctttgaatccccaccttcaaacctctccttcaacttaagattttttgtttgcttgagggcaagcaagagataagtttgggggaattgataacactgtattttactcattttaggtgtatgtttatcatcatttagctttgcatttgctcattgtatcatgtcattttgcaccattttagcttgttttgcatacttaggcatctaggatcatcttgcattcgcattgcatgttttggtgtgttttcaggtgcaaaaggagcttaaaaagactctactcgatccattcactcgatccaggcagctactgaagaggcatcattctactcgacctctttactcgatccaggatgccacaaaggaggctgcagtttactcgaccctcctactcgatcaaggcaacctcagacgaagcagtagattcaactactcgcccctcctactcgatccactactcgatccatttactcgaccaagggtgaccatctctacaagacttgttgagctatcaaagcgtcttcggatcctcctcattccccactcaaccagacatctaagcatacagataggagaggatgaagcatctactcgaccaattgatcactcggcgcataaacacaaaggcgcagactttgcagcacccctttactcgatcccaaggtcaagtattcaccagaccgcctcaagtctcttgtcttctatggaatctagggtttcaacattttagtataaatagaccactttgggatttgtcaagagatctatgctttatctttcggtttntctttgtgtttatg

SEQ ID NO: 21509 - DNA, 788 bp, Arabidopsis thaliana
cgatcttctcccttcgtctaggaaacaaactcgttttcgtagtctcttcacactcaatcgtcgaagaatgcttcacgaaaaacgacgtcgttctcgcgaaccgtccaaagtcaattgcttcttaacatatctcgtacaattacgcatctatggtatcagctccgtatagtgagcattggaggaatctccgacgtattggcgccgtcgagattttctccaatcatcggcttaatagcttttacactatccgccgcgacgagatccggcgacttatcgctcgtctctctcggtctccaaacgcttcactcgtaagtgagcttaattactaatttaggatataaatttagggacttaatcattaatttaggataaatttagtccttaatcattaatttaggataaaaagttaggccataatcatcattagtataggataaggttaggccttaatcactaatttagaatacttcatttgtaattaggctaaattaccaatttaggataatttgtacaactaggatatgtatatttatttaggccataatcactaatttagaaatcttcacttataattgagttaaatacttaaattactatattttaggataatgtgtaaccagctacaaatttatgaattatgatgaagaaattgtttattggttgacataataatagtaatctctagttcagtctctgtttatcggtaaaagtttttttgagttgtgtcactgaatttgcaggaatttgcaaaggttgagatgaattcaatgttatctaacttagaattc

SEQ ID NO: 21510 - DNA, 846 bp, Arabidopsis thaliana
gtatatctccagtgaagttattgtagctgaggtctaaagcactttgaagatcctgaagctgtccaatctcaactgggatttctcctgttaagctgtttcttgataaccgaagctcatacagcttgctgagctttcccatagcttgaggaagtgaacctgaaaactggttcttatcaaggttaaggacattgagagctcccaagttaccaatctcttgtggaatcgacccattaagcgaatttccatcaagagacaacacaagcagctttgtacagttgaacagttcagtaggtaaagactcaacaaactgattcgaagaaagcttgagctctcctaactgtgaaagttttccaagccatggaggtataggacctgatagaaaattgttattgagatcgatgtgtgtcagtttcttgcacaagacgagctgtagcggaatggttcctgtgagagcgttgcttgacatatctaacaaggacagctcgcggattttccccaacgtccaagggatttttcctgtcaattgattcttgcctaacctgagacgatcaagattttgagagtttcctagctccagggggatttcatcttcaaacccgttgttggtgacatcgaatgagagatatgagctcgaaccacataatggatgaatcgtaccattgagcctgttgtgagagagattgattctggtgaggttctcagactgataagtgaatcaggaagatttccttgaagagaattgttgtaaagcatcaactgttccaagccctttaagaatccgatagatgaaggaattgatccgagagctgattatcgccaaatcaagatgttcagttgatgacagtt

SEQ ID NO: 21511 - DNA, 357 bp, Arabidopsis thaliana columbia
ctcaaaacgataatggtaaagaaaagattgcattaccttaagtctttttctcctaaaatcgtatcatgcggttaacttttcccccaagtaaaaaaactgtattcgtcgagcaacccaaaacttgtcaagtaaagacgccatgaatagacggaagaacgatttcttggttcgccctaaaagaattcgatgctacacacaattatccacgcttcccatcgatctcatcattgagatactctcaagattacctatgaattccatcgcaatatgtcgtctcgtgtcgaagcaatgggcttccatacttcaaagttcagattttacggaatcgttcctcataaagtcaccgcctcgaccacg

SEQ ID NO: 21512 - DNA, 988 bp, Arabidopsis thaliana
agcaaaatcacatttaatgtgatttgtgatatcatatagtcatgtcatgtgggtccaaatatccaagactggtcttaattaacaaatgtgacgtccaactacatatcttggattgaaaaattaactgttgttgaaaattttcttccgcagccttacttgccgagcgagacaccgtccggtctaagaacattaagggagaaagaattggagaatctaagaggaaatggtaaaggagaaagaaaattatcagacagaatctacgattatgatgtgtacaacgacataggaaatccggacatatcacgtgaactagcccgtcccacacttggtggccgtgaatttccttaccctagacgctgtcgaaccggccggtcttcaaccgacaccgatatgatgtctgagaggcgggtggagaaaccattaccgatgtatgtgccaagagatgagcagttcgaggagtctaagcagaacacttttgctgcatgtagacttaaggcggttttacataaccttataccttcactaaaagctagcattttggctgacgacttcgctaactttggtgagatcgatagtctttacaaagaaggcttgcttctcaagttagggtttcaagatgatatgttcaagaaattccctttaccgaagatcgtcactaccctccaaaaatcaagcgagggcttgcttagatacgacactcctaaaatagtttcaagtaagtacattaattatttcttacagcttttaatcttttgacagctattacaacatttaattatgtcactaattcgtttatctgaaaaatatttcgaaagattaacacatgtgccatcacatgcccgtttatggaccaatccttaaaaaggaatcctaatgattctcattacctttattttatggtttgctatagttctatcacttccgtgcgtatttggaactacagtgaaagttcgctttagattcccttcaacaaggaaatatgatcacg

SEQ ID NO: 21513 - DNA, 2472 bp, Arabidopsis thaliana
cgaaatggagcttcaaagtggctaggaattggcagctctcagttttgtatccttcatacttgtaggagaagaaggtctccagcttggccatctccatgaggtagtcaacatctctacatatcctcaaagcttgcatggtaggtctatggggatatcttgtcccctcaaaactcagctccatgagatattggtagtgctcttctatggtaggttctttctttctcctcatggtgttccttcttctacttctaggaactatcgggacctctacatcaacttgcacatcttcctcagatgcttccttctctatctcaggcacttcttcttctgcaactggctcggactcccagaccctcttgcctcttgctatttcctcttgagcagccgcagaacgacccacagaggactccggggccatactcggccattgtactcggcctgtcatccgagtaaaaccaggactcacagcttcctgattctttgactgattcttctcattaatcatctcaaaccctcttgccacggtgatatgtctataatttgcatgttttcagtgtctattcatcatcactttgagtctagtttcgtatcattcatcactgttttatatcatttctcatcattcttgcacactttgcatgattaggatagctttgcatacatattgcatttctgagttgttttcaggtgatttggagctgtttgcgagcaaattggaagaaacgagccagaaccagaagacatactcgacccccaggccgagtgactttggagccattcttcccacatactcgacccccaggtcgagtgactttggagccattcttcccgtccactcgaccaccaggtcgagtaacctcagctcaggccactcgacgacattactcgacccccggtcgagtaccgcttcgccacaccacctgaccacactcgaccattcactctaccacgttactcgaccccctggtcgagtatcatcactcaccaccatcaccatcactcgaccggacactcgatcacgtcttcacagtccactcaaatccgcactcaaccagacaagctgagcacaaggaagaaaagaagagaagacaaagtgtttggaagcggcctggacctccatcggatcacgaagcccatctcggcccattatcactctatgggccgggcgattaggttattggcccgtctactatcattttatttcgtttggtataaatagatgttttagggttctgtcctgaaacatctagtcgacattgcgtttttgcttcagttttattttcagttttactctgctacgccgcttttgcttctgcaacctgtagttcgcgatttttccaagttattgagattccgcgtttgatttcattagtcatcttgtttctctactctttatctctttacttatgcaatattatcgtttatctgtgtttatatctgtcaacatgttgtctcagtagtgacttagaattcttagggatgggatagagtagttgtggaatccgtagtctgtagaatggttaagctttagaattgattgaatccctttaggactagttgcgtttactgcttatttctttctgatcaactggaattcgatcccaagcattcccgcacccagaaggtgttcgatgaaatgcttgatccactagttcctgagatatgcgtctctatcccaagggattagccgtttagagcgtttattgactttatcagtctgttcttattgcctgcatagttagattccgttaatgggaattagtctgggctagctttgcttgaagatttctatcacgggagtgaattgatctgttgttgaacctgttgtctagggatagcttgattgcgcttgttaaccattcgaataggctaggataccactctactcgattaccccatccttaggaatttctcgtctatcttatttctctgttttatcgttatcgcttaatcgttctcattgcctgtttcttagtttttacaatcactcgaccaacttactcgaccacacccagtgtctggcaacagactgtgtagtcgagtaagattgtcttgtttcctatctattactcgaccagtatactcgaccacatccagtgtctggcaacagactgtgcagtcgagtatagctgtttcatatcttgtctgttactcgacctgttactcgaccacatcctacttctggcatcagcctgttgttgtcgagtgattttagtaattctgttattgcttctgttttctgcatgttcgcttaggactgttagaaaccccaaaactgttattgcttggcttgacttagtgacttctgatcacatctcatctgtttgcatcacacccatttggattgacacctaaaatactacaatgacatgattggtgttttaggataattgcataaaaacatattatcaatttggcgccgttgccaattgggtgtttgtttgctatatttgagattttagaatacttaag

SEQ ID NO: 21514 - DNA, 616 bp, Arabidopsis thaliana columbia
  unsure (1)..(616): unsure at all n locations
nnnnnnnnnnnnnnnnnnnnnnctaaagattaacagcgccaccagggttactggcaggcccatcgcaggcagtacaatcagtgcggcgaaagttgcaccaccaccgacaccggcaacgcctgcggaactaacggtaacaataccgaccagcgtcgcaatccacatcgggtccagcgggttaatgccaaccgtaggcgcaaccatcaccgccagcattgccggatacaaaccggcgcagagttctgaccaatggttgcaccgaaagaggcggcgaaactggcgatggattcaggaacgcccagacgacgcgtttgtgcttccacattcagtgggatagacgcagcactggaacggctggtaaaggcaaacgtcagcacaggccataccttacggaagtacttcagcggactcacgccattaatgcccagcagaatgccatgcactgcaaacataatcagcagaccgaggtaggacgcgacaacgaaacttcccagtttgatgatgtcttgcaagttagaacctgcaaccactttggtcattagagccagaacgccgtaagggtcaactgcatgaccaggcgaaccagtttcatcaccagctttgtagggtacgatac

SEQ ID NO: 21515 - DNA, 1916 bp, Arabidopsis thaliana
cctcagaaacctattcactactcagacatcataacagaaagcataaacgttgaacaggttgaagacatgataacaacagtgtaacagtagtgtgataacagaatgaacaacagtaaacgaaaatcaagaaccaaagctgaatactgaatagataaagagaaatccggataacaaaaagtctagagcacaaggtctgcggaaataaaaactaggtaaaaacttcttgtctgcgaaaatgagaagtacatgctacttatagccaaatatcccgaaaccctaatactcaaaacgacgaagtatttggacgggttaagaactgtactcgacccaggtggtcgagtgagaggtcgagtgaatagctggagtcttcttttcttccttgtgctcgagtgtctggttgagtgcggaatgaagaaggctctgaagcttgtcatcgagtatgcagtcgagcggtgtgatggaggtactcgacctctaggtagagtgatgaggtcgagtagtggtctagcagtgaaggtgaaggcactcgacctgggggtcgagtgaggtgatcgagtggtgttagaagatactcgacttccaggtggagtgaagaggtcgagtggtgaagtgaagtggtgatgtcctatgctcgacctgggggtcgattggtctcttgggatcttgaagctcctgctcgacctcttggtcgagtggtttgtcgtgatcaggtccgcttcttccagatggctcgtcaacagctccaaatcacctgaaatcaacgcaaatatgcaacatgcatgcaaaactatcctaaacatgcaaagtggtgacaaatgatgtgaaatggtataaaacagtgatgatatgatgctaaaatgataacaaatggatgctcaaaacatgcaaaatacacacttatcaactctcccaaacttagtctttgcttgcccttcaagcaaacaatcaagaataagctggaagtgaggtttgaaagcggggactcagagccaaaacacaagatagaccagatgaaatcaatgtccaagttaaaagttctaagctgcaagatcgaattctacttaaaaacgttagccatgcctcatcaatcaatcaatccgactcatatgctcgacctacacaagttttcaaatctaccaatccctttaacattcattagttctggaacgtgaatcaagcaatgcatcatcaaagaactcatttggctaaggtaaaaggtcaagagacaaagatggtccctcacagaataggcttcactaacagggatctctcaaaaaatgattaagctttagtagaatgctaaaggtaagtcccaagctatgcatacagagataagatcccatctacccagagtacatcaaatgaagctctaacggtaattccacctccaatcccaatataagaactaaactctaccctttgcattcatgaatcttttaagccatttttctaatcattcttttctattctcttaactctaggagaagctttctcaacactttgatacatctagcggatttggatttctttaacaactaaggttcctgtttttaacattttaaaaccaagggcttttgcccatcttcaatagctaacaagaactctttcttttcttttcaaatcccaaaacctttactagactttttctgcttctttagcttacttcacctagagtcttttaccttttcttatcaatgaatcaaccccttttttttttcttttaaacacatcccaacccaaagtataagcgcccacctagtcctatctagtccgaaaaatgcgaactaaaactacatgagacactatctctgtcgttacgaacctaacactttctaccaagcttaatcggaataagacctcacaaacactcacaagtgatatagggcttgtgagaaagtctaggtttgggtttgggt

SEQ ID NO: 21516 - DNA, 466 bp, Arabidopsis thaliana columbia
tttcatttagagagagagaaagagagtagtagggaaaaagcaagaaaaaacggaagagctgaaaaagcagagagagtgatgaaaagaacagcttcgttgtcacttgtcattctataaatcgcatccccattgacaacctttcacttccatcaaaactctctctctatatctctctctctatatatctctctctatatctctctctctcttcactctctctttctttcaaaatggaaaaactcatggttccgacatggagacccgacccggtttaccgtccaccggaaacaccactcgaaccgatggagtttttagctcgttcatggagcgtctctgctctcgaagtctccaaggctctaacaccacccaaccctcagattctcctctccaaaaccgaagaagaagaagaagaagaacccatctcctctgtcgtagacggcgacggcgacacggaagacaccggact

SEQ ID NO: 21517 - DNA, 1800 bp, Arabidopsis thaliana
ggtgcggtggttgtgggggttggaagtgtggatggagttgtggtggttggatgtgtttctggttcaggttcagtagaatcagttgacaaataagcagccaactcaggatctttttctttcatgaagaggacgagcttctccaagctggctatccgagattgagattggtggttctcctcattacgttttgcattttgctcctctagttcaaatatcttgagatgcagctgctcttgaagctgcgcaacagttgatgtagaagagctcgcataactctctttccttcttcttttgttcagtgtctccataagcgatccaaggccaaaagggttccctttgccatctgtatgaatgatatggttcaaattacctagaaatactctctcaaataagagatcaattgcagtattttaggatcgaattcacggagtttttttgttcaaacagtgagttaaatgttgggattaagctagcaaggtaatagtgaaaataaaagagaacaaaataaaaagacaatagattgatttggttgtgaacgatttagtaaagagctaggaacaaggtattctcagtaaactattggtttgtagatctaatgaaagctaggttgttatcgaaccattcttaaactcaaactctaattatggaataacggtgggcatgccgcgaaactccctatatctatagctaccaataaccggagaagccgagaaactatcaacctaaatatgcattcttaatgagtttaattgttcatcttagtagataggccgatttttattacatacctataaaccagactcatcaaataatagatccaactacagatacctatggcgggcatatctattgtctggattcaagatccaattaattactctagatctagcattaggcataattaaagatgaagaattctacagataacctagcaaagggggcaatctactaaaccatatgaatccctaatgagaaaccctattcctaacaagcagattactcagacatattggatgaaacaaacaacatatttgagggtgaaagcataaacacagtaaatagagaaggagaaagaaaggatctcttcactgtatatagatctgaatgaaactctgaaaaacaatggatgaataacttatgtctcttacaatagggtttgcaaagaacttgataaaagacttgataaaagaaacttaggtctaaaaacaatatatatagaccctaaaaacgtccatagactaataatgcaaataggaaaatcttttggggcaaacttgagcttctgtaaactcgaaagcgtctagggttcttgttgggccaaaactggtgtcgatcgacagcaagagtgtgtcggtcgacactcctcgctgattcctgaaccaaaatcgtccttcgcttccttttctttagcttttgctccaaaatgtctccttatctccattgttgtcccattgcatagaatacctgaaaagacactaaaaagattcgagaaataacataaagactcaaaatcctatacctaaaacatagataaaatcggtgaaaatcgggttatatcaaatggtttgcaccagaagatcagaaaggagttcacttagaggaaagaagccgagagagcaagttgttgagtgaggaggaaactcctattccgacttattctcgaggagtgcctaaacatcccaccaacccctctgttgaagaagaacacttgattcatgattctgttgctgaagaacttctggaactctcggttggatacaaagctcaagaggatccattggggagctaacttcaagatgg

SEQ ID NO: 21518 - DNA, 2565 bp, Arabidopsis thaliana
ctcgtcaatggctgcctgcgattgctcccaggccatagacgaaccgccttgttctgtatcagctccagcaggtgggtactcgacctcatcagctatgtggcggccacaccgctctgaggaaactcgacctccctccttctgctgcggctagaccgtggtcgagtgatctcctcgagtgaatgaggcgtgatctgctgctagatcgagtgagtgtagccttccttcttctcttgtgttcccgggattcgaatgacgaatgcctagcctggacatgtgggactctctgctcgctaagctcaggcctgtgcgcaggtgcattagatctcctcgatggcatctcgagaggaggctgtacctgtggaataacagtggtggaggaagagcaactcaacttatctatcagaagcttgaaacacttgacgatcagcttgtcctgcttcttgcatcacttctgcaatttactgttattcttatgagcttcagtcaagctcttgctctgcctcgctggaggtacatgttcagcaaagtgatacatgctagtgtcgaactccactgccctatcttcatccatcccatctgaagcagcttcttcaagaagatcatcctcatccaatggcggacgttctcatagtagaggcgtccaatctcaggcctaaaatcaatgttatctccctctattatccgtgtgacctcagggctagggagaaggatgttagctctcctgtctgtagagtgctcaaacctgaacctgtggaaatcgtcaaccattgcaaactccaagaattcgcagtgacgtaggtgctcgatatccattgctcgcggctcgagtccagcagaaatgattgggactcacaagctatcagaatcggtgtcacaacgccacctatgcacaaagcgcctcgtgctctcttgtggttattggtgacagcccagctcttgtatccacacagatggatcagaagaagtacagataggggtgtgtcattgatttcaccttggagagacatgccattcttagtttggcgaagagttcccttgagagccattgcgatcatctccatatcagagttagtaacagtccctgtgatctcttaggagtagagtacattggctatagaacgctggaagtaactgatgacagggctgcgtatctgattgctctttgacctggaagaattcagcggtacagagctgcaatggtgatccacaagtctttcaactcttctctgtcatccttgggcttagttcccgttccactggggaagccaaacaatccttccaagcgcttaatttatagcctatactcatgaccatacacagagaatcacaagaatctcaatccttcacaatccaactcatcagaggtcataccttggtagagctccacttgtagcgtggagaggaactgaattgtctcatcttcatatgctacatacggataagccatcagagtgtccagatgacaactctggtacaggtgctgaacatcgtccaacaatccgagttgtgcaagtgtggtcgagcaaggatacctcgtgctacagaactcattcagcttgaagagcctaatatattcctcagcaggcaatgcgtcgggcttgtgtagaagtttggtagctctgtgagtatgctcaggcatgtactcgtcttccagatctttgtctataagctcatacctctctgtcatcgctctcttccctcgggctatctcagcttttcttctgaagctttcatattctctctgttctctctcaggccttgaagatgacgactctgtctcatccatgttgtagtcaggatcaatagaagaactgccactgtaattgctcatgattcccttgtagaaatttagaactcaaagctcaaatgtcaataggttagtctcaaagatagtaatgaaaccaaaccctattgatcgagaacaattctgtactcgagtagattgagttgttcctgagttccctttagacgatttggatcgagtattgtctctgaattcgagtgggtatgcttcaggaggtcgagtgaatcgtggagtttaagttcagccggtgaagcctagaggtcgagtagatggttgcaggaggtcgagtgaatactcgtggttgagttcttttattgtaatcgagtagaccctgagacttcgacggtgagcgaggtggagtattcgattgcggcggcgcagaggtcgagtgtttctcctaggtcgagtgagatgcgagactgggaaaagaagtcgagtaacttcttttggaagagacgacggttgaggtggatgaatttggtcgagtattgcaacggaatactgagtagataaccaaaacaaataaaaaataacaaaaatagcatccgtttgacatgatcaggcccgcttcttccaaatagctcgtcaacagctccaaatcacctgaaatcaacgcaaatatgcaacatgcatgcaaatctatcctaaacatgtaaagtgatgacaaatgatgagaaattgtataaaacagtgatgatatgatgctaaaatgatgacaaatggatgctaaaaacatgcaaaatacacacttatcaattaca

SEQ ID NO: 21519 - DNA, 2355 bp, Arabidopsis thaliana
aaagtataatgaataagctgtcaagatttcagacaacacaataagctgtcaataagatttcagacaacacaatcagatttcagacaacacaatcagatttcagacacaactagacaacgctaacagtgattatcaagtagacaacgctaacagtgattatcaagtagacaacagaaagagcacataaaatttacctcagtaaatatcttgtttttgacatgaacagaaagtccacctgatccagtgctctccggattgtcccctgaacccatatgagactcttcctcttcaatcctagatgttacttgcttgtagatctcctctgacttcccatcgatgaagcttccatccgcttttctgtgtgtctcatctagcagctcaaggaaatcaggagttttttctccagtcttctcacactgaaacacaaagagataaacaagatgtcagtatgtaattctagattaagtaatggtaaggagagaagaatacttatcttactcgttttcttgcacgggctttgtatgaggtctggcctgaacggtgtttatagatgcctttgccatccggatcatgatacctagcatttctgctgttgttactcttttttttctgactttggatcttgccaaaacagtacaagacctttccacacatcaggatcaatccattttggcttagcttcatcacctttctccttccaatttcccttccaccgtgacacttgatcagtcatcctagactttagctttgcttcaaactcaacccttactcttttgttaattgaacggtcccagttatatacttgctacaaaagagaagctaacatcagaaatgaaaccatacacaaaacaagcataaacatcaaaagagcacaaaacttaccacaaacgtttcataccatcgatcgattgtagcctttgatgtttgtgaccaattggcatgaggttctttgaaatctctttcaaagatgctgcggactgttgctgcaaatgcagggtcatcgtcaaacctacaagaagaccaaccagcccacacataaggatttctatgtctttaaacttctaagacatcacaatgctaagtacaaccaagctgttctatttgttgaaacttctaaggcactacaacctaaggcactacaacctaattccattacgctccaaggcactacaacctaaggcactacaacctaattccattacgctccaaggcactacaaagttctaaggcactacaacctaagctgttctaggacaatgaatttaaccttaccagagagttcccggaggacgctttgggtctagccttgtcaagccagcacgaccaggactatcaagaagctcctccagtgtgagattgttgagacgctcagcttgagaatcagaatcattgacagaaggctgagtggttggcgttggaggtgatggtggatggcgtgaaccttgaacccctgaaatattcccagcactgacaggagaattgacatgcaacgggtctccctgctgtgacctatatcgtgcataagtattctccgacgacggcatcttgcaaaacaaacaaaacccagaagcgatgaagaagaagttagatcggagagaagcagaagcagaagcagaagcagaacaaatgattgacagagtttagatccgtaaactagaacagattagatctggaaaacaatgtcagatcggagatgaagaagaagttagatcggagtgaagcagttagatcggagaagaagacgttaccttggaggcaaaagagatcgagtcgcgacttgtgctggagaagaagagtcgcgacggctgctggagaagaagagtcgcaacggctgctggagaagaagagtcgcgacgactgcaggagaagacgagacgcgacggagaagaagaagaagttagatcggacggtggaagttggaatggaaagaagaagttatatcggagaagaagaggttaccttggagaagaaacagatcgactcgcagctgaacctggagaagaagagttgcggcggctgctggagaataagaggcggcgacgtaatcagatcgaagaagaagagaggcgacggcgaagaaaatagatcggagaagaagagaagccggcgacgaggaaaacagatcggagaagaagagaatcgaagaaaaaaaattaggtttagtatatataagcatatatatcctcgcaaatccctcgcaaaccttgctaggaaattgcgaggaaccgtcttttaaaccaatcaaaatgcagcttacattgcgagggaactgcgagagcgcctagcaaatccctcgcagaccttgctaggaaattgcgaggaatcgtattttaaaccaatcaaaattcaataatg

SEQ ID NO: 21520 - DNA, 504 bp, Arabidopsis thaliana columbia
gaccgagccatgtttctcgctcatgtcactccgttttatccgaaccagctcgccgcttttccagctcaattgactgatttactccgtacctcatgcctggcaatgccgtcggggcttcggtaccaagttgcgcaatctctgattcttcttatgaatcgaaaggtatgtttttttatttattacgtgattgatacgaattctaagatgatcgtaatcgaaagtaatgtttttttaatatgtttgctttggtgtgtgttaaagagtcttgtcatcgaggatttgttagctctgtttctagatattcaaactcttggtgataaaaacttgcgaaacgttgctttctctcatattgttcaaaccattcgtaaaatgagtatcactgatccaaggcacaaatctcttcacaagattgttttctctatgttggaggtagttcctttttcttttccctgttcaatgggttttttgtgtacttgatcagtgtataaccatgtagatgatttt

SEQ ID NO: 21521 - DNA, 542 bp, Arabidopsis thaliana columbia
  unsure (1)..(542): unsure at all n locations
nnnnnnnnnnnnnnnnnnnnnnctaaagcctttcgatgacagagtcagagcacaagttggcatgttatatgaagatcttgccggacatgctgcttttgatggcatattgttccacgatgatgctttgctttcagattatgaagatgccagtgcaccggctatcacggcttatcagcaagcaggctttagcgggagtctgagcgaaattcgacaaaacccggagcaatttaaacagtgggcccgctttaaaagtcgtgcgttaactgacttcactttagaacttagtgcgcgcgtaaaagccattcgcggtccacatattaaaactgcacgaaatatttttgcacttccggtaatacaacctgaaagtgaagcctggtttgcacagaattatgctgatttcctaaaaagctatgactggaccgctattatggctatgccttatctggaaggtgtcgcagaaaaatcggctgaccaatggttaatacaattgaccaatcaaattaaaaacatccctcaggctaaagacaaatctattttagaat

SEQ ID NO: 21522 - DNA, 664 bp, Arabidopsis thaliana columbia
catatcttatttttttgttaatgaatgaaaaaaattgcagatggaaatggagggttgaaggtaggagtgtgtccaaatagagctcaatcagcgccaatgagcgataaatcaaaatctcttgttcttgtgaaccatttccctgatgctgcggatgtgatagtagcatgtaagcaaaactcagcttctcttcttgaatccataaagacatgttaccaagccgcgggacagcgatggcctaacttcatagcagtcgatttctacaaggtacatctatatttctagtttttgaagattgtctggatcttgtcttattgaatttttgtgtgtgtgtgtgtgagttcagagaagcgatggtggaggagctcgcaagcggttgatgttgcgaatggcaatttgatatgcggttgcgataactttgcagcgtgcaaggtcgttttctttacatgttttgaatttgaagtcgttatgtaaatttcgatatagtttgttaaaattttcaatataatctgcaggctgacggcaaatgtggatagtaagaaagactgagccaccagaagcaactcccataaccaaaggctttctgcgtttgttgtcactttgtgtcatctttcataaagtttagctagtgtagtaacggtagtttttgttagatattagagattag

SEQ ID NO: 21523 - DNA, 524 bp, Arabidopsis thaliana columbia
gtatgaaaagcaatggagtcgaacgagcagcttttttcgtgctaagcaatcccatcaaaagaagctgagatacgatcagtgcaatcactacacgtctatgaacatctggccagaacgctgcagcactctcatactcttggttatacacatttataatctgcaacaaaaagaacttagtttcttaagcatataatagaatatagaaagaagcagaggattctgtgatttgggttttaaacctgatgacggtaaaccacgtaagctaaggcgaagaagacgaggataaaaggaaggagaatggggctaacagcggcgtaaactagaccaagaatgaagtagagttgtatctgaggttcccagtattgaaacctatggttccaggatccattgcttcttctctgtccttctctgttttcacaaggaagaagttcttgagatgatatattatcaatggctttaacctcagtatctctccagcaacaccagcccatccgtctaccattatgtaggtgataaagaaagtg

SEQ ID NO: 21524 - DNA, 624 bp, Arabidopsis thaliana columbia
atctttgtgttgttagtatcaaagagcagttgagaaagccttggtggacagggtacctgatgaaaaagcatccgagttgactactgtatgtcatatgtcaatgttttgcttacaaagtggcattttcatttataagttttttttctgctattcatatgaaatacttcagtaggactgaaattttagtttttaggtcctgatggttgtgggggcaggaaggggaccccttgtgagggcatcgttacaggtaaagtcctgatgcacaaggagacattgaaaattcatttgtttcattaatcaaatgtgttcattgtttcctttaccaggcagctgaagaaactgatcggaagttgaaagtttatgccgtggaaaagaatcctaatgccgttgtaacactccatgtgagttgtcagcactgagtcgattaaaaaattgctaattttcctgtgatttcattcggacgtgcagtgtggtttctaattaactcagagcattgttattttttctgatagaatttggttaagatggaaggatgggaagacgttgtacgataatatcctgtgacatgcgtttttggaatgctcccgacaagctgatatattggtcagtatgtacagatttttg

SEQ ID NO: 21525 - DNA, 600 bp, Arabidopsis thaliana
gggatatgattgagacgggaattccaaggccggagagaaacgtgatcctcaccggagcgcaaagaacagagttggcggagaagacggtgaaggaccacaaagtgaagaactatctagtttgcatcaatagataagacgatgctcaagacgattctgcagaaggagacgtcgaaggacttgtgggagtcaatgaaaaggaaatatcaagggaatgatagggttcaaagcgctcagctgcagaggttacggagaagctttgaagttcctgagatgaagattggagaaacaatcacgggttacttctcaagagtgatggaaatcactaatgatatgcggaatctgggagaagacatgccagactccaaagtagtggagaaaattctgagaacactggtcgaaaaattcagatacgttgtgtgtgctataggagagtctaacaacatcaaggagcttacggtggatgggcttaaagttctttaatggtgcatgagcagacttgagtagacatgatgtggaagagagagtgttagaagctgacactcaatggagacaggatggaggaagaggcagaggaggaagtcaagcagaggaagaggtaga

SEQ ID NO: 21526 - DNA, 537 bp, Arabidopsis thaliana
agaggatcccccaagatgatgacagtagatggtctgcaaactcgttgatggttcatgagcagaatttaagaagacatgatgtagaagataaagtcttaaaagctgagacacaatggagaccggatggtggaagaggtagaggaggaagtccaaaccgaggaagaggaagaggaggttatcaaggaagaggacgtggccatgtgaatagagacacggtggagtgtttcaaatgtcacaaaatgggacacttcaaggcagaatgtccaagctgggagaaagaagcaaattacatagagatggaggaagatttgcttctcatggcgcatgtagaacatattggtgaagaagagaaacatgtttggtttctcgattccggatgcagcaatcacatgtgtggtgtcaaagaatggttcatcgagttggaccatgacttcaagcagaatgtaaggctgggagatgaccggaaaatgactgtggaaggaagaggaaagctgagacttgaagttgacggaagacaccaagtaatctcggacgtgt

SEQ ID NO: 21527 - DNA, 629 bp, Arabidopsis thaliana columbia
  unsure (1)..(629): unsure at all n locations
ctnnnnnnnnnnnnnnnnnnnnnnnctaaagtaaattgagcgccatgcttagaaaatcaacgcaagacgaagggtgaattatggagcagtctgtggcgaatttagtcgatatgcgcgatgtcagttttacgcgtggcaatcgctgcatcttcgataatatttccctgaccgtgccgcgatggaagatcacggcgatcatggggccatcgggcatcggtaaaacgacgctactccgtctgattggcgggcaaatcgcaccagatcatggtgagatccttttcgatggtgagaatattccggcgatgtctcgttcgcgcctgtatacagtgcgcaaacggatgagcatgttatttcagtccggggcgttgttcactgatatgaacgtatttgacaacgtcgcctatccactgcgcgaacatacccaacttcccgcgccattgttgcatagtacggtgatgatgaagctggaggccgtggggctgcgtggagcggctaaactaatgccttctgaactttccggtgggatggcgcggcgtgcaccgtggcgcgtgcgattgcgctggagccggatctcatcatgtttgatgaccttttgttgggcaagatccatcaccatggcgtactggtga

SEQ ID NO: 21528 - DNA, 581 bp, Arabidopsis thaliana columbia
  unsure (1)..(581): unsure at all n locations
nnnnnnnnnnnnnnnnnnnnnnntaaagtctgtttagccacaggtgcaattatcagcggcgtaccgaggcaggggctaatcaggcatagtttgcgtcaaaccttgcctgtttttgaagatgtatatagaaaaacaggcgttcaacaagccattttgcgaacctgttcccggaaaaaagtcatatttctgtcacactctttagtgattgataacaaaagaggtgccaggaatgaacaaaacgctaatcgccgcagctgtggcagggatagttttactcgcttcaaacgctcaggcacaaaccgtaccggaaggctatcagctacagcaagtgctcatgatgagccgccataacttacgtgcgccgctggcgaacaatggcagtgtgctggagcagtcgacgccgaataaatggccagaatgggacgtccccggtgggcaactcaccaccaaaggtgcngtgctcgaagtgtatatgggccattacatgcgtgaatggctggcagagcaggggatggtgaaatcgggggaatgcccgcgccgtacaccgtttatgcctatgccaatctttagagnnnnnnnnn

SEQ ID NO: 21529 - DNA, 589 bp, Arabidopsis thaliana columbia
gaggttatgttgccactgtgaacaggtttgttgtttgttacatttcaagttatatatataatatatgtaaattaacttatgtttggttgcatatctttcttgagtaatcatttgacattgtttttttctgtttgattcaccagtaagtttttgtgttgaatgttgatattgtagcaaggaaataaagaaagtggggaagaaagagcatcacttgtggaagaagaatgactctgctgggtctggacagaaagcacttaatcttgttcgaatggtaagtgaggaaaagttctgttaaaacatatgttttcataagtgaaacgatgataaagtagtccttgttgatatgtagctctctggactcccaaatgaaaaagaggctgtttatggagctttgaataaatgggtagcttgggaggttgaattcccattattgctgcagctaaggcgttgcaaatctttagaaagagaagtcagtggcatcgtgtgattcaagtaagtaatacggcttcctatgtcaagtgtaaagttttgctaaatatggtgtcctgagttgattggtttagtgacaactcagttggctaagtggatg

SEQ ID NO: 21530 - DNA, 574 bp, Arabidopsis thaliana columbia
  unsure (1)..(574): unsure at all n locations
nnnnnnnnnnnnnnnnnnnnnnctaaagagagatttttaagctaaagatgaatttcgtcgccgtgtcgacgtgtcatttcgacatcatcgacattattcaccgcagggataatcaacactggcacaattattgcttgtagctggcaatagttaatgggaggcgatatgcacgaaataaccctctgccaacgggcactggaattgatcgaacagcaggccgcaaaacacggcgcaaaacgcgtaactggggtctggctcaaaattggcgcattttcttgtgtcgaaaccagctctcttgccttttgttttgatctggtttgccgcggcacgtggcaggaaggttgtaaactgcacctcgaagaacaagaggccgaatgctggtgtgaaacatgccaacagtatgtgacgctactgacccagcgcgtccgccgctgtccacagtgtcatggtgacatgctgcagattgtggcagacgacggtttacagattcggcggatagaaatagaccaggagtgagcgatgtgtcaacatgcggttgcggtgaggcaacctgtatatcgagggtgatgacata

SEQ ID NO: 21531 - DNA, 379 bp, Arabidopsis thaliana columbia
actccaaagctcttgcagtatgcagagcaactttcaacctcatttcccatttcatgggtcttttctcccctgaaacacacattaaactcttaatcatcaaaccaaaagatatcatcaatcatcaataagagaaaaaaggacaaagagatattttacagtgaaaaagatgttttgctaatgttccattaggcatatactcagcaacaagtaatctctcgttgtcatcacaacaacaaccgatcaaattcgccatatgttcactcctcaatctcccaacagcttgtgcttcattctgaaaaaaggtccaccattgatagatatcaaaaacttgttagcaaaaccaaaaacattataaagatcaaaaaagactaacgatgaa

SEQ ID NO: 21532 - DNA, 592 bp, Arabidopsis thaliana
ttctgatataaagtttccagcgtcacagaattagacatacactatctccttttgtatcaatcccagttcgcccagctcgaccagacatttgcttgtaccttgttccatcaataaaatcacggccaatcattggttgtcgaaaaataaccctccttgcaggcaggttaaccccagccgccaaagtggatgtagctgttaagacacgtacaagacccttacggtaacaggtctcaactatctctctttcttctacctgtaatacaaagagttagttgcccagtgtgccaatgaatggaatattcactttgcgtaaaattcaccgtcgcccatgtaaataggaaagaatcacagtcccagtattataatttagccagttcaagaaaagatctatgatgaatgtgtaaacatactgtaagaccagcatggtgataggcaaccccagagggaagagtttcttctagtacaggatctactccagacggagaccttcgcagggcatcaatagcagatctgatatccataaactcactattttcacatcaacgtttacgggaacatttttaatgagctttgaaatatgcctagcagttga

SEQ ID NO: 21533 - DNA, 2289 bp, Arabidopsis thaliana
cctcggccagcatgcctttgaggcgaacaacctcggagtccgcccttaggttcagctcggccatcttaatggcattcgccttgttcacgaaagcctccttttcgccttcctcctttgctactttcgctgcagcagcttgggagagcgcctcatctctttctcgctcggcaacttggatccgagcatccgcttcggccaacctgttggccgcctccatgttgttcctcatggccaaatcgtacgagtgcaccattcgattcatcgaagcaacaacctagaaaacataaagaaaattacatatcggagatctagacgcgatgaatgaaaaagttgaataggcacagtgggaagccgtttcagcatacttccgcgactccagaagagtatccggaggaggaagcaaaggaccgacgcaccccctgaggaggtttgcagaggctacccggtcctcaaagatggggagttcttttcccgcctcggcactcgaggccttcttcttcttgcttttcttcttggacgatgaatcattcgtccgaacacgcttacccgcggccatgtcgctcgcaggtagcacaacaaccgcctcgggcaaaggcgcaacagcagtaggatcgacctcttgagcttcagaaggcgtcgggtcaaccggggccgcaacttcgggagcaacattccggtcttgagtcgcatcgggagaggctacccgcggcaaaatcaatcctgcattcgcgaggcgtttctcttccgccaagcgtctttctttatcttcttttttcttcgcgtacacctccctcaaagtgagcttagttgactgcatatcgacgaacaattgagttcggtggtccggagattctgaactggtaggacaggaaacgccgtgaagaagacggagggctagttcgactcgatccagagagaaatgttttgaccaatcacacttctgagctgataacgcgtgataagccgagaggaaatcgtcaggaatcgactcgagaaacttgagagtgcgttctgcaacaaaggaaaactagttagaaaaagaaacaaaatatataaatcgcgtcggacgtaaacatatcgctaactaactacaactacccaaagttccccatctcgtcagaaccgtcccgagaagatcatcgtgaacaacgtctccgagagccacgtagaagaagtgttcggtatacgaatcgtccttgctcgggaacttgtcaataatcttcttacccttagtaggagatatataataccgatccacttcggattttggaacccgcctgatctcgagaaaattcctcagatgagcgagcgtaatttcagtttcggattcataactccgaatcaaaatcccgagcaaatgtctcaaagatcgcatcgtgatctgggaaagggcaatctgatatgatttcacatactccaagaccagcctctggattggcagccataagaagcaaccataaaagaacccctcatacaaggtatagaaacccgcagggggattgtcggctcgctcgtcagggctcggcacacgcaaggttacagcgccaagaccaaatcgagccctaaggtccgagagagaccgctcggtgcacaatgttgagccgggaggatctggcattatcacctttttgttcttcctcttcttcttctcagccttttcgaaagctttctgctcattaagacgcaagatatcttctgtcttgtttgggccaaaataaagaaaatcctcaatcttaaccgtcggcatgaagggctcgggcaaatttcgccaattggatgtcccggcttcgtcagccatcgggacaaaagacctgcgaacaagaggcggctcgggatcatcggacaatccagttcccgagcgatatcggcattggtatcttcccgagccgtgaagggagtcgtctgctcgggggcacccgaagaagatacagcatcctcttcagaagacgtccaaattgctctccgtttgtagatcgggggaagatcatctcggtgatttgagtcgctagaatcgacaagagaagcgctcggggacgatagacgagaagggaacaaccagaaaacaagaatttctatcccggaaaaatcaaaaataacaaaaagaacgacggagtcgccggaaaagaaaaaacgatagaaatatcaagatcagagagaaggaagcaaaccttgtttattttcttcgaaaacttcaaatgaaatctcgaaggagtggctcgccatatataaaaagttttcaagggcgcgtccggtccgcagcaaacatttaaaaccgttcaagcgcgtggg

SEQ ID NO: 21534 - DNA, 646 bp, Arabidopsis thaliana
  unsure (1)..(646): unsure at all n locations
cttcttgtctatgatacatgaaatacggaagctagagacagttctgcacgaaaagaccaagaagggtggatctttcttgattggtcagcgagaaagaagattgcaataggacgtgcgcgtgggctagcttttctgcaccatagctgcattcctcatattatccacagggatatgaaatcaagcaacgttcttctagaccaagattttgtcgattgtgtctcagattttggtatggcaaggctggtgagcgctctggacacacacttgagcgtgagcacgctcgcaggtactcccgggtatgtcccaccagagtattaccagagtttccgatgtacagccaaaggagatgtgtatagctacggagttatacttctggagctcctctcaggcaagaaaccgatcgatccagaggagtttggtgaagacaacaaccttgtgggatgggctaaacagctctacagagagaagagaggagctgagatacttgacccagagttagtaacagacaaatctggcgatgttgagctacttcattacttgaagattgcgtctcaatgtttggacgatcggccattcaaaagaccaactatgattcaagtcatgancgatgtcaaagagctcgttcaggttgatacagagaacgaca

SEQ ID NO: 21535 - DNA, 1520 bp, Arabidopsis thaliana
gcccccgacaggaccaaattcatccccatcatgactctgttaggactcgtcgcggcctctcatggtgacaaccccaggtcccggcgaacgtgatttctgcccaactaaatcactctctgctaccgtcggcgatctctcttgggcgacaaccccagatcccgatcggactattccctgacccatacactcctgctcgttgagcgccgtaacaccgacctccattgctgtagcagcacctccatcaaccaccgttctggtcccgtttgtaactcgcccaaaactctctttctcaacccgtatctgtttcccattcgtcaacttttcatagtcacctttagtcggaccgaacactaaactccgggtgggcctgttatttcttacatgattgggcttcgacccattagcctctccagctttcttattcactggcctcttctctttactccctccatacggcccactaattcgattctccaacaacgcgccaaaaacgactgccttcccttgttcgacactttgttctcgcggggctcggggctgaatattctcattttccttattcgactctgattgattggcaactttcctaacctcctttgtagccagatcatccgctaaccttccacaactgttcgataacgcaatattctcagcaccctttctccggtacaattcccgtcgttgattccctcccacaccacgatcgccgcccgccgggactccactattcctcagcccactctcttctctcctccctgccttattgaccataatgaagccatctccttgtgggaccgtattcgccacatccacctccgaaactcgcaactgattgaccacagcagccgcttgttcagaaagctccttcggacagttgtgcaccaaatggccatagatgccacatttagaacaaatgttcgtcaagccttcataggcaacatagtacctatccccattcaccagcagagcaccttgtaaaggcctttttaaatccacctcaacacaaactcgagcaaacctccctctctcaaagtgtaacattgtaagatcaaccttcagaggtctccccagcccttgcgcaacactcatcagaattgacttgtgataaaaactcaccggcatatccgcaatccgtacccaaattggagtagtcacaatctcatccttaagtggattaaactccggtgaccaagccttcactaaaagacagcttccgaacgctctccatggtccccccgtaagggctgttaggaactcctcctccttctcaaaccggaccataaagaagtgtcgagggagatccaaaacatacatcgctccactcggcttccacatctccctcaacctatgacttacggccgcaagcgagactttccggcctagcactttcacaaacatgcactgcttccacaaaccattcatagcatcaatgacctcctgccctatagtgattaccggctccccatcaacaccattcgggaacttcagtgtcactctcgatttaacaaactcatcatcta

SEQ ID NO: 21536 - DNA, 2632 bp, Arabidopsis thaliana
ttctctagcctattgccatgatcattctaactaaatctatatgcctagcaagtctaatcaaatcctaaccaacatgtatttctccgcaagcttacacaagattctagattccatacctaagttccactactatatctaccaggctttcatcgctgggtctcatcaaacaacctaacattcaagattcttctagactcattcatgtactataccatgataaatcgaccattctctttatattttatattttttggtgttctttctctccccaaacttattcttctaagagagtaaacaaaggggaactcgcatattggatcgacaccctcgacatttttccagcctttgtaattgatcattccaaataatgtataataatggggtcataggaaacattcctacccgtatatactatctgaaaatcctatcaatctctcattcatcattcatttttcttttctttttataaggggagaggaacactttctttacacattggtctcaatatcaggtatgaacaaggagtcaagatctatgaatactaaccgtttgaagaggtaaaaggaagagcagtgagattagctccagccttagtggttgagttggaaactaggatatcctcaagtctgttagtttgccatctagatttttcaatagtcggatagagtcgaacctgcagcactcataaatcaggtaataaataagagaaataaagatcatatccctaactaaactaaacaaaacgttttttttttttttttctttaaaaaaaaaaagggaaagagataactaaatgaactgcaaaataagaaacaaagttaaaagcatcgttagtaagaacctcctccagacttaaatgacacagtccccagtggcattcaaatccagagaaagcgggaaaaataaattaaaaataaaagaaaataaaagaaagggaaaagaaaaataaaaccaatgggttgcctcccactaagcgcttgtttggagttagtagcttgacttggcggagtttaggatgtgggtggagtggtggggtggattgttgctgcatccttgccttccaaggcggtgtgtaaacggatctggttggagcagctactggtgtcgatcgacactcagtggtgtgtcgatcgacactcttctcgtcatctgcaaaaacaacaggagaaacaagctttcgagggactctaggcttgttatcttgtgaagcagtcttcgaataatccaaggaaataatcaaagataaactaggagaggagatagaagaaaacttgtcacataggtcctcaagtggtgtgggctgaagagaatgtgcagaatcctctgtctgtgaaacccgtgggtgtcgatcgacagaggtagtagtgtcgatcgacactgttgccctgcaactctcattggcgagctgaacgggatggagcgttgtgtgtggctctgtggtgggattctgatcagtctggggaggtgtgtcggtgctggaggcaatgcaactgataggcttagtaagctctaaactatccatgcctaactccatctctgaatcacaaaccttgagaaagattctccctctcttcacatcaaacctagcagcagctgtagctaggaatgctcttccaaggataaggggattcttgggttccttctcatagtccaggtacacgaaatcagcagggattatggagttacaaccttaacaggaacatcttcaaggattccttcagggattcgcttagaacgatccgcgaagagaagtgtgatgtgagtagacctgtagtgagtcatgcgtagtctctgagcaacagacttaggcatgaggttgatgcttgatcccatatcacacaaagagcggctgaacctgcttgtggagatagagcaatcaagaacaaagctacctggatctggaagcttctcagtggtttgaccaagattaatggtgcggatgtactcaactatgtctactctctgtgctttctccttcttggccttaggcagcatgattgcactgatgtctctgggaatcagcttagcttcatctgagctaattccattgtcaacaagtcgcttgacatacctgttgagtgagatagaagatgtctcagaagcatccttaggaagagtatggaggatcttctccattacggctgtgcacttggcagcatgaagctcctgcttagaacgacgcctcctcggataaggcacatgaggagtgtagacagactcgggctgcataggtatttgcacctcacagggtgctgtccggatccagtgtcgatcgacactagagaggtatcgatcgacaccgtcgtattgggtcgtctttgagaagagcgtcccgtatggtgtcgatcgacagaggagggtgtcggtcgacaccatctctacaactgcgagctccaactcgtcttcagtgtccaattcctcccacatatcatctccttctctgatcaagatggcattgcagctcttccttgggttagcatcaggattacgaagaagaaaactgttggagctggattcccctccaggaatccacctgcgaaaatacgaagttagcctactaagccaccaagcccccaagtagaggactgacgcactgatgagacacatacgcgaatgggtatttgggcctgat

SEQ ID NO: 21537 - DNA, 604 bp, Arabidopsis thaliana
cgccagtgtgctctaaagggcaattgcagagctagacgcggaggcggggtccatgattgattcggtaattttagtgagggtgaggtctttgttggcgggaaggaagttcttgactccagagatgagggagtcgaagtttgcgcctaggcgcgcggaagtgatgcggtctgtgaggcgattggagagggaggagaagccgcggaagaggtccgaggattgctgctgtggagctgcagtggccgtcgtcattattgtcatgcgggtgagctcgcggacttgcttgacgtaagcgatggggctgatgtcctggactcccgtgcgggtaagagcttcttcgaattggctgatgtctgcacgggagagttcagtttctgtgctcaggaaccagatgaggaatatccggagtttgtctgtggggttagtgcccttggtagggtcactaattaactcgagaatctgtgctttagattgtttggtgatattctcttcaagctcgaagaagttatctagttggcggtctttgataccttaagcagagcggtggcgatgttcatgtgcatgtcgagaatcgatttccgctctcgtagctcgggtagaagagtaa

SEQ ID NO: 21538 - DNA, 1796 bp, Arabidopsis thaliana
tgaagtactggaaatgtacaggtagctcaactgcacaatcaatcaagagacaagagggctttcttcctggtaatcctgatgctaaaccaaggaagagctgtaatgccatcttgatcacagaaggggatgatgtgtgggaagaattggacactgaagacaagttggagctcgcagttgcagatatggtgtcgaccgacaccttccagtgtcgatcgacaccctatgggacactcttttctaagacgactcaatacgacgatgtcgatcgatacccctctagtgtcgatcaacactggatgcggactacaccttgtgaggtgcaaatcccaatgcagcccgagtttgtttacactcctcctatcccttatcctaggaagcgtcgttctaagcaggagattcatgctgctaagtgcatagccatcatggagaagatcctcacttctttccctaaggatgcttctgagacatcttctgttccactcaacaggtatgtcaagcgacttgttgagaatggtattagcttagatgaagctaagctgctgaccagggacatcagtgcaatcatgctgcctaaggtaaggaaagaaaaggcacagagagtggacattgctgagtacatccgcaccatcactcttgatcagaccactgaggagcttccggatcgaggtagcttcgttcttgattgctctatctccacaagcaggttcacctgctctttttgtgatctgggatcaagtatcaacctcatgcctaagtctgttgctgagagactagacatgactaactacaggccttcgcggatcgttccaaaagaatcgctgaataaatccttgaagatgttcctgttaaggttggtaactgtgggttctgaaatccacaatagagatttgtacttaagattatgagaaaggagggctagatcttcactgaaaccttgagagttatattgctaagaacgaatggacttttgtattgattttgacaaagcttttacaatgagaaaagagattacaagtgtaaaagtgtgtgtgtgccaatgtgaactagattgaatgtcccttccaagtcgtccttgctcccttatataggtctacacacgtggttgcttcgtccgggatctgcggagatcctcctggatattcggcaggttagttcggagatatcaggtacgcaacgtgaatatctccttgtcaattcctaggtcattattcgcttatctccatgcatcaggtgactgggcttatctggcccaaattcccattcgcatatgtgggctcgtcagctgcgtaggtcctttacttagtgggcttggtgggcttttgtgggctggcttggtattttcgcaggtggattcctggaggggaatccagctccaacagtaactcttttatccctgcttattttgtggccttgactatgagaaggaacccaaagatccttttatccttggaagagcattcctagctacagctggtgctaggtttgatgtgaagagaggtaaaatctctctaaaggtttctgatttggagatgaagtttggcatggatggttcagagcttactaaaactatcagtagcattgcttccagtatagacacaactcctcagactgctcagaatcccacaacagagccacacacaacgctcccatcagctcaactcgccaatgagagttgtagagatacggtgtcgatcaacaccaccacttgacagatgattctacacattctcttcagcccacacatcttgaggacctatgtgataagttctcttctatctgttctcctgccttacttc

SEQ ID NO: 21539 - DNA, 2838 bp, Arabidopsis thaliana columbia
tcatctcgaatcaggatacgtaagtataacttattttggtatggctcaaagtttgagttttaaaacttactagtccaatctaaaccggattcgctcaaaggaggcgactcggtaaagaactcctcgaactgttgagggttgaatgacgaagagggaagagcggccaagcgacttcgcttctctgctaaaacggctttcaattcggacctttcttgctcctcggaaaaatcctcgtcatgggtttggtccagaaggaggaggttgctttcatattccttgatgtctgattccagctctgtcctagttttctcggtttggatgaaaacgatcgccccttgaatccattctatcccgtgaccttttacttctttcctggcttttgatgctgatcttcgctaactcagcatctcaaagtttggcgattgctttgtacttggcctgcaatttggatagctggttggacaagtcgtaagcattggattcagattctgagagtctgccccgagcattcgagagttcctcctgaatcttgtcatacctctgatactgatcctgcaactcgccgtttgactgcatgagtttggaggaaagattttccaattgatcttccaatttttgcttgacttcagtggaagagcggagatcggactcaagagaagaagacttatccttccaggccataacgtcctgttccctgtcaagcaacaacctctcgtaatactgaatcatgtcattgagttcgctgtttgtctgaaccaagggttacaaaggtgagttagcgtataaacgaaagagtggagctaaaaggtcacaaataaagagaactaacccgagatgagtgatgggcgttgatatgactattgtcggacaagacttggaacttgaaccaatggagcagcttgtagccgaggagcagcttgtaacgtaggaagctttggcggaaccaaccggccctatgactcgttcgaagactagacatctcaaccaagccgttaccggacttcttaaccacttgggcaagcatccaaatgaagtcatactaaccgtttggaactcgaaagcagcccaagacgattggtaataggctaagtgttacttgggtactctttttcccttctaaggttttgtcccaatgggttttccttagtaggtttttaatgaggcttgagtaacacttccaaatcccccattatcaatccggcctaagcccactaagatgaccacgaatttggaaggccatgggtctatttttgttcagattttcatttatgatttctccttttccgagtggccttggagcttattccaagactaactcttccttttctcttcttctctatttaaactcttgtatttcctcattgtaaactcatctatcctttcaatctcaaactcttttaagctagatcaaaggtaaatcaaaggccatctgcatcatttgtgtgaccattcgctccacatcctttggtttgagtgatctcatgatctcttagatgcaaagtctatcccctactcaacctcaagagtgtcgatcttagggaagtcatattaggcgcgaagtaggaatcgctcgcaaatcgcaggacgccacctgtcaaaggttggcaggattgtgtctttccgagtcttgaagcatcggaagacgtttccctctgtttccatcgctgtcaaagtaataaagagattcgaacccatgtatgggaagttaggccgatgaatcaaacaatatagcaagtaaagagattaaatggtaatttctaacctgtgagtgatttggtttgaggaaccagaacggccttagcttagggttggcatctcggggctcacactcttcttgtgaggatttgcactccgaccggtctttcaccccaagatctagaagaaggagatgcgatgactggaggagggggacccattgatcggggtaggggagatgatcgaggagaacgatcagttcgggctatagtcttatctctcttaggaaaggaactgctgcgagttggtctttctctctttttctgaagcaagtctgctatcagttcgctgcttaacctagtccgagaagcagtctgaggtgagtcacgacgtggtgattggtctctacgaggtgaccggccgccatgacctttacggtgaggtgtaggtctgaaggcaccggcagatctcgcccattcgtcgctaccatcgtcgaccagcagagttctactgtattctttcttgtcgacagcagactgaaggaatgacttgttcgcctcacaagcctttgtcattggcttggataacgtctttcaacgggaagcgatacgcctagcagaagttccgtgaggtagaggtggaggtggtggaagttgggtagttgtccgggtggactcattctgagcttatgattggcctcaatgaaccgatcgagagtgaaagagttccagagggtctctccctcgataacaatcttgatgaattcgacaaattctatagttgggagagttggagcaatgaaagctccgaaatgaaaatcataacgtcgattaaataaaaaaagaggataagcaaaaaggcatatgtgacctaatttctaccaggtttcgaagaccacttcgatggaagcacatcgaaaaggtttccaatcgaggcaggggttttgttaatcaggacccaaggatggcgccaattctcatccttgttcgggagattcgagatgagattcctgttggcgttcgggtacgctgaaaaatacccggttttcttcggcgaactcctaatactgagaagttcgttcaattccggaaccccgatgacaaatacccgctgtcgctgcgatggtaataatacacaggatgg

SEQ ID NO: 21540 - DNA, 1754 bp, Arabidopsis thaliana
catgttgtgaacatagaaagcatgtatttgtatgactaaacagtaacattttgatcaacataatatctatagaccatgatgtctaatattaaagcatgttactctatattttggttagggatatctcatgcatatcaacgtaagttgaaagcatgtgttggtttgtaaacatatcattatattacgtgatattaaattaaatttgttatttaaactaaacaaatgtgatgtggatattaagcttgtattcgtatgactaatcaggaattcagcgaaattaaaattgttattgcatggtatttatacgaatagcatgttactctatatgacagttattattagaacattttttcaatatgtgttgttcttaaaaacaacatgctatgtcattggtaccttcttccccttgttcgtctagggttggcgccgcatccctgttgaaagatgcgaagttaaggcacatgtcttcaagagcctcatgcaaaggtaccgcgagatccaagtgtacacctagaggttccaccaagttagttgcggaaggcccaaaaaaattgcactccttaattgtctcgcccccgggatagtcgttttcgtcgttgtacgcttccccctcactgagagagtcgtaagattcagtggctaaattaattgacggtaaccccagatttttaagtaaatctgcctcaacaacagttgagtattcttcctgcgtaaatagatgtcttagtagtgtaatggtatattcgagtggctgaatttaataaacgcagaatattttacctgatctccatcttcagtcgctgtgtccatactttcagtcgttaacatcggagaagctgccttaacagctggtctcacagggtgttgctgtacgttggtagaagagtctccaacgttttgaccttctgtttccgttgaacgcatccagcggaggaccgcctcgtcatgcataagccttttccacacaacggactcgtagttaggtgatcgttcagcgttaacgtataaaggtgatttacctttatctgcaaatccgtaacttgaagtctgacttgttccaccatcttcggaaccaccatccaccgtttgcttggagacaaacaaactcaagtcctccaactcaaaacgcatagctagaaacactcccattgtctcatctgaagctatggttactggctttgtgcgcccaccaaaggtagtttccatgtccatccaatcaggtcattggtaagtcaggtgtagcgggccttcaacgtattcctctccgtacgcttctctaacaagctggcgcacaaatgctaacttctccccttcccgaatgctcaacctcctcactgcattattgtgattggatatgaataaccatgttccatcagctccgattgcccaggaaccactcaccgtcctgacataacgatcgtcggttatttcggttataaccaccgtcggtacctacatgagttgcattaaatagagataaatcaaccatgagttttttaaaaatagcaacaaacccgaccaaaagaacaatcattaattgcataccaaaacagaaatgatcgagttcttcgatgttgttggatacgtagtgtgtgctttataggaagaagtagaggtgtgagagatgatatcttgccatctttcttcttttatagaaaaggttaactttgttttttagggctacagtaagaaaagatatttctagtaacagttgcttaacgatttgcagccgacgcgaattcaaaacggtatga

SEQ ID NO: 21541 - DNA, 2475 bp, Arabidopsis thaliana
ctcaatatccaagtcacttcaaaaattagagattgtggaaaaatgaagtttggttgacaaatctagagcaaatccatcacaatccaattataaactccttaaagtcatgaaatccaacataatctcaggtaacacaagtataaatcactaatttggccaagagaagactcatctcctaattacctcaatgaaaaaactttctctttctgcgacttgtcgacactcttgcaggccaaatacttgatagtcttcttcttccttcctttatacacattctacaatacaatttgaacaaaacgttacatcaatggctttgtgaatatatggtattcccttggttaccttaaatcagagattcacctccaaaatccaaacccgaaacttaaaaaccctaaattagatcgaagtttctattctatcagattcaaaacccacgaatcagcctaacaatgttcaactgtgtcttcgaaatcgaaaatccccagatgtaggaaaattgtaacaacctgtagaagcaatagagaaagagacttacctagagcgatgttgtcgcattgaatagacttaggcttgttgagaccatgagaacaatcttcaattcgagtttcataagcaagagaggcatgtaggctcgatcgaaggtaatttggaagctcacctcttatgccactattggagaagaaataatcactcgtgccattcttatgtttggaatattattattgatttttatttaaatcgaaaaatgaggaaaggacgaaaaacccttgcgaaaccacaaaaactacaagaaaacttaatttgttgggctcgggtccaaaaaaaaatgtaaatactcggcccagttgtattatttacagaaaaaacctaagtaaaaacctaagttcccccttttcacttctcgacttcttcctcttctctccgtcgtcgtcttctctcgtctccgacgataccactttcaccggaaaaatcaatctcttctattcttctttcttctccgttttcgttcgtctttgtctctttcatatccgcaaatttattttccaatggctagagtaaaagactcatctggagaatatgaatcaactagggttgaatcgaccggcgaaattcctccatcagtcgacgagaccgccgccgagattccccaaagagatgaagaaggcgcagagcttcttacaacagaagaggaagccggagaaatccagcctacaaccggcgattgtgacgccgccgatttgggtaattcaaacgccgtcgcatgggaatcaattgacgatctttcaaacccaaatgccgattcttgtgcagaagaagaagaggcaacgaatgcagttgttcaacatgatgatggagcaaataaggtatgatagaagaccgttatttttttgattaggctcgttttaggatattatgcatgcattggtaaatgattggatttgtgaatggtgcttcagatagaacaagtagtacaactaggtcgtaaatttgtgaatggtcattcaggaacaagtagtacaactaggtagttaatgtgaaattgaaagtattttgaattgaatatgcaggatgatggtgatgatgataacctgccgcagaatatgcaggatggtgatgatgatcttcagccgcagaatatgcaggatgatgatgatgatgatgatgatgatgataatcaaccattgccgccagaagttatgtactttgatccaactacctacacgaaggtgtgtaagataggaacgaggtgtcagttggtacaaacagtggaatttatagagactttggatgcagaactgaagtggtttaggaatcatgaccaatttaagcacatattccacatgcctaaggagcccaatcacatgattcaaggcatgtggatgcttatggttcgcacggctaagacagaattggagagagagtgttggtttgttgtcaatggagtacctataaggtactcaattagagagcatgcattgttgaccggtttgaactgccgtgagtacccaaaaaactataagactttaggcagtttgaagtttgttgagaagttgtttaagaggactgaggacatcaagattaaagacgtcgaagagaagctggaagagtttaagagtgagaagtctactgctaggttgaagttgacaattctgttattcttagctaaggttatgaaagctgattctaaaggggattcgaagatagaggagttgcttcttaggattgtggataatgtcagagcttgtgagacattcccgtggggacgtttttcttttgagcagtgtatggaaggggtgcggagagtaatgaagaacatgaaaggtgtggtgaaacccaaggcacaaactgctttttatggatttattactccacttgaggtaagtagtcgagtaaattatatgagtggctagattttgttattgtgaacttgcatttacttttatgtttttgtgtctagattctggcatttgagtg

SEQ ID NO: 21542 - DNA, 981 bp, Arabidopsis thaliana
gaggattatcatttttagttatatggctaacatatataaacttggactttttaggacatgagttgggagatgtagaatcctggtatttactttaactcagtatttatgatgatggtttttctaatttcagtttgagttaaatttttatttcggttgatgcggcttcaagacacggagaagtctatgagagacaagacatatcttcaattttctttaatttaataaagtgttattttattattttgttttgaagtggtttaggatcagtttagatcgtaaaccgattaaattaattaatttatgtgtattttgaggtcttgattcgggggtatctaactttaggacatagtattattgactttattatgtgggcattatgtgatacttctatcatgtgaaaatagatcgtgtctttttgttttattttgtggattgttttggttttgttaaattgatcggataatttgggtttggtaggagtttctggttcgaaaaccaaacacgatccgaattctaatagaaccgaaccgatctattccgacggttcataataaaacggacccgtcgagttctactcgctacaaacacacaaaaagctccgcaagagaaaaagaaaaacaagaaaagggggatctagggtttgagaatggcttgtgaagttgatactgatttgagcaaggctggagattcgacaggtttcaatcctccactgccgaagaagccgaaaatcaatgcggagaagacagatttggatgcgatggtcctaccagggctttgtccagcaggcgataggatcgtccgctacggcaaattgagtgatcctgaatatgtgagacaacgtcaggtctttgacgatcaatttgaagacagtgaggtataaatatctattccattacgtattagctaagaattagatatcgtttacgtgaactctgttattgtcatgcttaatcgtgcttctcttgtatttgtactcataac

SEQ ID NO: 21543 - DNA, 627 bp, Arabidopsis thaliana columbia
cgaaacaaaccacagaacaattcacactaaacacacaaatgacaaatcgaactgtgtaagatatacataattacaaatacggtcaaaaattcaaaaacggatataaaaataccccggacataaataattgtttgaaaaaaaattcaagacttatgtatatatgttgcacaaattaattatttatatggaaaattggttaattaaataaagaacttataaatttcagtttcagaagttgaagaatttaaccgtagtttcttctactaggacgtggcattcctcttctctggcttgatggccagtctccagagtcattgtgttcactgcttctctcaggattatagtaacctcttgagtcataaccattgcctcctcctctacgtccatgtcctctttggttagtacagttatggttgtttaatcttgagaaccttgaagtagaaccagaccggttcaggtccaatggcaatggctcaatcccttgcaaatcaggctctggggtgaccaaaccgggcgtttcgctcatcatttcctaaatgaattgatccgtgttgatagaccgggaagaacatctcataagagaaaaatgttgtttatagagaaattgtgcacaatattatacctttt

SEQ ID NO: 21544 - DNA, 486 bp, Arabidopsis thaliana columbia
tcaacttttttttttgttttcttggtttttgataacctatgcagcaatacctcaacaagtaaataaaacacagatcagaacatttcgattgcgatcaaaatgtatccaagttacaagttttattgagatgaatttttttgttacctctattagtttgtctatttccaacattgtagcttccattgtaagtttctgggtcatttgcagatgggtctgaacctacattgtcaatatcataaccgtaagcgcgagacaaattgtctagctcgtgagaagactgagatggtagctgctgttgctgccacgttgagtcgctgtagactgagccgcctctgtacagttcccctatagaaccttcaaaaccattaaatggggacgaggaaagtccagaacttgtcccatagttccttccaaagccattgttatcattactaacagcagaagaagaaggaagtcccaatttcctctgttgttccattcgagaca

SEQ ID NO: 21545 - DNA, 527 bp, Arabidopsis thaliana columbia
aagccttcgagaatctccagccgaaactacgaccacctgttctccttcagaactcccagacccacaagagtatcttgagctcaataaagccatcgtctatggagttttatgcgaaccaaattcctctaaaacccacatcaagcacttacatgctctcgtcactgatgggtacgcgtttttcactagtttacttattggaatcgttgttgaattgtatgttaagccatcagattccgctaagattcagcttacttgggtaactaaggagatgattgatgtttcaagtgtggggattgaggatttggttgtgtcgttgttgcgacgaattggaagtggggattatggtgatcataatgtttggctttgttctgaattagtcagtttgtttcttgagaaatgggaatgcttgcttgatgattctccattgggtgttgactagtgctctgtatagtttgcttcggttattagcggatcactatagggttttaggcgttgtgaaactggcgaatgtgatgagattggagatc

SEQ ID NO: 21546 - DNA, 550 bp, Arabidopsis thaliana columbia
  unsure (1)..(550): unsure at all n locations
aatgatggtcccatggaccgtagacctcaatagctctcgtctcttgttgcagtctcactgaacagcttgattctatgacaatctctatggatgatagacgtctttctgcgctcaatttgccttttgcatgtaaaaaggtaagctctcacttttctcttacatgtgattcactgattttctgttggaagtatgcaatacttatagggttttcttgcatgaaattctgaagtggtattcaactagacacaggaatgctagggtagatatcgtaaagatgnagattaaattaataacaacggatnattggttgcattatctattggaataaaaggaaagaaaattaaaattaaagggggatgtactcttagaaatgtgataaaaggagaaatgttgatatgtgtgatataatgatattatttgataaattgtgcatgttatagacaattaatgagaattttgttattgtagtctcttgataagaatgactgtgaaaattatatttagagagagttgagacattaggagaatcaagtaatgttttggagttgat

SEQ ID NO: 21547 - DNA, 484 bp, Arabidopsis thaliana columbia
tatgtctgtaatttgaataacatcctaaaaaattggaaaaaaagaaaagaacaacctttgagctgtgttttgcaatagagtgtatttaaatttccttactttttagtcgaaagaaaatacagagaagtcttaactctaattacatccactaattatcttaatgatggggttgaggtccgaaggtgcgtaaccatctgttgaagcggtccataagtgacaactctatcttcttcgtcggaacattggggacaggtacggctttggtgagtggtccgaccacgactcgtagcttaagcccagcgtaacagtgacctggagtcttagagctaatgaaataatggactcctggttctgtgagcgtgacgagatcgtggcctgtcatgtgcacggctacgggagaaatcgggtagcaggatatgaattcaaggtccccggtgatctctaagacgtcgttgacttcgttgtcgtattcgaaaagaagact

SEQ ID NO: 21548 - DNA, 580 bp, Arabidopsis thaliana columbia
ttttctaaacagcagatgatctcactttgatcctcacatagctcttctgtttgcagatccagagagacccaagaatgacaaagccacgattctgactgatactgttcagttgttgaaagagctcacatctgaagtcaacaaactgaaatctgagtacaccgcattgacagatgagtcccgcgaggttcgtaccttatcccttacgctccaggcttttcctaacagaaaaaattagcagtctacatgacgtaaagatatcgatagggatcccaatatagataactcattgtctttttgcttttacgatatggtgactacacctatttcgtaagatgcaaactcagacgggctatataatgtaactgcttataggacttgttgttatcatcaatagcaacacttacaaatttactggtacttgtataacaacggttctttctgtagttgacacaggagaaaaacgacctgagagaagaaaagacatcgctgaaatcagatatagagaatctcaatcttcaataccagcagagattaaggtcaatgtctccatggggagctgcgatggatacacagtcatgat

SEQ ID NO: 21549 - DNA, 581 bp, Arabidopsis thaliana columbia
gtcattttttggtggcagactctagcgggttgtgtgccggttacagataatttacggaaaagaggtattaattgtgattcagggtgtgtctgatgtggtaacgtagaggaaacaattaatcatgtacttttccaatgtcaccctgcgcgacagatatgggccctttcacagattccttcggcggcaggaatatttccatatgcctctatttatgcgaatttggattatttattttggaggattatttcggattttgattctttttcatacccatggataatttggtatatttggaaggcaacgaatgaaaagatttttgacaatgtcgataaagatcccttaaaggtattatgtttcgcaaaaagtgaggcacagtcatggaagtcagctcaaattgagttgcatgttgaaaatcatgaaactcctaatttcggatctaggagtagagcgagggatatctatcctgatatcaatttcttgggatatcgttgttacgtggatgggtcatggaaaaaagacgattttttctctgggacaggatggtactgtacatcagcaattggagagacgcaacaatggga

SEQ ID NO: 21550 - DNA, 498 bp, Arabidopsis thaliana columbia
tagtaacggtcgccagtgtgctctaaaggactataacctaccccagtggtttcgccagcaccaggagtatccgccgcttgctggcgcttatagcgaccatacagcagcaacgacgacatcgcagcaaacgaaagcagggcggcaggcagcgcacgtaattatatgccagccccagcgtcacatcatacctccgcaatatgcgccgacgcgtaccgaggttaaacgctatttgcccacctgcggcacctaataactctccgcctttggcgttttgtagtaacaatatttgtagcggtgctgaaagggcaaataatcccgcgcaacaaataaaagcaaaaataagcgacgttgttttcatgccgccgcagaaaaagagcatcagcatgtgcagtacaattataaagtcagtcactgctgcaatgcgcagtggtgaataacgtcctgaaatcctgccacttagcatatttcccagcacatccctagcccaactaacatcat

SEQ ID NO: 21551 - DNA, 726 bp, Arabidopsis thaliana
ctgtgatttctgcccagttgttctgtcgtatactgatagtgatatccctactcgtctctttacgttgtccaaatgcattctcaatagatgaaattggctattgcaattatttctagcatcagtttccaccacttggatatcccttttgattttgattgtgtttcctgtaggttgaagaattgtattccctggattctgattctctcaataacctcaggtgagtagttgcatccatggttatttatttccttgtgatgtttctggactcttttttgaatggagcagaaatgatattcttttgagccagacctcgaagtctttgagttagatttcttacttatctatgcctttcttgataaatgcttttcaaccgtgtggcttccttgtagacccgtatacggtctgatctttcttttcaaatggcaagctggggaaaaagatgagcgtccaacgatccaagatcaagtttcgaacttatttttcgcaaatcaggtttgtgtcgataacataagcataagattttgactaatagtattgtcttttaattcgtgttctcaaaattccaattttataggtcattaacaatgcttgtgcaacccaagcgatccttgctatcctcttgaactctccagaggttgacatcgggcctgaactatcagcgctgaaagaattcaccaagaactttccatccgacctcaagggtttggctatcaataacagtgattc

SEQ ID NO: 21552 - DNA, 2496 bp, Arabidopsis thaliana
gttcttagatttattggtattcaccccctgattgcacttttatttacctgttatttgtatcccctcttgattgtattttagttcttaatattgtcaccttttggttctactcgacccaatgatcgagtagggctcttaagttcttatttttacctgtttgaatcctgacctaggattgttactagaaacccaccatcattatgatctggcttgacttagttgcttctgtacacatcttgattgctagcaataacagtggactggattgacaccccctatagctgcattgacatgctagtgtttaaggggaattgaactgaacctcacattttgcacataagtaggcataaaaatctacttatcatatcttcttcagaggagttgaatggcattatcagatggctttggatgcagctagtaacggaaatttcatgtcaagatatccataggatgcaacaatgttgatataaagcttatcttccagcattagtaccaacatcgttgacattgcaaggaaaacgcaagttcaatatgttgcacaggttgacagtttagccacttcagagaagatggatcaacagagatacatgagtttcaatcaacaatctacacatcaaaaactggctcaggaaactacaagcttcattcagaatcatgcttcttctacccaagcccaccctccacccgacaccactaggacgattcaatctatgctcgaacagattctcaaaggtcaagagaagcaaacaacagattttgatcacaaactggttgcattatccgacgatgtgaatgggaagattcaaatattgaacaattggatcaagcaattgactacaaacaaagaagatgttcgtgctattgacttaaggagtggaaaacagctaaatctagtgcttcaacgagagcttcctgcagccaaaattgtcaatttggaagaaaatgatgttgcagtttttgcagactagacaccagtgtcgatcgacaccagccaacacagacactatagaacccgacagtgtcaacctacatcaattgtgtgtcgatcgacaccaacccagtccagccttgcgaattctctaaaacccgatttcagctgcagcaaaggtaaccaaacccaaggttccttttcccaagagtcctaggaagtccaaacaagagcttgatgatgctagatgcaaagttatgatggataagctgattgtagagatgccacttatagatgctgtgaaatcttctcctatgatcagacagtttgtgaagaggatcgttactaaggatatgcttactgagaccgttgtgatgacgatgtctacacaggttagcgacattattcagaacaagattccacagaaacttccagatcgaggtagcttcgttctcaattgtggtatccttaacgagagttttgatcgatgcttgtgcgatcttggttctagtgtcaacttgatgccctgttgagttgcgctccggcttggtttgacagatttagagcctacgcaaatcactcttgttcttgctgatcgatctgttcgtagatccgatggtatcatatgcgatgtccctgtacaagtcggtactagctacattcctacagatcttgtggttttatcttatgagaaagaacctaaagatcctctaatcttgggaaggcctttcttagtcacaactggtgccattattgatgtaaggaagggcataataggcttgaatgtaggtgatcttacaatgcagtttgacatcaataaggtggttaagaagcctaccatcgatgggaagactttctatttggatactatctcttttatggctgatgaatttctcatgaagatgacacttgctgttcctttgaagcatgctctgattccctcaatagacaaagttcccaaagggtatggtaagctgctggataggattgagcatgtaatgcaattggttgctcaagaggagttaattggcacatcttcccaagcagcaacaattggcgattggagcctagaaaaagctcctaaagttgatctaaaaccacttcctccagggctaaggtacgcatttcttggtgaaaactctacttatcatgtcattgttaatgcttctttaaacaaggtagagctcactttattgctaagcaagctgcgcaagtatcgcaaagctcttggctattctcttgatgatattacaggtatctctccagacttgtgtatgcataggattcacctcaaggatgagtctaagccctcagttgagcatcggcggagactaaacccgaatctcaaggatgctgttaagaaggagatcatgaagttgttggaagttgggatcatctatcctatttaagacagtgattgggttagtcagtgcatgtggtcctaagaaaggaggtgttagagttgttaagaatgacaaaatgagctgattcgtatacggactgttaccgggcacaggatgtgtattgactgcaggaagctgaacgctgcaacaaggaagaatcatttt

SEQ ID NO: 21553 - DNA, 564 bp, Arabidopsis thaliana columbia
ttctagcttttactgttgttttattcttcattagtgtatccaccatcaagtattatggaatcaatagtgtagtgacttcagtcacttctagttttgtgccttgccacgagaaaataaatgatcttgataaatggatcaaacctcttgtggttctcatgcataatatgagcgatgaagagcttctttggggtgcatctttcatgcctcggaggaaagagtacccgtttaatcgggtccctaaaatcgcgtttatgttcttgacaatgggtcctttgcctcttgcaccgctttgggagaggttattaaagggtcatgagaagctttactcagtttatatccattcacctgtatcttcttcagctaagtttccagcttcctctgttttctaccgtaggcatataccaagtcaggtaatagctcttaatctaccttgcaagatttgtaggaaaacttgtgattcattgactagttggtaacttgtttttatatctaatttttattggattatcttcaccattgggcaggttgcagaatggggaagaatgacaatgtgcgatgcagaga

SEQ ID NO: 21554 - DNA, 616 bp, Arabidopsis thaliana
ctgtcacatttcaaaatgactcattttgatttgtaactaggaaaagaagagcattaccatgacatcaaattgctcaggcttggcgacaagctgcatacagcaattgtctacgattatttcattgtaagtaatccccgaataatgtttagcaacctctctacaagattcaaggaagagcccatccgcaagcttcataatgttagctttatgaacagcagtcactttcttcctattgtttagatacgcatactcaaatgcatatctcgctattctctcagaacaaaactttgttatcacctacacaaacaattcaacaacatcatgtatacaaaagggatcacaatttggactaaaaacaatccctataattatatatggtttaccttaaggctctcgacaacaccaggaacaacctcatgctcgagacctgagtactctccttcagtgttctctcttatcacaacgatatcaacattttcgtgtcgcgtcactaatccagggacattgatgcaattgacaagagaagcgaagatatcgagttctttcctcaattgcatattcaaagaactgacaccccaccaacaggagtcgctaatccactttgagacaaaccttg

SEQ ID NO: 21555 - DNA, 579 bp, Arabidopsis thaliana
tagtaacgtccgccagtgtgctctaaagtaggtaactcaggtacagagtgcaccagaaatggttaggtttgcttggattgacatgatttaagcggtagtctactctcaagctgtggtggaaacgtcaagacatgggaagagctgcagcacgatggctactatctaccagaaccacagcgtaggatgcgctctgtcggtgcaggatcagctacagcaggataagccaaacatagacagcactagatagtatgagactaataaaccataacctcctgaaaatatcctgtgtatgataggagatataatctaccgtgaagtaacatatgagatgacgatagttaacactcagtttagcccatgctctagtagacgtcatcacgcagccttgctgattctcttcgctcccctcttactgctttttcacctgttgcgacttctttttcggtacacgaaccagccaataaaggaaaacagccgcaaatgcattgaagacgatgtagacgaacagaatcccaacattgcgccagttatcatcagggttgatactcagcgacgccaagaattgattcgttgaggaga

SEQ ID NO: 21556 - DNA, 2031 bp, Arabidopsis thaliana
tactatgctttggttctgagtccccgccttcactcctctccttcaactatgtcttcttatttgcttgagggcaagcaaagactaagtttgggggagttgatatgtctataatttgcatgttttcagtgtctattcatcatcactttgagtctagtttcgtatcattcatcactgttttatatcatttctcatcattcttgcacactttgcatgattaggatagctttgcatacattgtgcatttctgagttgttttcaggtgatttggagctgtttgcgagcaaattggaagaaacgagccagaaccagaagacatactcgacccccaggccgagtgactttggagccattcttcccacatactcgacccccaggtcgagtgactttggagccattcttcccgtccactcgaccaccaggtcgagtaacctcagctcaggccactcgacgacattactcgacccccggtcgagtaccgcttcgccacaccacctgaccacactcgaccattcactctaccacattactcgaccccctggtcgagtatcatcactcaccaccatcaccatcactcgaccggacactcgatcacgtcttcacagtctactcaaatccgcactcaaccagacaagctgagcacaaggaagaaaagaggagaagacaaagtgtttggaagcggcctggacctccatcggatcacgaagcccatctcagcccattatcactctatgggccgggcgattaggttattggcccgtctactatcattttatttcgtttggtataaatagatgttttagggttctgtcctaaatcatctagtcgacattgcgtttttgcttcagttttattttcagttttactctgctacgccgcttttgcttctgcaacctgtagttcgcgatttttccaagttattgagattccgcgtttgatttcattagtcatcttgtttctctactctttatctctttacttatgcaatattatcgtttatctgcgtttatgtctttgagcatgttgtctgagtagtgacttagaattcttagggatgggatagagtagttgtggaatccgtagtctatagaatggttaagttttagaattgattgaatccctttaggactagttgcgtttactgctaatttctttctgatcaactggaattcgatcccaagcattcccgcacccagaaggtgttcgatggaatgcttgatccactagttcctgagatatgcgtctctatcccaagggattggccgtttagagcgtttattgactttatcagtctgttcgtattgcctgcatagttagattccgttaatgggaattagtctgggctagctttgcttgaggatttctatcacgggagtgaattggtctgttattgaacctgttgtctagggatagcttgattgcgcttgttaaccattcgaataggctaggacaccactctactcgattaccccatccttaggaatttctcgtctatcttatttctctgttttatcgtcatcgcttaatcgttctcattgcctgtttcttagtttttacaatcactcgaccaacttactcgaccacacccagtgtctgacaacagactgtgcagtcgagtatagctgtttcatatcctgtctattactcgacctgttactcgaccacattctacttctggcatcagcctgttgtggtcgagtgattttagtaattctgttattgcttctgttttctgcatgttcgcttaggactgttagaaaccccaaaactgttattgcttggcttgacttagtgacttctgatcacatctcatctgtttgcatcacacccatttggattgacacctaaaatactacaacgacatgattggtgttttaggaataattgactaaaaacctattatcaatttggcgccgttgccaattgggtgtttgtttgctatatttgagatttcagaatatttaagatcaagttctttttcattttttctgaaagttactaactttgtgttatttctgtttgtctgttttgatt

SEQ ID NO: 21557 - DNA, 793 bp, Arabidopsis thaliana
tacataactacaatagtgtggaagactgttcaatcaggttgaattaccttcaggccatttttttagtttgtcatcgcccggattgtttcatcctggtaacaccgcattgtcaagcggtttgtctgatgcctccccatcttctctaatccacggatgatctgcgtatgtatcaaaacgttattaaaattggataaaagaaggtgttttcatcaatttattcatcaaaacatgttataaaggggtcttacttagcacttccgcagctgtaagccgatctttagggtcatattttaacattttcctcacaagatctttggcaccatctgatagtgctggccatggatcagctgaaaaatcaagttgcccttgaagaatggcatcaaagatccccgtttcattttctgcacaacagaaagaacgtgactatacattccagtccaacatttaaacagtgaaaccaaattctcttctcaaataagatcaagacaatacctccccagaaaggcggaacaccactgagaaggatgtatagaatcacaccagcactccagatatcagcctctggtccatagttccgttttagaacttctggggcaacatagtatgcacttccaacaagatccttaaacttatcacctgcattaatggatcaacttcattagagggataaattgtctatagaaatcaaatagggaaggatagaggctgttcaaacctggcttgaagaagacagagagaccaaagtctgtagctttcaatggtgagttctcatctttactaagaaagagaaagt

SEQ ID NO: 21558 - DNA, 2262 bp, Arabidopsis thaliana columbia
cttgcatatgattaagtaaataagattacttatggctctatgactttcaggaacgaacggtgatcgtgggaaggatttggcttaggcgcgagagactcaaggccgggatgatgggtggtgatagttcggatagtctagggatcgattatatgacttgtaatagcttatatgcaaactcataggttgtatcgaatcctttgcttaattaataaagtatccgattgtttgtttactctattcgtctcatatattgaatctcggaatcatatgaaacggattagactaggaaagaacctcataaacggttagggccgagtcacttagtggcttgggtcgagagaactcgcccggactttaggcagtccggatcggggcctttcacaaatccctcgcaaaattgctaaggttttgtgaggaaccgacaaccaatgaaatcgcttcaattttgcgagagacttgcgagggagccgtagcaaatccctcgcaaactagaaacgattacacaatgactcgattagggtttttggatcattttgcgagtgtgagagtcgaaactcgcacaatagaaattgttttaagggtttcttcaaagaacgaatctttgtgagattctcaaagaacaacagaattctcaattaccgcgaacggtggtcttgattgtattaatgagaaagtaatgatttgatcgtacaagtgttctagaatatgaaaataagtgtttttgccttcaaagtcagagcgtttttgataacctgaagttgagagcgtttttgtgcgtgtcccctttgtttgtccttcgctttttatagacctttggaatatcgcccctcgcgatattctcggaagatttctctttatctttaagttggtgaagtagattgtccttatcttccgaagattctgtgaatttctgtattcggtgatatctttgaagattatctcttccggggttttcggaaatgatatgtttgattttatatcggctaagtcctttttgaaggttttctcatctaacccaaactttttccgagccggaatttagctgaccttgggtcgtgctcgggcagctcggaccgtgatattcgaggatgcgttcctgaggcgtcttggagcccgcctcgggatgaattgccaggttttatgtccgaggcgttccgaggtcgggtcgggggaccatttcacgagaatgctctgaagcgttctcgatatcgcctcggtatggattcttgatgcgatctccgaggtgttttatggcccggttcgggataactcttcgacgtctcccgaggcattgaaacatggttggctcgcttacctgggtggaatccgaccccaacagtttgcccccatctcattgacttagcagagagacgatgagcttcatgaatggattcccgagccgactgttcgtcttctagttctgtcgcttcatcttcccggacggtcaaacttctgtcgcgtgttgccgactattcttgagaagtggaaacgtttctcgcttattcccgaggatcacgcggatcttttccttctgccgagcccacgcgcttgaacgcgttttgaatgtttgctgcggacccaacgcgctcttgaaaactctttatatatggcaagccactcattcgagatttcatttgaagttttcgaagaaaataaacaagtttgcttccttctctctgatcttgatattcctatcgttttttcttttctggcgaagctccgtcgttcattttgttatttttgatttctccgggatagaaattcttgttttctggttgtttcccttctcgtctatcgttcccgagccgagaatgagtcctagacagtctccgtcgatcccgagcgcttctcttgtcgattctagcgactcaaatcacccagatgatcttcccgcgatctacaaacggagagcagtttggacatcttctgaagagtatactgtttcttcttcggatgcccccgagcaggcgactcccgtcgcggctcgggaagataccaatgccgatatcgctcgggaactggatttgcccgatgatcccgagccgcctcttgttcgcaggtcttttgccccgatggctgacgaagccgagacatccaattggcgagaagtgcctgagcccttcatgccgacggttaagattgaggattttctttacttaggcccgaacgagacagaagatatcctgcgtcttaatgagcaaaaagctttcgaaaaggccgagaagaagaagaggaagaaaagcaaaaaggtgataatgccag

SEQ ID NO: 21559 - DNA, 2864 bp, Arabidopsis thaliana
cgcatgtcattaagggtccggataatagccacttgtagagtttttcatctaccagaacgaaacgtgcagcctgagctttaagttttcgagcttcccatttgtccgagggaaatttcccttcagatatgtagcttttgatgggttctatccactctgagctgcactcatcttggctgtcgtctggagcgtcgtcgtgatccgtgccgatttgtaatggggaggacatgttcttctttgccaaggtcaatgcttggtttttcgatgaactctactggaatgactcttttcaggcttgggtcagatgtcgaggctagagcagctagggcgtcagccgatgtattttctcctcgagggatccttgtaaactcgaactcgttgaaattcctcgctagattttgtacataagtcagataggcttccattctttcgtcccgagctgtgtattctccgttgaactgatttgcgacgagttgggagtcgcaaaaagctcggattttctctatctttagcccctgagcaagattaagtccggctacgagcgcttcgtattcgaccacattgttggtagcctcgaagtttaatctaaatgattgctcgaggacttctcccgttggcgaagtgaggcggatgctacacccgaaccttgctttgatgacgagccgtctacgtgcaataggcaagttgtatcgagtggattttctcaggcctcctttgttggcagttcgacgataaaatcggctaggacctgggattttgcatatgttttgttccgatactcgatgtcatattcgctgagctcgatttcccatttagctaggcgtcctgattggcttggaatgtgtaagatagcgcagagcggcatggatcccattactatgatggaatgggattgaaagtagggtcgcagtttccgagccgacattatgactgctaaagcgagtttctccatttgtgggtagcgagattccgcgccggtgaatgtctgtgagacgtagaaaatcggtttatgttcacctctgtcttctcggactaacactccgctgacagcaatatccgatacaagtatagtggttctccgattacgggctttgcgaggatggatggtgttgccagatacttcttgagttcctgaaaagcttcttcgcatcgggtcgtccattcgaatttcttgtttccccgaaggacatcgtaaaaggccaagcatttgttggttgagcgagagatgaaacggttaagggccgcaactcttccgttagacgttgcacttctcgcttcttttgaggtgacgccattcccaacaatgcctcgatttgcttcggatttgcctcgatgccgcggtgcatgactagatacccgaggaactctccagatcttaccccgaagcggcactttgctggattgagtttgacgttgtagaggttaagctgctggaaacattcgcgcaaatgggatacgtgttcttcctctgccatggatttcaccaacatgtcgtcgatgtaaacttccattgtcttcctgatctgtaatgcaaagattttgttgacaaagcgttgataagttgccccagcgtttttgagtccgaatggcatcacttggtaacaaaagatgccttgttcggtgtagaatgaggctttttcttgatcttcggggttcatcatgatctggttgtaaccagcgaaagcgtccatgaatgacagtagcttgtttccagaagttgattctacgagacgatcgatgtgcggtaatgggaagctgtctttcgggcaggctttgttaacgtcggtgaaatctacgcagactctccatttgccgtttttcttttttactacgaccgggttcgcgatccaatcaggatattttgcctcggtgatggagccaattctcagtaatttttctacttcggctttcacggcttttgctcgctcccgacccaattttcttcttttctgcttaataagtttgaacgtcgggtcaatgttgagctcgtgtgacacgatgtcaacacctactccaggcaaaacttctggggaccagacgaacgtattgagaagccaagtattgaggtcggcgaagaagaacatgtcctccccatacaagtcggcacgaatcacaatgacgctccaggcgacaaccaagacgagtgcagttcagagtggataaagcccatcaaaggctatatagccgaaggaaaattgccctcggacaaatgggaagctcggaaactcaaagctcaggctgcacgtttcattctaatagatgaaaaactttacaagtggcgattatccggacccttaatgacatgcgtggaaggagaagcggtttgcaagatcatgaaagaaattcacggtggctcgtgcagaaatcattttgggggaagaactttagccattaaaataaaacgccacggattcttctggccgacaatgatcaaagactgcaaaattttttcaatgcgatgcgaaaaatgtcaaaggcacgcgccaataatccatcagccagccgagttcttgtcatcaatcgccttgccgtatccatttatgcgatggtcaatggatataattggacatatgcatccctttaagcagaaaaaattagttctcgtcttgaccaattatttctctaagtggatagaggccgaatccttcacttagcataaaggacgctcaagtcgagaacttcgtgtggaaacatatcctatgtcgccacaggataccttatgagatcgttacagataacggctcacagtttatatcaacccgcttccaaggcttctgtgataaatgaggaattcgacttaccaagtcaacaccacgatatccccaaggaaagcccaagccgaggccgctaacaaaacaatcctcgag

SEQ ID NO: 21560 - DNA, 604 bp, Arabidopsis thaliana
tagtaacggccgccagtgtgctctaaagatgaggcgactccagtccaggcagataagaagccggccgaagataagccaaaagagcccgaaactcccgcagagaagttgcctgctccagttgagtttcaattagcggaggaagatgaggcgcttctggacactttattcggcacccaaaacaccaagaaaattgtcgccctccataagaaggcactggcaaatccaaagactaagccaagcgatctgggacgattgaacacagtcgttgtcaacgaccgcgatcagcgcatcaaaatgcaccaggcaattcgtcgcatcttcaattcgcagattgaatcttcaacagacagtgaaggaatgatggttatctcagtcgctgccaaccgcaacaagaagaatccacagggaggtggaggcgggcgtgagaggccgcgcgtgaattgggacgaactgggcggacagtatctgcactttactatttacaaggagaacaaggacaccatggaggtcatctcgttcatcgcccgccaactgaagatgaatccgaagagcttccagttcgcggggaccaaagatcgccgcggagtaaccgtgcagagggcat

SEQ ID NO: 21561 - DNA, 1655 bp, Arabidopsis thaliana
gattgttctctttgagactatcctattgatattggagttttgagttctaaatcttctacaagagaatcatgagtaattacagtggcaattcttcagttgatcctgactacaacatggatgagacatagtcgtcatcttcaaggccagagagagaaaagatagaatttgatagcttcagaagaaaagctgagatagctcgagggaagagagcaatgacagagaggtacgagcttatagatgaggatctagaagacgagtacatgcttgagcatactagtagagccacaaagcttcttcacaaaccagatgtattacctgctgaggagtatatcagactcttcaaactaaatgagttctgtagcacaaggtatccatgctcgaccacacttgcataacttggattgttggaagatgttcaacacctgtaccagagtagtcatgtggacactctgatggcttatccgtatgtagcatatgaagaagagacaattcaattcctctccacacggcaagtggagctttaccaaggtatgacctctgatgagttggattgcgaaggattgggattcttgagattctctgtgtatggtcatgagtataggttatcaatcaaacgcttggaaggactttttggtttccccagtggaacgggtactaagcccaagtatgacagagaagagttgaaagacttatggatcaccattggcagctctgtaccgctaaattcttccaggttaaagagcaatcagatacgcagccctgtcatcaggtacttccagcgttctatagccaatgtcctctactccagagagatcacagggactgttaccaattctgatatggagatgatcgctatatgctctcaaaggcactctctaccaaactaagaacaacatatctgtgaaatcaatgacacacctttctctgtacttcttctaatccacctgtgtggatacaagagctgggctgtcagcaataatcacaagagagcacgaggcgctctttgcatagtcggtgttgtgacaccgattctgattgcttgtggagtcccaatcacatctgatggactcgagccacgggcaattgatatcaagcatctacgtcactgcgaagtcctggagttagcatcctacgtcctgaagttcggaatggttggcgacatgcactgttttaggtttaagcactctacggataagagagctagcatccttctccccagccctaaggttacacggataatagagggagataacattgattttcggcctgagcttggaaacctctactatgagaacgctccgccattggatgaggatgatcttatagaagaagctgcttaggatgggatggatgaagacagagcagtggagttcgacactagcatgtatcattttgatgaacatgtacctctggcgagggagagcaagagcttgagtgaagctcataggaacaacaataagctgcagaagtgttgcaagaagcaggacaagcggctcgccaagtgctttaagactatcaagtttctgatagattaactgagctgttcctcttctactacagctattccacagggacagcctcctctagatatgccattgaggagatttgatgagcctgagcacagacctgagcttagtgagcagagagtctcacat

SEQ ID NO: 21562 - DNA, 509 bp, Arabidopsis thaliana columbia
tgatgctttcaaagctcagaagaatcctcctttgtcaaatctcacaaaggatcagcttaagcagcttgttctcttccatgctctgcctcattactattcgctttcggaattcaagaacttgagccaatctggtccagtgagcacctttgctggtggtcaatactccttgaaattcactgatgtttctggcacggttaggattgattctttatggaccaggactaaagtcagcagcagtgttttctccactgaccctgttgcggtttaccaagtgaaccgcgtgcttctacccgaagcaatctttggtactgatgtccctccaatgcctgctccagctcctgctcctatcgttagtgctccttcggattctccttcagttgctgattctgaaggagcttcttcaccaaagtcctcacacaagaactccggacaaaagctgctacttgcaccaatctccatggttatttccgggttggtggcagtgttcttgtgatcagatgggtttgcag

SEQ ID NO: 21563 - DNA, 592 bp, Arabidopsis thaliana columbia
ggatgataagtaaaagagaaaccttgtgtgtaatccagaggcagtggtgaaggtggagaaatcaattgcgacgaaaatctctccaagtgatgatacgcagctctatccgaatgctcgaaagccaaagactgaggtctcgctcgatgaccggaatttgcagaatttgattgtaacttatcctgtccagatatctaaaatccacaagaaccacaacaaaatcaagaacaacaataaacatcactatcaattcaaagatcaaaagacacagaaacaagactcacagcgaatttcaaagttcgattgtagagagaaacaagtccagagaaaagcttaacggcgtaatcggcgatttcttcagtctcatactcagcgaaagaaagcctttaggtttatcagtttctttatcacgaggaatgtgtagatcgattactctaccagcttgaatcatgatatcatacaaaaccctatcgcttactctttcgtcaacgttccctgatttttcaaaatcaattggttttcgagaagtttttaacagtcaagatcaatggaaatgttgaaagagaaacttacctatgtatacggtgcaattgga

SEQ ID NO: 21564 - DNA, 2640 bp, Arabidopsis thaliana columbia
gtgggagtgctaaatcctatttttatttttattattatccacaaattttatttgagtaaatcttattaaacttagtttcctaaatttaagcaatactcgtttgattgttattttatttaatttaataaaagcttaagttgttgtaatttttttttactttgaatatctatttaacttgaattttacttaactattttgttctctcacttccactctctcaattattttgcaattcttcttacttctccctaaaatttctgaaaacaggtaagttttttttttatatgtttatgttagattttggggtatggaatgtatctcttagcttaggtggttctgacgaggtgtgtcctgttgtattttgaacatgaagattttgtacatgttacgttggttatttatagatgtcaaataacatattgcgagggatttgcgagggatttgcgaggaacttgcgaggaacagcgctattttgctacgaatttgcgagagaagttcaactaccaaccaaagcaggaatattatttaaaacgtgctgacctaacctgccaaggactcgcaactccgacgcaaaatttgcttcagaaagtttgtacgccgcaagtttaccgcagtttgcaagactcttatcgtacatcaaatccctcgcaatttacgatgactttgcgatgaattcttccgtcgttgcaattttctcgcagttgccacgcaatattgcatgggaattctccctcgcaaattttgcgactgattaacgacgtattggttttcccgcgcaaagtgctcgcaagtctatagcaatttgcgagggatttacgccatctcaaatttccctcgcaaattgcatgttttcttgtagattgagagagatttcaaagagatagaaggagacggtggagaggttgagagagatttcaaagagattgagggagagttgagatgtgagagaaatgaaaggaaaattgagatttgagggaatattaagagatatttaagggttttgttttgaaaaaaataagcgtaaaactgatttggaaaaaagaaacaattgtcgcgtaattttttcgttttggagggtaaagtttggtgcccgatgcttttccaacggttaaacttttaccctcgcaaatccgtcggaaatataaaatatttttcttttacatgtataaagtcatcatctcatttccaaatgagtgaactcggcgttacaaacacgctcttgagatacttataacatcgatcatttctttttcgtgactagtttccatgtccttggagtgaaatttctgtgaatctgcattgagaattagatttgatataatcttgcttggtttgacttgagtactagctcacaaaacttcaacctaaggcaaattttctaagtttatgatagttatgtgtgtttattgatgcacaaaaatgcattgatgtgcattcttctaggagcttattcaagtctgacttataagatgttacagagtggatggttcaaataaagaatcaaagatctcaaatgatgattatggcgagacgttaccgcttgtgacgagttctctacttagatttgatcgataactctaaccacacaataatagtgctgaattgagatagaaatttaatgaagcttaagatcaataatggtgacgacgagaggctccatctaagtcgacgaataagacaacatatattagagttcatgaactcaacgtgggtttagtagtttcaacctatagaggaaaaataaaaacagatcaaagataatcaaataaaatcaaaaaatcgttgtagagagatttgtttaccccttcacgtggatgctattattaaaagacgggtacgtctatgaatttgatgagttaacagcagaaggcgacgaacagatcacgactatgacttttttgatgagctaagaacggaagaaggcgactatagcttgttcaatatataattttgagaagatgtggggatgctaaatcctatttttatttttattgttatccacaaattttatttgagtaaatcctattaaactgattttcctaaatttaagcaatactcgtttgattgttattttatttaatttaataaaagcttaagttgttgtaaattttttttactttgaatatctatttaacttgaattttacttcactattttgttctctcacttccactctctcaattattttgcaagtcttcttacttctctctacaatttctgaaaacatgtaagttttttttaatatgtttatgttagattttggggtatggaatgtatctcttagcttaggtggttctgacgaggtgtgtcctgttgtattttgaacatgaagattttgtacatgttacgttggttatttatagatgtccgataacatattgcgagggatttgcgagggatttgcgaggaacttgcgaggaacagcgctattttgctacgaatttacgagagaagttcaactaccaaccaaagcaggaagattatttaaaacgtgccgacctaacctgccaaggactcgcaactccgacgcaaaatttgctacagaaactttgtacgccgcaagtttaccgcagtttgcgaggcttttatcgtacagcaaatccctcgcaatttgcgatgactttgcgaggaattcttcag

SEQ ID NO: 21565 - DNA, 595 bp, Arabidopsis thaliana
actccacaccgttctcgaataagggcattggaaaaataaatgttctcttgtctccaaaggatagttgcagagaagacagctagtacccacgtttttgttccatttcagcattctctccctgttgcaattctattcttcaccaccaaccaagtgacaaacgcatacttcggagttgcatccgagaaccatatcgctttgtagtcctgcatctctggccttgttgaacgaatctgcagccacgtctccttggatacaaaattctttctgtagcagtcatttttcctctccatagtggtatatcatgttctgtttctcgcctatttgttcgcaggttttgcagttcaacttcaatgaggttcacgaagctttgtcgatggtttcttgttcggggtttacttatcgcttcactaagcatactgttttttggaattcccatatctatgcagcctctatctcctaacttttcatagatgacacccattgagctccatgagtcataccaaaaggaagttgtgtccccattcttcacttccaccttgtggaacatctttgcttgttcccgatacttcagcatcttcctccacatcggaatcat

SEQ ID NO: 21566 - DNA, 2743 bp, Arabidopsis thaliana
gcaactacataaacattttttttttgtgaaatcattttcttaaatttttcaaatttttttggtttttctatgccttagatgaatgcagactcaagagtatatacaatgcaacacacacttcctgagccctcccccaaacttaaatcacacagtccactatgtgaataaacttggaagagagtactcgggacaaatccaatcacaaaaacaaaataaagaacaaattacaagagatgatataatacaatggtgaagtgaggcgcttacctcagtcgaagaatgaacgaagttggtcgtcaatggctgcctgtgattgctcccaggccatagacgaactgccctgttctgtatcagctccagcaggtgggtactcgacctcatcagctctgtggcggccaacaccgctctgaggatactcgacctctcttcttcttctgcggccacaccgcggtcgcgtaaactacaagactgcagaagtcgtctgctcttgctgctagatcgagtgagtgtggtcctccacttcctccctgattcacgaggctcgaataaagaatgcctcgcagggacatgcgaaatctcctgctctctatgctcaggcctgcgccgacttggctcaggcgcgtcatatctcctcgagggcatgtccggagggagttgtccctgcggaatagctgtagtggaagaggagcagctgatcttgtccttcagaaactggatagccctgaggcatttggcgagtaacttatcctgtttcttgcaccacttctgcagcttgctattgttcctgtgagattcgctcaaactcttgctttccctcgctggaggtatatgctcactaaaatgatacatgctcgtgtcaaactccgcctcatctacatcatctgtctcatcaacatcttcttttgtaggtccttcggtgtgactgatcacctcagttggcggactgccctcgaaataaagatcttcaagcgcaggcttgaagtcaatgttcatgccctcgagaatcctagtagcgtcaatgcaggggaggagaatgttggcgattctaatcgatgaatgctcgaacctgtagcggtgaaagtcgccagccatgtcaaactccaagaactcacattggcgcaaatgatccaagtccatcatcctcggtgctaaccctggttccctgagcgttactccacaagcttgcagaattggcgtcacaacgccacccacgcatagtgctcctctcaccttcttctttccgttcgtcaatgcccacttcctgtatccacacagatggatcaacagaggcattacaggtggtgcgttattgagatcgcctctcaagacattctttcccttcgtccgccggagaatccctataagcgcataatctatcatctccatgtccgtgttagacacggtgcctgtagactccctagagtaaaagacgttggcaaccgatcgctgaaagtagcggatcacaggactccgaatttggttgttcttggaccgcgccgagtttagcggtagattgttccctatagtggcccacaaatccttaagctcttctctgtcaaatttgggtttggttccctttccactagggaaaccaaacagtttttccaacttcttgatcgaaagctgataccgctgttcatccactgagaacgtcaagaaacctaatcccatggtatccagctcaaagtctgtgagtccctcatacatctccacttgcagcgtggaaagaaactcgattgtctcctccttataggcagggtaagggtaagacatgagtgtctccagataacacttctcgaacagatgttgtacgtcctccagtaacccaactgggctaaagtctcatagcacggatacctcgttccctagaagtcattcatctcaaagaatctgatatactcctccactgtaacctcgtcgggtttgttcagcagcttcgtctccttacgccatgactctggctcatactcagttttgatgtcctcatcaatcagctcatatctactcgacatcgccctctttcctctggcgatttcagctcttctctgattacgtcgggctgtagagcgttcgaattcatccctgaccaggactcagcttcatccctgaccaggactcagcttcatccacattgtaatcagggtccatagagaattctccactgtagttactcattacgaaacctgaaagcaaatgtaactcaaaaataaacgttaatacgttagttcatacaaaaccagaaacacaaacgacacaaaccaaaaacaggtcgagtaaactggtcgagtaaaccgtcgagtaaaccgatcgagtaaaccgtagccggttttgaatattttttttgttttgtgggtagctggtcgagtgattatggagggccgagtgaagcgatggagagagagtggtgaaaacgacgaggttatgcaggagctgcggtagagtgaaccaaacagcaaggtcgagtagcgaatgatgagagtagagtcgcggattagtgatgagatgatgtaagaagaagtcgagtgttgttagaggagcggtgattcgagtgattgactcggaggaggagaaacggctgcttggtcaagtggtgaagaggtcgagtgctttaagacgattgagaggtggtggtggcgaggaatcgtcgagtggtagctcgagacggtggtgacgaggtgatgggagttgtagctgtgaaaggcgagagagaagcggtcgagtgcctaaggaagagagatggtga

SEQ ID NO: 21567 - DNA, 922 bp, Arabidopsis thaliana
taactgaaagcttaacaactcgaaagagatttgattgtgaactaacttggtcaaatactttatcgacccatttcatacaggtgttacaaaggatggctgaagtatatggctatttgaaatcttattaaaaatcttagtgatttcttatcgttagatggaaaaacaaatatagtaatttcgggctccgttatcattgtggtctaaaagagtattctttactcgtgaagatatcaattttcttaccacaacaagtgtttgaaatcatggtcacaaatctacttaccgataagttcacaagtgtaacttctgattaaagatcagaagatttattcaagatttttgatataagatgtttcaattgtaatgcaaaaatttcttaatctaaatatattttactaaactaaataataaagttttttgttgatctaggaagagattatattatgcctcaagtgaaaataaaccatagttggatcaaagagaaatacaaacagaactactctctcgctgattaaaggtcttttgaatgcttaatcaaatgacattataatacaaaacaagaaacaaaattcagcaagtccatgaagcagatctcttgataacaggtttcatctgtttgtcttcttcaagagagatcattccaatatgtgaaggatcttcaagcatcattttcgcaaccaagtaacccgcgattgaccaagtctggtacttccttgcttgttttccaacgtaccttccttgcttaccatcatagtattccggccagcaatctcggtgtagccgtgattcaattagatcaatcgcacgtctcgctatttgaggccgtccagtcttgatgcatgccgtcgtcagcgtccacagcaatactgcacatatcaagatagtgataaggaagcaagcgtttcacatgatgtctttagtt

SEQ ID NO: 21568 - DNA, 561 bp, Arabidopsis thaliana columbia
ctcacaattagagagagagatatgtataatcagttggcgatatcttcgtcttcttcatcttcttcgtactatgaatctttgaaggttttggaagctgatgttcaacacgctaattctttgtaagtcctttttctgggtttcttctaaagtttaagactttagtttaaaattgtttgattagttgagctataagagtatagttagtgaaaaaattgaaaacccagatgataattttaggtcattctcttctctgtgtgtaatctcttctcatcaaaattgggttattttaggaaactccgataaatttttagtttagttttagaaagctttcacaaatagaacattctggaaagttgttgttggttttgatattctaatttaagcaaatttagtagcttttttgtttttgttttggctcaaggtccctaaactttgttattgcacatgttgtgttcgatgaattgtgtatgagaactttgaggtttatatcttttcagggcagaagcaattccaatggggaagaacaatgtgcggcttcagatgaaactggttcatagtact

SEQ ID NO: 21569 - DNA, 485 bp, Arabidopsis thaliana columbia
gaaccctgagcaaatagagctcctcaacatttcgtgtacaacccaacttatatacacgatgaatcaaacccactcaacaacccacccatctcctctacattctccaccggccgatgaaccctcccggcaatcactcgacacacaatcaacgccttccgatcaccaccaccaccatctccaatcacaatagactcaaacgccctctcactcgtcgacgcagtaaaaaccccaattccgttattcatctcccgtttcgccgagaacccatttcgtataatccgacaaacgcaacacttttccgacgaacacagactcgtcgacccgtttatccccaaagcgcaagctacagtggtgccgtgaaacctgagaagctcgtttccgtcggcgatacatctcggatgtttcttttgtaacttgcttgctctgatcttcactgtatctctgtattcttcgaatctcgctaaggttttttgcatgttgtgtac

SEQ ID NO: 21570 - DNA, 452 bp, Arabidopsis thaliana columbia
  unsure (1)..(452): unsure at all n locations
tnnnnnnnnnnnnnnnnnnnnnnnctaaagcgatacttaaattcactttgtcgctgcgagggtcttctttaaaacgctccataagcgtaagaatcgggtcgccagcgtatgcgtcaacttgttgaaacacgcgatggttctccaggtttacgggcaggtggttaaatcacgatacaccggaagaatgcgaagatcgtgtggatgttcaggagcgaacggcaattagcaacagagtgagactcatgacaaacgtacatccgtcagaggagcgacctttataagagcattaaagaacatcaacttattgaatgtttaggattttattggccggatgaggcattcacgccgcatccggcacagacaatcaaatgattacagagcgattaatccacgtatgtcatcgcgagccttgaagtcaggcgcgtaataagatcgtaagcgcttactttcgt

SEQ ID NO: 21571 - DNA, 558 bp, Arabidopsis thaliana columbia
ccagacaaaaccagttgctccaagtttgtgttgttagaacaaatgctctttgggtaatgaaccagagagatgattgtttgctagaaccaaatcaagaagctgactcatgttccagaattcttcaggtatctctccggtaagattattcgccgataaatcaagagtttgaagatttcccagatcagccaaactcttggggataagaccttgaagttgatttgccatcaagctaagatactggagttggctcatttcacctaattgactcggtatctctccggtgagactgttgttcgccaggttgagtatttcgaggttttcaaggcgtccaagctccgccggtatcgtcccgttgagcatgttctccgccgcagtgaacacagtgagatcagagcagtttcctaactcagccggaatcggtccttcgagatagttatcttgcaatatcaacgactgaactcggacgagacgaccgagctgactcggtataggaccggtgagtctcaagaagccagagcaagcatctggagattcacaagttcctaacgtctcgggata

SEQ ID NO: 21572 - DNA, 582 bp, Arabidopsis thaliana columbia
ctgagatgctatatagctctgttctactatgcatgcagatgcagtaattgggattgacaatgtaagcgtaaactcagttgctttggtccattttgatttatcctcttgttagggagataaattgaaatacatctccatatggttattcagctttctttgtcgactgaagcaaattaatgtacaggttagctgaaaaaatcatccttgagtcactgaagaaggggtccatactcactgggtaattctctctgtgttagacatttcaatactcttctctaaaggttaattcattctcatggtttcgttctctgttcctagtgatgtagatgacatgatggtacagcgcttgggtgctgttttcatgcctcatggactaggtcacttcatgggcatcgacactcacgatactggtggctacccaaaggtacatcaaatcttttttcacccaatagtatcatcacgtaaataaaaccacagtccctgtgtcttaccgttgctttgatctttcattcttttagggagtggagagccaaagaacctggattgaagtcattcgaactgcaagagactacttgaaggaat

SEQ ID NO: 21573 - DNA, 648 bp, Arabidopsis thaliana
ccaccttccataaattcaattttccacagaggatcgaacattatccagccaagaccagctttgtgcgaatcctctttccacgctgcatccgagaaaaccctaattgtatctaactgaataaccggtgtcaggactggaactcggagggcctgcggtggtgttgctaaactctgtgcggtaatccactcttttgcttgaaccatggcttgtgatataacatcagatgcctttacttgacggttttcaaaaatcttcttattccttgtggtccagattgaccatagaagccaagggaatagaggtccattgactaagcccgtcggtagtaaaaccacaaaagttctggatgcttcaatgattgctcttagagaggtgttgtggacaaacacaggaagctgtttaaacgaagccttagcccagacttgtttgacgaagctgcaaaaaaagaagagatgattcatagattcctcaagaccacaatggggacaagtcgctgtggtattgattcctctaaacttcagattctctccaatagggattgcatttttcattgctttacacatgaagaattaacttttggggctgtttttgtcttcaaatctctttttgccaattgaatccttgttgattgcaggattgaagagttac

SEQ ID NO: 21574 - DNA, 1385 bp, Arabidopsis thaliana
tcctacatctaagatctcgatctctccacaatttcttccatgatcactgccaattctgtgccaacgccagtgagttcgtattctgtcccttggtacaacaaggtttctgtgcactaccccgtagtatcagcaacgtggctagtctgcagctcttgaatctctctgccaacgccttgaccggaaaaatccctcccaatctctcacttcccaagaatctgacagtcatttccttggcgaagaattcattttcaggcgatattccaagcgggtttgaagcagtacaggttctagatatctcctcaaatcttctagacggatctcttcctccagatttcagaggaacaagtctcctttacctcaacttatcaaacaatcaaatctccggcatgatttctccacctttcgccgaaaaatttccagcaagcgccatcattgatctctccttcaacaatctaacaggaccaatccctaacacaccaccattgcttaaccaaaagaccgagtctttttctggtaacataggcttatgtggtcagccattaaagaccctttgttcaatcccttctactctatcagacccaccaaatatctctgaaactacttcacctgcaatagcagtcatgcccacaactccaacaccaacaaactcttcaacagaatcaacaaatcaaacagccagaagcaaactagaaccaagcacaatcatcggcattacacttgcagatatagctggtcttgctatcatagccatgttcatcctctacatataccagctcaagaaacgtagaagctaccaagaatacagcactttcaacgtcttacaaaaatgtctggagaaaaacgatacattatccgtcaagaaatcgaaacacaacgtcgccgacgccttggagttcacgaaatctccgcctgcaaaaatgggatgcggttcatggataagcagaaggtacgaagaaacaacgtcggtgtcatccgagagtgacatagagaaccaaaaacccgttgaggcatttgatcgaacaggtggtgggcgagtaaaacacaatactgaaactcaactagtgacagtggatggagaaactcagctggagctagatactctactaaaggcatcagcttacgtacttggaaccaacagaagcgacggaattgtgtataaagcggtgttagagaacggtgcggcttttgcagtgcggcggattggggcggagagttgtccggcggcgaaatttaaggaattcgaaaaggaggttcagggtatcgctaaacttcgtcacccaaatctcgttagggttcgtggcttcgtttgggggaaagaagagaagcttctcatctccgactatgtcccaaatggaaacctacctctatcctccatctccggtaag

SEQ ID NO: 21575 - DNA, 411 bp, Arabidopsis thaliana columbia
gaggatcccctcactagtgtatggcaaataagtcttgtcactctatccatagtccccttaatcgctctagctggcggcatctatgcgttcgtcgccatcggacttattgctcgtgtccggaaatcatacatcaaggctggtgagattgcagaagaggttggttacttcttggacaaggaaacttataagtgtatagttttcagttatctctcatattagtgtctagtgctggtgtgtatcagacatctatgtgattattcaggtgatcgggaatgtgaggcacgtacaagcattcagcggtgaagaaagggcggtgagattatagcgagaagcgctggagaatacgtataagtacgggagacaagctggtttaaccagaggattaggtcttggatcgatgcactgtgactt

SEQ ID NO: 21576 - DNA, 752 bp, Arabidopsis thaliana
caacatcaacactaattttttctcaagacaaagctctagcccgcaacaccattcagcagcagtttctccgaccacacaacatcttacgagccaagcttcgtctccctcctctcaaatggagcaatagcctcgccctctatgcgagccggtgggccagaacccgccgtggagattgcaaacttatccactccgggggaccttacggggagaatctcttctggggaagcggaaaaggttggactccacgggatgcggtggctgcatgggcctcggagatgaaatactatgaccggagacttcccactgcaaggcgaatggggattgtttgcattacacgcaacttgtatggaagaagagttcgaggattgggtgtgcaatcagtttttgcaagaccggtgacacatttattatttgtaactatgatcctcctggtaacattgttggacaaccacccttttgaatattgtctacactttatctttacctttattttcctcaactatgtacactttatctttgttaatgtgaaatcttgttttgattcttgtatgttagataacgaaaatgatgaattacgttttctcttgtctggatgtcatatatgctaaacctttcgggtaaggtttcatttgttatataaggcaccaataaaacacatgatttttagtgttgcaatttgtgttttgatatatctttgttgccgtaaaaaaacaatgtttggccggtttgattgtgtttcggttgagtgggag

SEQ ID NO: 21577 - DNA, 490 bp, Arabidopsis thaliana
ttacaaaaataatacacacatcaaaatcttaacattacgtgtaacacaaggacgagggagttttaccaacggtggtgccaagtgattgtggagactcttcaacggaccgtggcgacttcggtttaccaccgagccaagaagtgaccgctcctttaactttccccaccattccttctccaccttttccttcctctgcaaccgcctcaccatgtcctttcccctccgctatctggtcggaaggtatcttctcaaccgtcacttccacctcctttgtagccgttgtcttcttctctcctcctcctccaaaatgaagtttctcagctatcatttccgataaagctttgtcctcttctccaggtttcagcttctctgatatataatttttagccgtcacacctttctcttccccttgttgcgtctccttcactccacttccacctccggagagaggtagctttgtcatcactgttgatcatgtttctttgacttt

SEQ ID NO: 21578 - DNA, 1592 bp, Arabidopsis thaliana
atcgacactgtcgtattgagtcgtctctgagaagagcgtcctatatggtgttgatcgacacaggagggtgtcgtctccaactcgtcttcagtatccaattcttcccacacatcatctccttctctgatcaagatggcattacaactcttccttgggttagcatcaggattaccaggaagaaaaccctcttgtctcttgatagattgtgtagtttgagcttcctatacatttagcttcttcaagcgagagtcagattgtcgatcttcccattaagatctgtgtagacagcattaaacttgccattaaactctacaacaagctttgtgtggctttccaaaatctgctcaagcatcgattccattcttgtctctaatgagggtggaggggggggggggaggcttggtaagttgaattaccatagttcctcagaaagttgctttgaggaaaagtcttttggaaagcaggctttggagtgtagttggagtaaccctggttccctttaaacctgttgccactgaagttgccctgtggctgcccaaacttcctgtatccctgaccatctatgtagaagactcgttcctctgactcatgctcaggctcaatagtctcttcctcagctccaaagtggtcatgcttcttccctgtgagcaagttatgaaccgaatccagcttagcattcacctctgccatctaatttcttcaaatagctccagcaatcttcttcctctcaaaatcagcattcttggtactgttgcagcaagcgaggttctctatcaggggtgtagcatcagctgggtaacgtgtgttgaagttaccattactcgctgcatctagagctatctggtatctccaatcaactcctctgaagaaggtacctagaagttgtacctcactgaaaccatgatgtggacaatctcgttggtactccttgaaacgaaccaaagcagccttgaaagcttcagctggaccttgtgtgaaggtagagagcttgtttctcaactcctcagacttagcatcatcgtagaaattgttcaggaaggctatcttgatgcttctccaagtcttgagggaacttgctttaagttgtttcagccaagaagctgcttcccaagcaagtgaataagggaagagcttgcacagtaggtagtcctctgagactccattagccttgatgctcaaaacaagatcttcaaatcgctcgatatgatccattggctgctcatgagataagccatggaaaggatgctggctaactaaagcaaagtaggcaggcttaagcacatagttgttcctttggaatggtgggggtacaatcgctgatcgattagctagaacaggtctggcctgttgaaatccccaagagtacgacgtggttccgcagctggaggaatagctgcaggaatctggtgttggtgtcgatcgacacctctgttgtgtcgttcgacaccgattgtatctgtgtgctgctctcgatggtgtcgatcaacacccagttggtgtcggtcgacaccaagcccagctgcgtctctagcagctaattggcattgaggcgcgcctgatcctcattggcgtcctcaggtaggatgagtcca

SEQ ID NO: 21579 - DNA, 583 bp, Arabidopsis thaliana
tgaagccattacaggcgctggttttagtcccaaatctgtccttgaaggagtaatgtgtgcaatcggcttcctacatcaaaaaataaagttttctttcagaacttgaaacaagtttaggtaaagtgtgaatcaagaatcctacttggtttggctgatatatcttgacacagcaaaactatccttagaagtgagctgtgtggctggaaggacatgcgggtcagcgagtaaatcattcccggtgacataagtgttctcaagaaccatccctatgccaccccctaaagccacggcccgacccttttccaccctcccgttctgccctctgagacacactaatatctttccctttgtctttatagggtcaagcgatccaagtttgcataattgtctacaacaaagagagagattcaaaattaacaattaacataaaacatttggcgtaattaagtaaggagattagccaaactcacgcatccgaagctgaagcgttcttagcttttgcatttacagatgccataattggatagaacttagcatgtggcaatgccgtggatgacaagctttgtcctacgaatgaaaagat

SEQ ID NO: 21580 - DNA, 1346 bp, Arabidopsis thaliana
gaagaactttgatagaaaagccttcttgcaatcatcccaggtggtgattgaatcatggggcagattcttctcccagatgtgtgctttgtcgcccaaggagaatgggaacagacggagcttgaatccgtcttcactgacaccattgatctttgtcaggttgtagagccaatcgaattcatcaaggtggtcgagtggatcctccattggcagaccatggaatttgttcccctgaatcatggagatgagaccactcttaatctcgaagttgttgttctggatagcaggaggtgcaattcctttcctctgacgatgatcacgtggtgcatctccagcaccaatgttggcagggccattttgttgattctgttcgtcagccatttcgagtggttgctgaggtacagggttgactgtgtttctcctttctctgagttcgcgagctatgcgatcgatgtttttgttgaaaaggaggttctgattgcctgttgatcgagttcgcatacagcagaggtgtacctggatcaagaagacaacaagaaaaacacacagttagcaaccgatttgaaaattgaaaaagaacttgatctaagcaagtctgaaatctcaaatgtaacaaacaaacacccaattggcaacggcgccaaattgataataggttttaagatcaactaatcctaaagcactatcatgtcgttgtagtactgaaggtgtatctccaaatgggtgtgatgctaacaatcaagatgtgatcagaagtcactaagtcaagccaagcaataacaggttgtggtgtgttctagcagttctaagtgaacatgcagaaaacagaaattcaagcagaaacagtaaaacactcgaccaacacagctctttgcagagcactaggtgaggtcgagtgacaggttgagtaacagacataaaataaaacacagatactcgactgcacagtctgttgccagacaactgggtggtcgagtatgaggtcgagtaacaagaaagaattgcagaaattaagcaacagatgaccagatgtagtaaacaacagtagagtaaataaagaattcaatcagataaagaattcccgaggatggggtaattgagtagtttcgtttcctcaatttacaggtgattgacatgctcaataaattatccctagacaacgagttcattaaccaaatttaagtgccaccgcaacagagaccctcaagttaacctagtcccagactcaatcaccattgacgagagctaacctaacaggcattacgaatcaaccagttaaaaccaaaacgctccctgcaacaaataacttggtacagggccacgaatctctagaattagtggttcagaca

SEQ ID NO: 21581 - DNA, 1699 bp, Arabidopsis thaliana
ttaatgtatcaaggaattgattagtcattcaaattcacgaaatcatccggacgtagagttccttggtaatgaatagacttttaaagaaaaaagtgagattggggaaagtcaacgttgaggaaacacgaacagacaccggcgagactatgcaaatccaatcaacgaattcacagatctatacctagtaatggcttgttttacggatcagcaacaaagatagaaggatctagacagagaagccacttacagtgattggagcaccagtgttgagaaccttccttccacggacaagaccctcagtaccatccatagcaatggtcctaacgacattttgacccaaatgatgagacacctcaagcaccagccttgtgggatgatcctgaacctcaagagatgtcatgatcggaggcaatccttcctgatcctcgaatctcacatcgacaatggcaccgatgacctgacaaacacgcccgatcgcacctttgccaccgtaatcataggtctttttcccctcatccttagcaggagcagaggatggcgcagcagagcttgccggtgaagaggtcgcatactcggcgacgcggccgaggaggtagctacatggagcggcgtgacgcgcgggtgaaggagaaggaagcctggggtttcggttgactaatttggcggcagatctaccggaagatgaacggagaagagatgataagactctccgagacgccatgagtgggtgtgtgtttgagagagagagagaaagtgaaatgctagggtatcaacaacatatgctgattgccgaaacgccgaaactaagctccactctctttttggtgggcttagttaatgggcttagttgggcctatctttatccatttttaaaaatagaaaaaatatgcaccaaaggactgactaatcaaagaagatgacccttggggatccatataattaacaaaggttattattgtcttggcctcttgggaggtcaaagttttcgaattaacagtggtattacatatatttttggtgataaaaagtcatatcagtagcaaactttttgaaaagaccactgttaattcgacattacacaaacaattcactttacaaatctatctgaattttcgtttgtataacaaaagttcaaatgttgggaacatcgtttgattaacaaaatagttacattcaccacgtatggtttacatatgatgaagatgagaaaatggtctagtttttgttatttgtcgacaagtaagctccagtgtacattttgtttgttttttgttgttgtcctgacatatccaaactaattacattggtttggttgggttaatgagaaagatcaacgttttgattatttccttccatccaatcaacggccttgatatggaatagaatcggaaaatcacacgtgtcgcagtcagaacaaaacacgttacgcagaagaagtggtctacgctactgaatcgaagagagttatatagagagaagaggagctacaagagaacttattcatttgataaccctagtagctccttttttctctatctcgctttctctgtttcaccacagtcatggcgagtcggcgaatcttatcatcgcttctccgttcttcttcgagtagatctacttctaaatcctccttgatcgggagccgaaacccgaggcttttatcccccggtcccgcgcatggagccgctccatgtgggac

SEQ ID NO: 21582 - DNA, 2377 bp, Arabidopsis thaliana
caaacttaaggcttttcttctaatcttagcatagagggcgttttattccttgaatcataatgcctaacttctttaaattccaaaccctttactagactaacactttttgtatcccccttaagaactttaaactcttattctctttttttttttttttcattctcattctcattcccattcaatccataaaaaatctcaatcccaaatacaagtctccacctagtcctagctaacccaaaaagcgtgggctaggtctacatgaaagactgctcttgtcggctcatacctaacacgttataccaagctcaatcgaaaagacctcacaatcacacacaaatgatctttggcttgaaataaggctaggctaagggtatgggaaactgctctaaaaatgagagtcaactacttgaattaacagagggtggtgaaatgaataagataatccaagtatgtatatggtagccatgagttcacaaacaatgcatagatatgataattgcaaattcagttcaggttctaatagatagggaatggcatcagataagcgagtttcgaatcaaagtagtatagtcaagttacaaattcaaagcagggtgcagtcttacttcagagatacaatcggttatgcaacagagaactaacaacctgggcattgaacttacttcattgaatcaaaacatgcttatcggtttgaaatcatcattatcccctatgcaaatgagcaatcctaaatgcaaggacactatatacaatcctaaaatgaaatgcaatctacatgacactctgtttatgtgaaatcattttctgaaaaaatttcaaatttttttggtttttctatgtcttagatgatgcaaaatttaaaataagagcagagaacacaatgttaaacatgtcttgaaccctcccccaaacttaaattacacaatctcttgtgtaataaaaatctgaaagagaatccaagaccaaagcacaatacacacaaagaaaaataaaaagatgctatggtatatacaatagagaggtggtgttacctcagttttcaggtgaaggttcctgctcgttgatgccatagtaagcatcccaattcattcctgagtactgcccatcttgatcccactgattttgctcgacgttctgctcgttctgaacccacggatcctgctcgacactctgctcgatatcgcgtcgagtatcttggtcgagtgatcttctgccgaacataagaaggtccttgctccttggccgaacaattcttgtttttctccttcttttctgctcgcggtgttcatgagacgaatgtcgtgcaggagcttgagggcgacttacctctcgtttctcataggcagattgtcttgaaggtgaaactctatgccttcttgaaaccacttctccagggcggttttctctcaccatggtggcgcctgaagatgaaaagcttagtacagcctgaatggcggctatggccttgccacatttttccaacatcctgtcttgaaacttatttcaagtactcatcaaaccaatattcttatgtgcaacagtcagactcttactcactcttggtggtggtttgtgttcctcaaaatggaacatacttgcattgtagttctcccaatccatctcctctgcttcttcattctcagcttctccttcactctcaaccctttcttcaatgtctggagcttctctcgtcgggggtgctcgttccatgaagaagagttcttcattaggcgggttgaaatcgatgttacccctcactgtgatggttgtgagctcttagttgggtaggagaaacctcccatccatttccgctctatgctgaaacttgagaatatgcatcccctcatgactctgatgatcaataaacaaagcccatctcaccatctaggggcaaagggagtcgactgaagtggcactccacaagccattagtgtaggtgttatcacccctcctatagaaatggttctcttctgcttatttgctagtgcccatttcctgaaaccacaaagatgattcaataaacgcattgatggtgaagcgtcgttggtgtcacccttcataggcactttgttcttggtgtcgactaggatatcttttagggtaatatccaacagctctatctcaccattgttaatcggtccggtcttctcccttgcgtagaggacgttagccattgctttctggaagtaccgaatgcaggggtttggattgcgttgctcttggcccatgaggatgagaatacagcgtcatcacctattgttacccaaagatccgaaagttcctctttcttgaacttgggtttaacatcagtccctctagggaatccgaacatatcctcaagagttttgatagccaaaacatagtcttttccatagac

SEQ ID NO: 21583 - DNA, 197 bp, Arabidopsis thaliana columbia
gtttcaactctcgattcacagactactgcctagtcagattcgaagtgctacggggtttcgaaaacttcttctggacgatccgatgtgaaagagctttcgccgaactcaagcgttacctagtcgcatcattcgtgctcgatcattgcgctcttcgtcatcccgtacatccgtatacagccggagcacagactgccgtc

SEQ ID NO: 21584 - DNA, 1902 bp, Arabidopsis thaliana
tcatctcgatctcctgataaagtgagaccggcatcactcctggttttgattaagaaaacttctgtttcaattgaaatctttccgatgtccttccctcgtagtggtctgcaaagtccggtagctcttaggtcatgtatgctattctcgcttatttcttctcttatctgaccgatcttattgttttccacttcgtagctttcatcgctccgactctcgcgaccacggaattcgtcgaattcttcaaaattatcattgaaggggagaccctttggaactctttcactctcgagcggttcatagaagccaacccaagctcagaataagtccgcccggacagcttctataacttccaccacctcccgctctacctcacggaacctcagcccgggctatcgctacatgacgtaagacattatccaagccgatggcagagacttgtgaagcaaacaagacatttcttacgccagttatcgacaaaaaagaatacagtaggaccctactggttgacgatggcagtgctgagggtgctagatctgcaagtgctttcagatcaacatctcgacgtgaaaatcgtagcggtcgttcacctcaaagagatcgatccccccccaaacgtgactctccccgacactcttctcgggataggctgagcagcgaaccgattgtggatttgatccgaaaaagagagagagaccagctcgtggcaactcttcccctaagagggagaaatcgagagctcgaactgactgttcccctcgatcttctcccccacctcgctctatgggtcctcttgtaacgcccgcatcccgcgttcataaagaggcctgtttattttaggggaaattagaccatggtcgaggaacttagtcggaagaacgagaaagttcaagctgaaccagctaggtgaggtggacaagctggatgaactagctagctaagctaggttagctaaaccagctggaagactagctagctcagctatgtgagctgaccgacagctcgactgacctcggtgagctgatcgtgtactgacccagctgggtggtccggtcagctgacactcgagctggtggactgtggtagctcacgggtgaagaggtgtctcaaccaaatggtgtaaggtcgagcgggtaccaacaaagggttgcatcgcccaaaggatgcaaggaacggatgtgaccttttggaaggatgcaaggaacgaatgtgaccttttggaagggtgcaagtaacggatgtgatgcttcgggaagcatccatttgccccctatataagggaagacgcccaaggcctttagaacatcaccacttgatcatccacacatcacaacacaatccaaagatagtccaacagaccttgaagttgttggtcggaaagggggtgcggctcggcgaatataactcgacagaactgatgtgcatgctacctcccggtccaacaattcgatggagtgtagaggatgggtggggtagaccaatctttggactgatcggatcggacaagccgatcgtcggacaaatcggatcggccatttgatcgtcgaatcgagtcagaccgactgtcggacggatcgggacagaccgatcgttggtcctacggatcggatcggacagactaatcttcggacgggtcggatcggacaggacgatcgtcgggtggaatggatggggaaaggtgtttgaggaagcacaaggataagtgcatccgaacacatccaagggtctcccatggatgcaatcttaccagtaaagggagaaagcaccaaaaatgggtaaggattgtgattcaccatataggatcaacatcgcagccgccttcatgtatctatctcctcagccatggtgaaacgatcggagatcggtaagaccaaagggtgactcgacggataaccaacgggaaag

SEQ ID NO: 21585 - DNA, 491 bp, Arabidopsis thaliana
ctgcaaacacacacagtcagttaacaatgtcaatatatgttcataacctgaaccaactaagcctatcgaatcatgaattcagaagtcttactttgctagcaatgttgttggaaagccaatccagaccttcatagagcccttcaccgctagttgcgcatgtgctttggatgtacctggtaagagagagagcaagcaacgtgtttgtaagtacccatgtatgcaatagtaagtaataaattctgtctgggataaaactataaatcaccagtggcgttgccggagtgagtgaaggccaagcttatcagtaatctcagcagcattcatagcgtttggaagatcctgcttgttggcaaacacaagcaatactgcatcccgaagctcatcctgcagttacgaagcatcaataggaaaaagccatacggattaccaagtcaaaatattaacaaaattgtgtagcattaaaaacatacttcattcaacatcctgtgaag

SEQ ID NO: 21586 - DNA, 2110 bp, Arabidopsis thaliana
ggcacctaaggttgatctcaaaccacttccaaaaggtctaaggtacgcgttccttggtccaaactctacttaccctgtgatcattaatgctgagttaaatagtgatgaagtgaacctgctattatctgagcttagaaagtataggagagcaattggttattcgttatccgacattaagggaatttcacctagtttatgtaaccataggatccatcttgaaaacgaatcctattccagcattgaaccacacaggaggttaaatcccaatttgaaagaagtagtgaaaaaagaaattttgaaactgcttgatgctggtgtcatctaccctatctctgatagtacttgggtttctccagtgcattgcgtccctaaaaaggatggaatgattgttgtcaaaaatgaaaaagatgaactgatccctactagaactataactggtcatagaatgtgcatagattataggaagttgaatgctgcatctaggaaagatcattttcctttaccattcattgaccaaatgcttgaacgtttggctaatcatccatattattgctttcttgatggatacagtggtttctttcaaataccaattcaccctaatgatcaagaaaaaaccactttcacgtgtccttatggaacttttgcctataaaagaatgccatttggtttatgcaatgctcctgcaacatttcagaggtgtatgacctctatattttcagacttaatcaaggagatggtggaggttttcatggacgatttttcggtctatggcccctctttctcttcatgtttgttgaatcttggcagggtattgaccaggtgcgaagagacgaatcttgttctcaattgggaaaagtgtcatttcatggtgaaggaaggcatagtattgggtcacaagatatcagagaagggtatagaggttgacaaaggaaaagttgaagtgatgatgcagctgcagccacctaaaacggtgaaggacatcagaagcttccttggtcatgctggattctatagaagattcattaaagacttctccaagatagccagaccgttaaccagactattgtgcaaggaaaccgaatttaaattcgatgatgactgcctcaaatcctttcaaaccatcaaggacgctttggtatctgctccggttgttcgagcgcctaattgggactatccatttgaaatcatgtgtgatgcatcagattacgcagtaggagctgttttaggccagaaaatagacaagaagcttcatgtcatatattacgccagccgaacgttggatgacgctcagggaagatatgcaacaactgagaaggagcttctagttgttgtattcgcatttgagaagttcagaagctatttggttggatcaaaggtaactgtctatacagaccatgcagctttgaggcatctgtatgccaagaaggatactaaaccaagactgttaagatggatacttttattgcaagagtttgacatggagatagtagataagaaaggcattgaaaatggcgcagcggaccatctgtcgaggatgagaattgaagaaccacttctgatagacgattcaatgccagaagaacagctcatggttgtagagttcttcggaaaaagctacagtgggaaagagttccaccaactgaatgctgttgaaggagaatctccatggtatgctgatcacgtcaattacttggcatgatgagtacagcctcccaacctgaccagttatgaaaggaagaaatttttcagagacatccaccattactactgggatgagccttatctttacactctctgtaaagataagatctacaggagatgcgtctcagaaaatgaagtagaaggtatcctgctgcattgccatggctcagcatatggtggtcactttgcgacgttcaagacaatgtcaaaaattcttcaacgattaaaattcggtggccaacaatgtttaaggacgctcaggagtttgtttcaaaatgtgattcatgcgagagaaaaggcaacatcagcataagaaatgagatgcctcagaatccgatctttgaagtcgagatctttgatgtatggggaattgattttatgggtccattcccatcttcatacggtaaca

SEQ ID NO: 21587 - DNA, 551 bp, Arabidopsis thaliana columbia
ggtcttctagaggaggcttatgaatttatcaaaaagatgccagtggaaccagataccggtatctggggagctttgttgggtgcttgtgcagttcatcgtgatatgatattagggcagaaagtggcagacgttcttgttgaaacagctcctgatattggttcataccacgtactactgtctaatatctacgcagctgctggtaaatgggattgtgttgacaaagtaaggagtaaaatgaggaagctgggcactaaaaaggttgcagcctatagttctgttgaattcgagggcaaaatccattttttcaatagaggagacaaatcacatccgcaatcaaaggcgatatatgagaaattggatgaaatcttgaagaagataaggaaaatggggtatgttccagatacgtgttcagtatttcatgatgtggaaatggaggaaaaagaatgttctctgagtcatcacagtgagaagctcgctattgcatttggactcattaaagggagaccgggacatcctatacgggttatgaagaacttgagaacctgtgatga

SEQ ID NO: 21588 - DNA, 1874 bp, Arabidopsis thaliana
tcttctatatagtttcccaattgtgacttggcattgtgttgagtgttttggatcgattgttttcgtgtgttgtggttccaggtagtaatagtgacttggcattgtgttaagtgttttggatcgattgtctttgtttgttgtggttccattaagtattagtgacttggcattgtggcatcgtgttttgtcttgatttgtttttctgtgttgtggttccaataagtaatagtgacttgacattgtgttaaatgttttgtcttgatttgatattgtgtgttgtgattacataagtaatagtgacttggcattgtggcattgtgactttgcattgtgttcgatgttttgtctgactttgtctgttgtcgttgcatttgacttggcattgtggcattgtgacagatcgcttatcatggttgcattatgtaatagtgattcaagcttgtttgtgtatgttgtgtttccattaagtaatagtgacttggcatttgtttctggttttgagtttattataggtggctccaaagaagaaagggaggatatatggggctggttcattgcagctagaagcctcatcagctcacactagtccagctctacctagagaagatccggttgtactatctcaaaagctggctgccgctgaagttcttattgcaaaccaagcggagaagatcactagctttgatgtgtacttcgactaccttgccgagaaagatctagacttcgctgtcctcttttgagtcggaccctctaggactaaccggtcagcgccaatcagagatctgaggtgccaaatgccacaattgctacatcttctgggatcgcacatgtggctatcggagttgaagaagttggagctgaggcaaacacttgatccactccatctaacactttctaggtttctgttgttagttcactcatcacaaatatagacaattccaaattatgagtttctgtttttaaatttctaagtttattttttttgtttctaagtttctgtttctgaatcttcctactttcaatctaaattatgagtttaagctttcaattacgttttcttatctgttttcaaatataaaattaggattagattaaattaaaaaaatcattaagatttgattcattaagctaaatactacagtaatcacgtttataaaattactaagagtgtcgcaactaaatagcaaatccatcgtaaagtttgttatggatttgctagaacctaaacgtagactcgcaagtccatcgcaaattgctacagataaatgaatcgcaaatccatcgcaacttttgcaaggaattagcgagacaactaatttgcaacatctttgcaacgtttattgtccctcgcaaattgcaagtgttttgcgagacattatttccgtcgcaaaagttgcgagggaataactaccgatttcaatttgcgacgcgcgttttgcgaggaagtggctttcgtcgcagttccctaacaaaagacccgttttcttgtattgaattttgccaaaaaaataagataaacatcttcaatatttataccaaaagatgaaggcgactcgaatggcgacagtagggttttgaaatcgggtcatgagacgaggagattcgatcgaacatggtcttgctatcggcttcttctggttgtttctttgtgtagtgagagggatcaagcggtggatctccctatgggatttgcaatggtacagtaatcaggaagtttgaattttaatttctttggtttgaagtaaaggttccacagatatatcgatttggtaagttatggtggatctggatagatgactcattatatttctcgattcggtatgatctcctgattctctttatgtggatcattgcggatctactatttgaggggg

SEQ ID NO: 21589 - DNA, 2596 bp, Arabidopsis thaliana
gttggtgggtgggcttggatgtaagaagggatatatggagaagcaatgtgtgtagatccttgttctgctctgcacttgtcggaaacctcagccgcttttctccgatcactttctatgtcctaagttgagagacttgtgatagcgttgtttataagtaccaatgcttcgcttggagtccttttcatgaaattgccatcacttgcaccatcaaaacaaaaccgatactgcttatcgattgcgcggaagaatatgttgatgagctggctttcctggaaaccatgttgagggcaatccctctgatatgatttgaatctgatcaaagctgccttcaaaccttctgttgaatcttgagaaaacgaagagatcttcgtccctcagtaattcgtccactgaataatcaaggaagtggatcatgaatgcgttcttcgtgtctgtccaattggttagtgaacctggttctagttgtcgcagccatgatgttcctctgcccgcaagagaatgtgggaagagttttgataagcaggtttttaaggttgcttatggtgaatgtgtgattcagttcaattctcctaaaacacaaacatgtcgttgcagttttagagggtgtcaatccagtccagtatattgctagcaatcaagatgtgtacgaaaacaactaagtcaagccagattataatgatggtgggtttctagtaacaatcctaggtcaggattcaaacaagtaaaaataagaacttaagagccctactcgatcactgggtcgagtagaaccaacaggcagcaaaattaagtaacctaaatgcaatcaacaggggatacaaataaatctaatagaagttctaaggatggattcattgataagggcaactctagggttcatcaaatggctaataggcgaaaggtagatacccatgacgatagattcaaaaactaggtcaatccactctcgtgacagagacccctataactctaccacttcctaatctcaactctcgttgatgaaacatagcagagcagggtttaagaaacaatctatcaaagccaataggcagacaagccaatccctaggtcgagtctacatatctctggaattcgtagatcagacatccatttgaacgtcttttggacgctggacgtctatgatcgaatctccacattagccagcaaaaactgaataggggccaagcgaatccagaagggtataaacctaaacactaaccacctatctaacctacagattaccctaatctaatccatcctcaagaaccctaatcactactcaagcaacattctcaagaacacaaacccagaaattactaaaatcataccaaaatgtagatctaaacaagctaaagaactttactttaaacaatcaaatgcaaaaatgaaatagattaagagtaattaaggtttcaagattcataaacacaaagaaaaactgaaagataaagcatagatcctttggacaaatcccaaagtgatctatttatactaaaatgttggaaaccctagattcactagaagacaagagacttgaggcggtttgggcgaatactcaatcttggggatcgagtaaagagggtgctgcaaagtctgcgcctttgtgtttatgctgcgagtgatcaattggtcgagtagatgcttcatcctctcctatccgtacgctcagatgtctggttgagtggggaatgaggaggaccgaagacgctttgatagctcaacaagtcttgtagagttggtcatccttggtcgagtaaatggatcgagtagtggatcgagtaggaggggcgagtagatcaatttgttgcttcatctgaggttgccttgatcgagtaggaggatcgagtaaactgcaacctcctttgtagcatcctagatcgagtaaagaggtcgagtagaatgatgcctcttctgtagctgcctggatcgagtgaatggatcgagtagagtcctttttagctccttttgcacctgaaaacacaccaaaacatgcaatgcgaatgtaagatgatcccagatgcctaagtatgcaaattaagctaaaatggtgcaaaatgtcatgatacaatgagcaaatgcaaagctaaatgatgataaacatacacctaaaatgagtaaaatacagtgttatcaactcccccaaacttatctcttgcttgccctcaagcgaacaaaaaatcttaagttgaaggagaggtttgaaggtggggattcaaaaaccgaagcatgctgataagtaggttttatgcctacttttgtgctgaagtgtggtgtgttcagttcaattccccttaaacactaacatgtcgatgcagctatatgataacactgtattttactcatttaaggtgtatatttatcatcattaagctttgcatttggtcatagtatcatatcattttgcaccattttagcttattttgtacacttaggcatttaggatcatcttacatacacattgcatattttggagggttttcaggtgcagaaggagcttaaaaggattctacccgaccttctactcgtatccaaccaggagggaaccaacagagcattctactcgactcattcacttgatccaggcagccaaagagga

SEQ ID NO: 21590 - DNA, 2282 bp, Arabidopsis thaliana
cgtcatatctcctcgaaggcatgtcctgagaaagttgtccctgcggaatggctgtagtggaagaggagcagctgatcttgtccttcagaaacttgatagccctgaggcacttgacgagtagcttatcctgtttcttgcaccacttctgcagcttgctgtttttcctgtgagcttcgctcaaactcttgctttccctcgctggaggtatatgctcactgaaatgatacatgcttgtgttgaactccgcctcatctatatcatctgtctcatcaacatcttctgttggagctccttcggtgtgactaacatcatcagttggcggactgccctcaaaataaagatcttcaagcgcaggcttgaagtcaatgttccttccctcgagaatcctagtagcgtcaatgcaggggagaagaatgttggcgattctaatcgatgaatgctcgaacctgtagcggtggaagtcgccagccatgtcaaactccaagaactcacatcggcgcaaattatccaagtccatcatcctcagtgctaaacctggttccttgagcggtactccacaagcttccagaattggcatcacaacgccacccacgcatagtgctcctctcaccttcttctttccgttcatcaacgcccacttcctatatccacacaggtggatcaacagacatttctggtggtgcgttgttgagatcgcctctcaagacattctttcctttcgtacggcggagaatccctgtaagcgcggaatctatcatctccatgtccgtgttagacacggtgcttgtagactccctggagtaaaagacgttggcaaccgagcgctgaaagtagcagatcacaggactttggatttggttgctcttagaccgcgccaagtttagcggtagattgttccctatagtggcccacaaatctttaagctcctctctgtcaaatctgggtttggttccctttccactagggaaaccaaacagttcttccaacttcttgatcgcaagctgataccgctgttcatccactaagaacgtcaagaagcctaaacccatggtatccagctcaaagtctgtgagtccctcatacatctccacttgcagcgtggaaagaaactcgattgtctcctccttataagcagcgtaagggtaagacatgagtgtctccagatggcacttttcgaacagatgctgcacgtcctccagtaaccccagctgggctaaagtctcatagcacggatacctcgttccccagaagtcattcatctcaaagaatcttatatactcctccactgtaacctcgtcgggtttgttcagcaacttcctctcctcacgccatgactctggctcatactcagtttcgatgtcctcatcaatcagcgcatatctactcaacatcgccctctttcctctggcgatttcagctcttctctgattacgtcgagctgcggatcgttcaaattcatccctgaagctctcgtaaacatgttgctctctctccggtctagtggaccaggactcagcttcttctacattatagtcaggatccattgaggattctccactgtagttactcatgatgaaacctgaaaacaaaattaaactcaaagataaacgttaatacgttagtcccaacaaaaccaaaaacacaaaccaacagagtaaaccggtcgagtgtaccaaagttttttttgtttttttttcggtttggtgaactcgcggtcgagtgattccttggttgtgcttggcgatcgagtcaccttgagaggagagagatggtgaagcggtttgaaagaggtcgagtgaagagggatgggggtagagtgatggggttgacgtcgagtggaggagaaaagatgaggagagatttcttgtcctttggtctgttgcatggaggacatgggcttcagcgacgggtcccacaatgtcttcttgtctcttctctgtattcattctttgttcactagaaaaactccaggaaatcacgcaatcttctgtaaacttgataaactccctggaagactatgtagcttttgttggtcgagttaaatgatgatttaaaatttttttaggttttaaacatcactcatactcgacgaatgtactcgatctctaggccatctgtagagtaaaagttttgcttttttactctagcttcacgttattcctctattcctgagaaccacaaacacaactaaaacatatcaaaaataacaagaaagtaaaaattatttacaaggataatcatgggacttcctcccaagtgagcttgtttaaagtctctagcgg

SEQ ID NO: 21591 - DNA, 491 bp, Arabidopsis thaliana columbia
tataccaccaccacaagaagccaaaactccaccgtcttcgccgtcaatgatgttaaacgctactgaagaattcgagtcccaaccgaaaccaccgcttttgccgtctaaatccatagacgaaactcggctccgatcaccgcttatgtcgcaagcatcgtctccacctcctttgccgtctaaatccattgatgaaaatgaaacaaggtcccaatcaccgccgatttcgccaccaaaatctgataaacaagcaagatctcagacacactcatcaccatcaccaccgccactgttgtcgccgaaagctagtgaaaaccaccaatctaaatcacctatgccaccaccatctccgacggcacagatatcactatcgtctctgaaatcaccaattccttctccagctacgatcaccgcaccaccgccgccgttttcttcaccactctcccaaactacaccgtcacctaaaccatcgttacccaaattgaacctaacca

SEQ ID NO: 21592 - DNA, 483 bp, Arabidopsis thaliana columbia
tgtcagaaccacttcgtcaggtcggtgaataagtgactttatcgacgaaccaccacgtcagatgcaggaaatgatcgtatagctcctacgaacgtacacattcttcagatctctctggaattaataatccgtctgactgatcgatctgattcggcaaatccttgagaaaacaaggagggaagaagaagaagaacatggcaggggcggtctcagggctgtttctgctcgatatcaaaggtcgtgtattcgtgtggcgcgaataccgtggcgatgtcaccgctgctcaagctgagcgtttcttcatcaaactcatcgagacagaggtgaagtcttaacatttggaactaatgaacaagcttgatcagtgcttaacaggattcaatttgatcagaatcggtatactgtatgactaaatgagtagtgatttctctacgggtatgcttactttcgtctgatatgttcagggtgatcacagtcaaatga

SEQ ID NO: 21593 - DNA, 481 bp, Arabidopsis thaliana columbia
ccattgttttattattgctaataggaaaaacctcacgagtttgttttgaacgaaaacaagtatcacaactgtcaatcttgtcaaaaccttgtgaagaacgattacattccggtaacgaaagcaaaacactagtagaaggatgtcctaggcggcgatgcacaaatctccagagatcgcaaaatccgacgaagctttgtgtacacgaggtgccaatacaccggtaaaataatacactccctcacgttcttcccccgccccaatcaaagtcctcaaaaaacggtcctgtaagaaacaaaatgtgtcagtaaagattgcaattgagcttgtctgtttaagtaatttagagacagagatcaaagtgcaatcaaaatcgggaacaaacaacacatcgtgaagtttataagagtcatgcaagagaagtgtgccacatttcgtagcctgcgaggctttcccatcgggtttggtaccggagaaggagtga

SEQ ID NO: 21594 - DNA, 535 bp, Arabidopsis thaliana
cgttaaaacaaagatggcgaattactcaagtattcacattctcttcttggtcttcatcacaagtaaagagcaatcacactctgtttctgtttctgtttctcctctgttttatctgtttctaaatgagaataatttcgatactatttcttaaaactatatttttttatgttcattcgtcttcaaatcacaacataattctccaaaacatatcgtgttttttcttcggatttaacagtttttattgttgttgtttgttttgaaattgcaggcggcattgctgtttccgccgccaccgtcttcactttacagaacagttgtccttacaccgtttggcctggaattctctccggcaacgacaacaccctcggcgacggcggatttcccttaacaccaggcgcttccgtacagctcacggctcctgcaggatggtcaggacggttctgggctcgtaccggctgcaacttcgacgcctccgcgcacggtaactgcggcaccggagactgcggcggtgttcttaaatgtaacggcggcggag

SEQ ID NO: 21595 - DNA, 470 bp, Arabidopsis thaliana columbia
gactcaaccctaaatataaaacgggaatcataagtcatatagtaaaagtattcggttaattcaatcatataatgatttaagttaattatcgtgttagtacatacactacgtaaatgaaagtttaaaagctgtattttaaaagagaacgtaccgttagcaagatcaagaagaaaatcagccggattcataggaaaagccggcgaaaatccgacggattcaaagtaagccatggcgtctcttccttttccgacgaacaaacactttccttcactcaaaagaagcaccgtatcaaacatctgaaacacacgactcgacggctgatgaatcgacgtaaccaccgtttttcctttcccatgagccaacccggcaagagtctgaaccaaccggagcgccgccgtagcatcaagacccgaagtaggctcatcaagaaccaaaagactcgggtttataagcaattcatgagctatact

SEQ ID NO: 21596 - DNA, 600 bp, Arabidopsis thaliana columbia
ataaagcttatagtaagcttgtagtgtgtctatatagaaggtagttttggtaagctactggtaatagttttcgtattaatttatactatatatctcgtgtttgtgtaattagaaaacaaacgtatatactgaaacctagacttatccatcacacatatagaaagtcaaatattctatgatgattcttgtgaatgcatgtatgcaacatacacaaatacactcatataaacatgtcttgtttttatgccttgtacgatattctatatggtttatataaatatatagggggttcggtcacggtggaggcaaggatttgcaaatcgaggagccaaaagttcaagggaccgtgcgtgagtgaagacaactgtgccaacgtttgccacaccgaagttttcccgatggtgattgcgacggactcctccggcgttgctactgcaacacacattgctgattctcattacatatatcaaattaaatcaactatatagtaaactaactctatatatttacatgtttatattctcgatcttattgacgtcactttactttaaattcggttcatgcaacttatgtgaggaaaaaaatcctctatattatttg

SEQ ID NO: 21597 - DNA, 543 bp, Arabidopsis thaliana columbia
tgggtgactatagccttgagatctttgaagacccttcagctatggcattggttgaggtaaaaacttctatcttttcttgatcagtagacactaatttcgagacccattttactaaaaactgattaattctgtttcaggttgggatactgtatactcagcgagatccatcttttttccggccaatatctcaaggcattaaaagatgccttgttagatggtcagcaaactttcttcccttctcctatggatctgctctttgaaactctgtttttttacttacgctcatgatttgcattacaggctcatccaagagcggatgcagatgagttattggagctcaacaaaatattggtggcagagaatcatccggggtcgttattacaagcatttaatgcttggctacagaacataggcagtttcacacaggtagagacgattacacgctctgtttctagctctcttgcatcacattgctttagaggataatgaacttaggactttcgtaaactttcgattcaaaacttatctgttcaagttgatgcg

SEQ ID NO: 21598 - DNA, 480 bp, Arabidopsis thaliana columbia
ctatttaaacaagaatacctcaatcattcagtcttaagtctttaatggcagtgaaatgcaagcatatttgtatggaaacagaccttctcgtagggtgcctttttcttgtctgacaagttcttccactcctctccagtgatctttgcgacctataaccacatttaaactccataagttagcttcacaatttgacaaaaactgatctggagaacgaattaagtaattagatttacctccacgacgcttttgtattcttcgcgtaaagcagctctcctctcgtttgcataaacaaggaaggcagatacgggatgttttggcttcagagggtccttctccttcctgcaaaccataaacagctctagttagtttactattgatgatcaaattgatatagtcactaagacttttggtttttacttgtacatcttcttgttgtcctgttcagcatcctggacaaagttgagatactgatcaagcaat

SEQ ID NO: 21599 - DNA, 994 bp, Arabidopsis thaliana
ccaacccaaatctaaaccggagctccagttttaagactggtagggcagaaagtgatcaagtagttagatcctgtacaagtgaaagtgctcgatgcgtcgtcgtaagcgtaactataagcgctaggacaagcgttcttaaacatggacgagtaatacgtcggagaacaagtttgcggcgtcgcgtgagcaccaatagagaaaaaccgaagcgaactaaatctgccgcaagcgctcttacacgccgcgacacttcccgaattcggatccatgatcctaagctcgctagggcaaatctcgttgatgtccgagacgcagcctgcgtatttgcaatttccgaatcctccctgtggttttatccccatctttacattgtaaccgtcgacgaggctcacgtcgtagaaatccatgccggcattgcttgatcccacggtgaattccgctagagtcgctggaggaactccgccgccggtacattttaaaacgccgccgcagtctccggtgacgcaggtaccgtgaccggaggcgtcaaagttgcagccggtacgagcccagaaccggcctgaccaaccggtaggagccgtgagctgcacggaagcgcctggagttaagggaaatccgccgtcgccgagggtgatgctgttgccggagagagttcccggccaaacggtgtacgcacaactgttttgtaaagtgaatacggtggcggaatcagcaatgccacctgcaatttcaaaaacagttaaatacaaccaaaaaacctaaatgcataagtgaaacagagaagaaacaaaaacagagtgtgctttgttgttggttacttgtgatgaagacgaagaagagaatgtgaatactggagattttcgccattattaaaaaccggattttgtgtttatgtgatgtggatgatgatgaatctctggcaccgattctctatttataagtgctggagactcagaggtttaaagttagggttatcaacttcaattaattataa

SEQ ID NO: 21600 - DNA, 469 bp, Arabidopsis thaliana columbia
tgaggatcttggtcctcatgggactggcagacacatggatcacatgttacctgagatcccaaggcaagatttcagaaagggtgcacaggtgaaaaactgttaacttaatctctcagttgtggattgttcttaagttgttgcttctctaagtctgtttggtaatggtattgttgaaattacgtaaatgtgtaattcccacttttctcttctggtggtagtggttcacaatgaagcgtcaacacgctgtaatagtgatggctgatggtctctactactcgaaattccgggagtattgcagagtaagttcggtattcctttataccaaagtttttgtttgcatgttacagcctaccatatatgactgagttccgttgtaagaaattgttcataaagacaccaagctttggttcatctcaagcatatctcttttgctaatatcaagagtcctcagggttttcaaaaacttgag

SEQ ID NO: 21601 - DNA, 499 bp, Arabidopsis thaliana columbia
aaccaaaaaaaaacttataatttggaataaaaggagtaacaaacttcagtagagagtgaagacttttacgagagaacgttaatgaatttggcatactttcacaaacgaaacgtccttttcacaaaaggtcacttgtgtcgtggccatgaaattccggtacaattaggtcacaagcttgttgaaaataagaagaatgattccagaaagcttgaaaacattcatgttatagaaagtgagaggagacgtttgtatcggaccatcccttctccatacgttttcgcagtcgatcacagcgttggtgccaatccttgccagtttttccacgtcccaaaacgatttttgaagtccaagttcccaagctgtgtgaaaccttgccgaagcaattccgtaattcgtcttgcaaacctcgatccgtctcctcccatgaggaccattgaactttcgacggactctatcaatatgagtggttgcgtcatccacttgcatttttgactgcgtt

SEQ ID NO: 21602 - DNA, 1314 bp, Arabidopsis thaliana
ctcatagtcgccgatcacaattaaattcatctatacagatatcatactcgcgaccacacatcacatgacataaaacatcacactgaaccctaaggtttagtgtagtgtgcatcagccatggccgagtcaaaatgttaagattttttttttaccatttatagtaaactaatggaagtaaaaaccagtaatgcaaagaaaattcagagaaccaaaggaaatatctctcaagacaccaaaaattctaattgattaatcatgacaacattacgtcgctacccctcgaaccaacatctataaatagaggatcggtgccattaacattcatcatcatcacccacagcacagagacacacacaaaaaacccataaaaaaatatggcaaatatctccagtattcacattctcttcctcgtgttcatcacaagtaacaacatcaaacacactctatttctgtttcttctctgtttcacttatatatgtcttatctttctcctttcattattacattcttcacctgttttgtctgtttttaaggagaatagctttcaatactgtttcttaagtttccttttctgatgatttctttttcttttgttcatcatcttagatcacaacatattgcaccattatttctcaaaattgtttcgtatttttgatgtttttgtttttttttaaactgcaggcggcattgctgttatggccacagacttcactctaaggaacaattgccctaccaccgtctgggccggaactctcgccggtcaaggacccaagctcggcgatggaggatttgaattgactccaggtgcttcccgacagctcacggctcctgcaggatggtcaggccggttctgggctcgtacaggctgcaactttgacgcctccggaaacggtagatgtgtaaccggagactgtggcggtctaagatgtaacggcggcggagttcctcccgtcactctggctgaattcactctagtaggcgatggcggcaaagatttctacgatgtgagcctcgtagatggttacaatgtcaagctggggataagaccatccggaggatcgggagattgcaaatacgcaggctgtgtctctgacctcaacgcggcttgccccgacatgcttaaggtcatggatcagaacaatgtcgtggcctgcaagagtgcctgtgagaggtttaatacggatcaatattgctgccgtggagctaacgataagccggaaacttgtcctcccacggactactcgaggattttcaagaacgcttgccctgacgcctatagctacgcttatgacgacgaaacgagcaccttcactt

SEQ ID NO: 21603 - DNA, 633 bp, Arabidopsis thaliana columbia
  unsure (1)..(633): unsure at all n locations
tnnnnnnnnnnnnnnnnnnnnnnnctaaagcaatatattgcaaggactgcgtaggcctgatcggcatagcgtatcaggcagttttgcatttttcagctgtctgaattttaaccctctggcggctttacagtaccttacgctatactagccactgaaaatgccggttcactttcttcgaatcggctttcaatgtgtatttcacacaaattaatcaacttccccttccgaggatctggcctgaaaggtcggataagatatgttaaacagtattttagtcatactctgcttgatcgctgtaagtgcgttcttctcgatgtccgagatctcgcttgccgcctcacgcaaaatcaaacttaaactgctggctgatgaaggcaatataaatgcccaacgcgttctgaatatgcaggaaaatcccggcatgttctttaccgtggtccaaatcggtctgaacgcagtggcgattctcggcggtatcgtcggtgatgcggcattttctccagcttttcacagcctgttctcccgctatatgtcggcagagctctctgagcaactgagctttatctctctttctcgttagtgactggcatgtttatcctgtttgcggatttaacccgaaacgcatcggtatga

SEQ ID NO: 21604 - DNA, 561 bp, Arabidopsis thaliana columbia
  unsure (1)..(561): unsure at all n locations
taaatgtttgacaatatacataccggcaatagccttggtctgggcagccacaacatccatggtcgatccagcttcccgctcctcaagagtctcaccaacacaagcaatcactttcaaaccttgagcaagtgcataggcaaccttgtctccgacgaactacaaatgtaggatagaggtcaaaaaccaaaatcatgaatttaaaagctatttgagtctccagaaaattattttatcatgtaaagtcaccaacctcgcttgattcattaaggattgccctcctttcagagtgaccaaggataacccatggaatatccaagttcacaagcatctccgcactaaaacacacaaattacacaatgcataagagcaggaaatacaggcaccacagaatatatcttttcttcctatgaaagcattccatagacaggtaaatcatattacacctacttgtctaaccaggcacgaatccaatcatggtcttactaccaactactagttgttttcttaatcacttaggttaccaattcttataggaaagaagatanagaagaagaacagatg

SEQ ID NO: 21605 - DNA, 665 bp, Arabidopsis thaliana
tattccttgtttgctcatattgtttgtgtttgctaggctaatttctcttcactggagagtctcattgcaaagattcacgaggacagggaagttgcagagaaagctcttgatcttccttcgtatgctaagtttaagggtgatccttatctgactaaatgatagaagcttttatgaaaagaattcaaacacttggatttgtaatttcataactcaaatcagacttgcattgttctttagtactatcagcctctttgatttgattaactagataacaactttcgttagattcttctcgcgtcaacgaacttcgaccaataccaatgtgatctccagacccgattcatctcctcgatcggcactcctcttgtctccggtaagaaaagatagacgaaaatcgacatcaccaccacgaaaaacgcgaagaatatgaacaacccgaacttcaagtggcaaagcatcatcaaaaacacttgtgcaatcaagaacgtgaagatcatgttcaccgacaccgttatgctctgagccgctgatcggatttccaacggaaaaatctccgatggcactaaccatcctagtggaccccacgaccaagcaaacgccgccacgtagatgcatatgaacaaaaccacaacaatggcgtaccattttggtaaacgcctggggtt

SEQ ID NO: 21606 - DNA, 530 bp, Arabidopsis thaliana columbia
tacgggttgcagcaatcttccggttagttgctccctgaaaacatataaagttaaggaaaacatataaagttaaatacttgaacacttaaactcttaacagaatgtttgggtatggaagtcttgcctgtagtagaagctttagaacgtcactaacagttctcacattatgttctacaagattttcaacatatactcctttccccaagtcttctctaagctaaaatatggaattcaaggttacgaccaatctcaaaagaaaaaaaaaaaaagcaccagactggataataaccaagtgatggaggaaaaataattgaattacttgcaaattggttgacgatggttccaagaggtcggttatctgctcgttatatatctcaagaaaagaacatttgcaactgaacttcaaattttcatctctcctttcctcttcttcctgttataaaagacctttttcagtactgaaatatattggcttgaagtgatcctcgaaaggaagttaggcaactaccattttaattcttgagaacaga

SEQ ID NO: 21607 - DNA, 594 bp, Arabidopsis thaliana columbia
acacagaagaatgatcaacgcaaacgtcaaaaatgccgtttagttgcataattcgccattgtgatcatattgttataaactttataaaaacgcagaggctaacggctgataaaaagtttgagtcattattgcaagtatatgattcagaaaaatgaataagagagacaaggataccatgagaaactcaacttccaaaaccaaattgaaaatgttgtatcgagtagtattccggttagaagaatccggtccgtatcatgaaccagattctctttctgtagctctcggtaaataacctaatcacactaatgaaactcagataactaaacttccccatcagattagagatactctcatactcctgaggattgacatctaggctagtttactatccggtttgtaacaaaaccgaaccggttgattactgaacgccggacaatttagcccaatctacaaattgcataccgccatacacattgttagcaaaccggactcccaccgtgaatgccatagcgaccacagggatacgtttggccgctgtagaaccttccacgacgcgttcgaggccgttgatgatttggtaacgcgcattggaag

SEQ ID NO: 21608 - DNA, 532 bp, Arabidopsis thaliana columbia
  unsure (1)..(532): unsure at all n locations
tnnnnnnnnnnnnnnnnnnnnnnnctaaaggcagggcggcaatagctgggctatttacgatgactcgttgcctgaaaaaggacgcggtaatgttcgctggcgtacgcttatcgagcaaatgctcagtcgcggcggcccgcgcctttatcaaaaaccggcggttactcgcgaaggtcaggttcatcatcgcgaactcatgtgccgcatcttcgatggtaatgaagaggttagctcggcggagtatatgccgatggtcttgcagtttggcttatcggaagagtatgaccgtctgcaaatcagccgtcttattccactattgcgttactggccagaggaaaatctggcgattcaggttaccgttgagtcgctgattcgcccgcgttttcagcgttggctgcgcgatacgttaatgcaatgtgaaaaatcacaacgaaaacgcataattattgaacttgcagaggctgatgtaggtcaacatatcagtcgtttacaacatgttattcgtttagtgaatgctttaggggtacgggta

SEQ ID NO: 21609 - DNA, 600 bp, Arabidopsis thaliana columbia
gtaacgtccgccagtgtgctctaaagagcaagacttcaagatttgccgccacctcttcacggacgtgttccgcgctggtcatgccgatgaataccgcttcgatagccaacagaccaccggggagcagcgggtagcatttcagggccatcgccagagtgaaaataaattccgctaccagcaaccagcccgcgacgaaagggctgatgaggaaaattaacgggtttacgattaagaaaatgatgagggcgagtttgtaccagtcgggggactggcccaaaaaattgcgccatagccggcggcccctaggagatctccatgatggtttcccttaccttacaaataatcaatgatgtttttatgtttaaacgcaaagcttaacggtcaggcaggagtgaggcaagtcttgatagtcaaggggaaagagatgcggaaaatgaagccttgatccctttttcttctttttgtctgctatcagcgtagttagccctctggtatgatgagccaactttgttttgctgtgttatggaaactcactatggtcattaaggcgcaaagccggcgggtttcgcggaagagtacattattgaaagtatctggaat

SEQ ID NO: 21610 - DNA, 805 bp, Arabidopsis thaliana
gttcatgagtttaaagtattacctgaaacctgcaaatgtagtaatcatcgccgaacaaagccctaaacgcatcaacaggtttcacagaaggattcctcggattaaacacaacgctagtgttgaccaacgcgttgactcgatcaggcctgatcatacaaagccaccacgcaacaattgctccccaatcgtgaccgacgaggaaaacccgatcaacaccgagcgaatccagtaatccgacgaggtctccgacgatatgaaggatggtgtaagattcacgagacggcggcgcatcggaatcgccgtatcctcgaagatctggagcgattgcgcggtaacctaaggcagcgaaagagacaagctggtgacgccatgagtaccagagatcgggaaagccatggacgaataggatcactggacctgaaccaatcgaagccacatgcatgttaataccattggtagatatcgtcgtgtgctctatcttctccattgcttctttcttctccttctcacttctttactctcaggtgtgaatgaacaaagaaatgtcattaatttaatatttttggagtcaaaatatttgagatatttttattttattttttatgactaatataaaatagagctattgacaaatatagcaccaaaaaggttttcttccaaaatcaacacaatatttttaaaatttcacaaactaacactataaactttaattaaatttaatgaaaatataaaatagaaaataaaattaagagcaaacactaatttaatattaaattgagtcaattttttagaaaaatagtaaaaa

SEQ ID NO: 21611 - DNA, 531 bp, Arabidopsis thaliana columbia
cgatggaaatacaaaacgtacaacttcacgatcgccacattttggacaacacatttggttcgcgctgaagaaacggaaaccggtccgacaggtcctaattcattctacaatctctacctcgacgaacctgaccctacttgggcttcccaaatcggtgagttcgattacataatcatctcatctggacaatggtttttccgaccactcttccttttcgacaaacaaaaaaggataggatgtttgtattgctacattcccggagtcagaaatgtcggggcacatttcgcgtatagaagagcattgagaacaacattcaagacaattcttggattagagaattttaaaggagaagtgtttctgaggacatttgctccttcacatttcgaaggtggagaatgggacaaaggtggaaattgcttgaaaacgcgaccatataagtatacattgttcatccgacattttctaaaatattagtttcttctagaatactttaatattatgagttttgtgttttttttgttgatgtttgag

SEQ ID NO: 21612 - DNA, 594 bp, Arabidopsis thaliana columbia
  unsure (1)..(594): unsure at all n locations
tnnnnnnnnnnnnnnnnnnnnnnnctaaagggttttaaagtgggtacttacgaagaactgatcccacaggcggatctggtgattaacctgacgccggacaagcagcactctgatgtagtgcgcaccgtacagccactgatgaaagacggcgcggcgctgggctactcgcacggtttcaacatcgtcgaagtgggcgagcagatccgtaaagatatcaccgtagtgatggttgcgccgaaatgcccaggcaccgaagtgcgtgaagagtacaaacgtgggttcggcgtaccgacgctgattgccgttcacccggaaaacgatccgaaaggcgaaggcatggcgattgccaaagcctgggcggctgcaaccggtggtcaccgtgcgggtgtgctggaatcgtccttcgttgcggaagtgaaatctgacctgatgggcgagcaaaccatcctgtgcggtatgttgcaggctggctctctgctgtgcttcgacaagctggtggaagaaggtaccgatccagcatacgcagaaaaactgattcagttcggttgggaaacatcaccgaagcactgaaacagggcggcatcacctgatgat

SEQ ID NO: 21613 - DNA, 586 bp, Arabidopsis thaliana columbia
  unsure (1)..(586): unsure at all n locations
nnnnnnnnnnnnnnnnnnnnnnctaaagactttgcgcatcaagaatttgcacggcaatccacgttgccataccaccgcttccgcctgtgtcagttagtttgagcagtgtcggcgcaagggtgtcagcctcgccgctaaaaaggacgtccgcgccagtaataccagcggcacaaccggtgatatcgatattcaaatcagcagcagtgcttacggtattcgcggcctgaaaatcactgatattaaaatcaccaatatgaatattttgtaatgcacttttggtggcgacatcacagccctgatcgaccacattcccataaatatgcatactaacttgttcaggcccagccatcccgacatggatgttaagaatgctaaagaacaagataacgcactgaaatatcgtttttttcttcatacgttcacgcgttaatcaaaatttattctcaccgttgccgtggcttcaaatcgcccggtttctggtggtacactgtcgtgctgactggatagacattcattcgcgcgatactgtctgcatcatcaggaatagagagcggtaatgttcaccagcaggggaaataatgttgtc

SEQ ID NO: 21614 - DNA, 1113 bp, Arabidopsis thaliana columbia
taacagtgattgccccacgtctaacaagcacacaaatcatgttaaatgcccattaagctgcttgtcgtcagggtgatatgtaggagaagggagttctcaaagtacttacttagctaattggctggacgaaagttcgagagccaagagtgtagctaatgcgccacccaagctatgaccagtcacataaacatgccatttatcttcacgctcagtaacatcgtctctgccaaggggtgagagagagagagagcatgtttattagaattgatgtaagattttagcacacctcgaagacgtaaaatttcaatcactatattgtactgtcctgagcaaacaaaataaacttcatctataaaaaacattccaagaagacagattttggcacgttcaccaatgacagacaattttcttcccagcacaggatgcaaccattgaaacaataataagtaacaaaaaattccctgaaaaggagaaagtaaaatgtaaaacaagaagcacctacatgtagccaattgtcattttgagcagcgatataattcttatccttacggaatcgtatgcactcagaaatccactatggacctgcaaaatccataacagcattaaggaataactcaataaacggcatacctgacaaattccagggtttaaaacatacctgtacttcttgcttgaagtccccgccaattcgttcaggattcagactgcaacatatttaaaatgtcaaacaaagagatgaataataacttattaaaacttcaaatgtgcagattcaactagcttctgaatcaatgtagagatgctgaataaatagacagtactaacccagcaggaactagcatcagatcagtctgcaaatctttccactttgtctgacaacatgaaatactgacaataagaacgataggagaaaaatcaaccacataatattaagatgatatagataaatacctacctgttcagttcctctgaaagcgataactactcttttcctccttgcatcacgccaaattgccacctgcagcttgcaaattagtatatcactatctatcatgaacttgtattttcaggaaaatttgtcgaagcataaagattcacctgtgtgtcagtgat

SEQ ID NO: 21615 - DNA, 593 bp, Arabidopsis thaliana
taggttgagtccttttgaccttttggatagttttatatttaaggttatttccttaaacgattccttagtatatatactagtagggctacattccatttcttcagtaacttttagcttttatccatagaagacaaaaaaaaacaaaaaatgagtgatgatctatggaatgacatctagtatatacacttgggttgtgatgaccatgaactatttattccatatcaagcttatgctggagctctggctactaatagattaagtcttctcggaagaatacttaatcctcaaactcagagtgttggaagagttatacttgagttaccttattagtggggattgggttcacaagtacatggacgtatccttgatgaaaggtgtgttcaattccgctttcgttctgaggcagacctacttaatgtcctcagtgtataatgaatggttgattgcacttcagagatgggaagattttcatgcaaagtattttcttacttatatagatttatgggtcaaattagaaggatcctctaccttatgtacggagtggcagttgggtttatgcaagtcttaggtgagttgtactatggattcaatga

SEQ ID NO: 21616 - DNA, 529 bp, Arabidopsis thaliana
gcataaagatagttttagccattatcacaataaaaataaaactaattttcaaatgaatataacaatgacttttgtttaccgatttgttaaaatattttctgtaattaacaaaattttcctttaaattacgactgttttttttaatatttatacgttaaaagaaatttaaaaatgttttcgtaaataattttaaaactgtctttggagagtacctgagctactgtttttccctttgcctcagcaatttctttgagaacatcagactccatgattttgtgagttccccaaaacgctcctctcgatcccaacaccgaataagctgtcacaacaatgcctttcgacttacataactccctcagttttctctgttgccatactggactcatctccacctttttcacattatccacaaacaaatgtttcaaattatttcaccaatccaatattttcttataaaaaaaaggttgaacttatttgataaattaaataagagagaattttaaatatacttgattgacactaggtggga

SEQ ID NO: 21617 - DNA, 490 bp, Arabidopsis thaliana
ccaagaatcgacgctagcatcattcgtaaagctggttccaaagccatactcattggcacagcttcctacgccttgccattctccctcggtaacctcactgtcctctttttgaaaaacacttacaacctcccgccagacgttgtccactgcataagcacagtgatctccctcaatgcaatgacctcattcccggtcaccacaaccgtcttagctgagcttaacatccttaactctgatcttggacggttagccacaaactgctccattgtctgtgaggcctttagctggatagttgcacttgttttcagaatgttcttgcgggatgggacactagctagcgtttggtctttcgtttgggtgactgctcttatcctcgtgattttcttcgtctgcagaccggctatcatctggttgacagagagaagaagcatttcgatcgataaagcaggcgagatccattcttcccgatcataatggtcctgctgacgat

SEQ ID NO: 21618 - DNA, 539 bp, Arabidopsis thaliana
caattaacgtttaaacctgttgccgaactcgtaccacccgctggtggaggtggtggtggattaaacgttaatgttcttcctccggctggtggagcgtggtggcgttgaacaagtagtaaaagctaatcctaaagttttttttttatttgagcgtggacagcagagtgtggtcggattgtgatggagctctttgcagacacgacaccacgagcggcggagaatttccgggccctatgtacacagggagaaagggatggggaagcttggtaagccactccactacaagggatcaatcttccaccgtcttgaacctaatcaaatgttctgtggaggagatttcactgctggtgatggaagcggaggcgaatgtttgcctttggttttgagtttgggtgttccatcgattttttaaataatttagctaccattcaatgatgaaatagaaaggttaaagaatctctatcgttgttcctcttttcaatttgttcataatgactcaaaacccaacagattatagttacacgagttaagcaaacatg

SEQ ID NO: 21619 - DNA, 2548 bp, Arabidopsis thaliana
cgacataatgatgtagagttggatgcgatgcgtagtatgggaatttgtttcaaatgcaaagggaagtatttcaggggccatgaatgtcctatgaaggagttgcgggtattgacagtggtgaatggttatgagttggaagttttggaagagaatatggtggaatgcttagaggaggagctggtgttgactcttgccacaaaacttgaattgcgaactttatcattcaactcttttgttggattacattctccaagaacaactaaattggtgggatggattggcaaaactaaggtgatttttatgattgattgcggtgcttctcacaatttcattactcctactacaacaaccaagttaaacatcaaaacgcagagcgagttgggtttggatgtgctattgggtaatggagtcctagtacaaggtattggcacttgtagagatgtccattttgggttgtctcaccttgcatttcagggtgactttgtcgcactggagttgggaagtattgatgtaatcctcggagtacaatggttggaaaccttgggtaaatgtttggtggattggaagttacaggaatggacgtttatgtataaagggaggttagtacatttgaagggtgacctttcccttcatgagtctcctttatccttgaagtctcttgtggcagctccctcaattgggtgtcctaggatattgttagtgcgctgaagggaagtgaccctccagctactctatctctagttcctcctgctgtgactgagttgttaaacaagtttccacaggtttttgcaatgccttctggcttaccacctatacggtgtcaagagcatgcgattaccttgcagcctggtgttacctccatctttgtgaaaccttataggtacccacacgcacggaaggaggttatggagaaaatggttgcagagatgttgagttcgggtataattcgccctactaacagtccattttcaagcccggtgcttcttgtcaagaagaaagatgattcctgtcgcttctgtgttgactatcgagcattgaacaaggtcacaattccggataagttccttattccggttattaatcagctattggatgagttacatggttctgttatatactcgaaactcgacttacgctctggatatcaccagattagaatgaagctagcagatattgaaaaaacagcttttcgaacattggagggtcattatgaattcttggtcatgccttttggtttgaccaatgcaccagctacattccaaggcctcatgaataagatattcaaaccatacttgcgcaagtttgtgcttgttttctttgacgatattctggtgtttagtgatagtgttgaggcacatgtggagcatttaaaattggtattgcagttgttggaggagcaccagttgtttgctaacatgaagaagtgttctttgggagtgtctagtgtggaatatttgggccacattgtgtctgctaattgtgttgcaactgatgcagcaaaaactgaagcaatgcggctttggcctactccacacaccataaaacagttgagaggttttctgggcttaacgggctattaccgaaagtttgttcagggttacgggatagtggcaaagccttaacagatttacttcgcaaggatcaatttatttggtctccggcagctcaagaagcgtttgacaatttgaagaaagccatgtcatctgcacctattttggttttacctgattttaccaaacaatttgtagtcgaaacggatacttctggagttggagtgggagcagttcttatgcaaagctagcgccctttggcgtactttagccatggccttacaccacgcgagcagctcaaaccagcttatgaaagggaattgatggcctttgtcatggcatttctcaaatggaaagcttttacaatgtgaaaggagattacaagtgtaaaagtatgtgtgtgaatgtaagctagattgaatgtctcttccaagtcgtccttgctcccttatataggtctacgcacgtggtagctctgtccgggatctgcggagatcctcctggatattcggtaggtcagttttgagatatcaggtccgctccgtgaatatctcctcgtcagttcctaggtcattattcgcttatctcccttcatcagctgactgggttatctggcccaaatacccattcgcgtatgtgggctcgtgagctgcgtaggtcctctacttagtgggattggtgggcttttgttggctggcttggtattttcgcaggtggattcctggaggggaatccagctcaaacaactatcctgtcgttgtagtattttaggtgtcaatccaatctggtgtgatgcaaacatatgagatatgattagaaagctctaagtcaagccaagcagagagttggttggtcctaacagtcctagtattcaataacagaaaggaaatgaaaataaaagcagaaatagcaataacaggcaggtgaatacaaagcaaaaatgataacaggcaatcaaatggataaacgattcctaaggatggggtaacgaatagtgt

SEQ ID NO: 21620 - DNA, 2210 bp, Arabidopsis thaliana
gcaccaagaatttgtttctaaagaggtcgtgcaagatttggttaacagagctgcaaataagtattgttttggaccgcaactatagcgtcagatccacagcgactcatgttacgatgtcggcaatctaatacaacaggttgtcgatggtatttacgatgtgcaaaagtaaagagttcagattgttttagtgttagagttcacaggaagatgcacacatgcaagcggtctaataagaactcaggcatttgtaaacataccggcacactacgattaatcgcgtctattttgcatgacgattatccaggtgagtttcaaactccaccacctaaaagcataatgagtattgttcggggaagaatgggtttgcattgctcgtatgctaccgcatggagagggaaaagacaacacgttagtgatgtgcgtggtagtcctgaaaaaagctacaccgacttgtactcttatctgcacgtattaaaggaggtgaatcccgggacaatatcatatgtggaagtggatgcacaacaaaagttcaagtacttattcgttgctttgggtgcttgcattgaagggttcaaagttatgaggaaagttgttattgtggatgccacttttcttaagaccgtatacggcggtatgctagtttttgcaacagcccaagatcctaatcatcacaattatatcattgcgtctgctgtaattgatagggagaacgatgctagttggtcgtggttctttaacaagctgaaaacagttataccagatgtaccaggtttggtttttgtgagtgatagacatcagagcatcatcaaataatttatgcaagtgtttccaaacgcgagacatggccattgtgtttggcatttgtctcaaaacgttaaagtacgagtgaaaactgagaaggaagaagcggcggctaacttcattgcatgcacacatttttatactcagtttgagttcacgagagagtatgctcgatttaggagaagatttcctaatgtcggtacgtatttggatcgatgggctcctgtggaaaattgggctaggtgctattttgaaggggataggtataacatagacacgagcaatgcgtgtgaatcattgaacagtacgtttgagcgtgcaaggaaatacttccttttacctttgtttgatgcgataattgagaaaatttcagaatggtttaacaaacataggaaggagtctgttaaatattctgaaacaaggggtcttgtgccggttgtggagaacgaaatacactccttatgcccaattgcgaaaacgatgccggtgaccgagcttaacagcttcgaacgtcaatacagcgtcattggcgaaggtggtatgtcttattctgttgacttgctaaggaaaacttgttcttgccgacgttttgatgttgataagtacccgtgtgtacatgcgattgccgctgcccgacactttgtggggaccgaatagatattagatggtctcgaaatggaagacctaacttcgcattattaccatatgaatacgtagatattggcatactacagaaccatttatccagtcccacattcatcagtttggattatttctgatgagataagacaattgatagtcttaccgccgatacaacaactaaaccggggagaaatcaagaaacccggtttccatcaacaggggaacgtcgtcgaaagaggactaacaacaagtttcagcctgggattaatatcaacgcgtggttgcagcccgaggagtccgattcataattaaatgtgtattttgtgttgtgttgttatgtctgtaccgtgtacttgtgttgtatgtactattgcttcatgtattatgtcttcatttttaagtactttggaattttcttaagtattgtgttgttatgtctgtaccgtgtacttgtgtcgtctgaactattgcttcatttttaagtactttggaattttgttaagtgttattatgtatgtaccttgtacttgtaccgtatgtactagttctttcatgtttatctcttacaataaaacccatcctatatatataagaaagaaatataattttagtattctttttttttacttaaatttgcttcaatttaatttaatttaaatatttttattatatcaaaaatatgggtttttctatgaaaaactatccagtttatgggttttttaatgaaaaatacacctctctctacttttaattaaaactataattat

SEQ ID NO: 21621 - DNA, 492 bp, Arabidopsis thaliana
gcatctaaacctctcggttgtacgattagggcacttgctgctgatacaaagctgttggtagctggcggtactgatggattcattcattgctggaaatcactggatggtctccggaacctgtttgatctcacaggttttcagaaagagaagactgagtttcggctatggggacatgagggtcctattacatctcttgccctggacatgacaagtatctttagcggttcatgggatatgtctgttcgtatatgggatcgatcttcaatgaagtgtgtcaaaaccttgaggcatagtgattgggtttggggacttgcacctcatgaaaccaccctcgctagcacgtcaggttctgatgtatatatttgggacgttagcagtgagactccattggcgatcatccctgatgctcatgagggtccacttactctttggcaagaagccatactggggatttcctgtttactggtggagaagatggagggataaaatgtt

SEQ ID NO: 21622 - DNA, 1951 bp, Arabidopsis thaliana
acttggagcatggaggcaaaggcgcagactttacagcaccctctttactctatctcgaagattgagcattcatccaaaccgcctcaagtctcttgtcttctagtgaatctagggttttcaacattttagtataaataggtcactttgggatttgtccaaaggaccaagcttttatctcttagtttttctttgtgttcttgaatcttaaaaccttaattactcttaatctattttgttttgcatttagttctttgagcaaagttgtttatcttgtttagatctacattttgatatgatttcagtaatttctgggttggtgttcttcattatgttgcatgagtagtgattagggctcttgaggatggattagattagggaaatctctaggttagtcaggtggttaagattaggctagatcccttctggattcgttggcccctatgcggttttcgctggctaatgtgggaattcgaccataggtatccagcgtcctaaagacgttcaaatggatgcctgatctacgaatttcagagatttgtagactattgcccaagagattagatgtttagactgcttattgactttggtagattgttgcttaaaccctgctctgctatgtttcatcaacgagagttgagattcgaaagtggtagagttatgggggtctctgtcacgaaagtggattgacctggtttttgaatctaacgtcatggtatctacctttcgcctattaaccatttgatgaactgtgagacccagtcccggacgtctcggcgtccggcgaccgtgtactcaagttcgagcctcttcccggtcgaacctcttaatttttcgcgattcaacatagaattgcctatatgaggctaaattctataatcactttcttattacacagctgaagtctttctaaccttggtttaattctaaccaactcgtgtaccggttttatcgtctttgtcccttagacttagatcgatcctttactcggtcaagacatgcatattgttcgctaaccattctaggcctaacaatcgcatattcctttatcctattttcacggtccattcccaaacgtctatcctaactagtaagctagatcgttacataccttggccaatatgcggatttgattccttagcccgtttgtcgccttatcctattcgttcaatgattcatatgcgatcgtgaattgatgaaccaatccctatcgttacttagccatacaaccaaccaaccaaccccactggtctaagtacaacaatagagattggggatcgtacgatttccttggttcacgatggccgaatcaagctcttggcttattggtccatccgtcctccaaacgtacgcaccttcggttccatggtggacgattgaacccttggcttatcgaaccatccatgtttccgatcgcgtcgtttactacgaccgcccacggtttactaaccgtttatccgtccggtctatggtggtcgataaagctttcggcttatcgatccatccatacgatccgaactatatccttatcacacccaagggtccgtggattcatccatcggatcatcgtaggctagcccatgaaatccttcttccgtcggccttaggtttgctcacgggtccaacatccattttgtccatcggttcctaccgtggactttcccgttagttatccatcgagtctccctttggtcttaccgatctctgatcagtttcaccatagctgaggagatagatacatgaaggcgaccgtgatattgatcctatatggtgaatcacgtttccttacccattcttgaagctttctccctttactggtaagattacatccatgggcgacccttgggtgtgtttggatgcacttatctttgtgcttcctcgaacacttttctcgatctatcccatccgacgatcgttctgtccgacccgttctatcagacgatcggactgtcca

SEQ ID NO: 21623 - DNA, 495 bp, Arabidopsis thaliana columbia
  unsure (1)..(495): unsure at all n locations
cgactctagagccaaatcttcaacgccattgaaatagcatctcacaggttagattctttcatttaaaagatgaacttaacaaccctaatcggtcattaggtcgagtagatccaacaagtgacaaaattaggaactaaaatgcaatcaacaggggatgaaaatagaggatacaaataacaggtanatacaagtgcaatcaacaagggatacaaatcaatctaatagaagttctacagatggatttattgataagggcaactctagggttcatcaaatggctaataggcgaaaggtagatacccatgacaataaattcacaaaccgggtcaatccactctcgtgacagagacccccacaactctaccacttcctaatctcaactctcgttgatgaaacatagcagagcagggtttaagaaacaatctatcaaagccaataggcagacaagccaatcccttggtcgagtctacatatctctggaattcgtaggtcaga

SEQ ID NO: 21624 - DNA, 2657 bp, Arabidopsis thaliana
tatatacaatgcaacacacacttcctgagccctcccccaaacttaaatcactcagtccactgtgtgaataaacttggaagagagtactcaggacaaatccaatcacagaaacaaaaaaaatgaagaaacaaatcacaatagatgatataatacaatggtgaagtgaggcgcttacctcagttgaagaatgaacgaagttgctcgtcaatggttgcatgtgattgttctcaggccatagacgaaccaccttgttctgtatcagctccagcaggtgggtactcgacctcatcagctctgtggcggccagcacctctctaaggatactcgacctctctccttctactgcggccagcaccgcggtcgcgtaaactacgagactgcagaagttgtctgctcctactgctagatcgagtgagtgtggtcctcctcttcctcccagattcacgaggctcgaatgatgaatgcctcgcaggggcatgcggaatctcctactctctaggcttaggcctgcgccgacttggctcgcgtgcgtcatatctcctcgaaggcatgtcctgagggagatgtccctgcggaatagctgtagtggaagaggagcagctgatcttgtccttcagaaacttgatagccctgaggcacttggcgagtaacttgtcctgtttcatgcaccacttttgcagcttgctgttgtttctgtgagcttcgctcaaactcctgctttccctcacaggaggtatatgctcactgaaatgatacatgctcgtgtcaaactccgcctcatctatatcatccgtctcatcaacatcttctgttgtagctccttcggtatgactgatctcctcagttggtggactgccctcgaaataaagatcttcaagcgcaggcttgaagtcaatgttcctgccctcgataatcctagtagcgtcaatgcaggggagaagaatgttggcgattttaatcgatgaatgctcgaacctgtagcggtgaaagtcgccagccatgtcaaactccaagaactcacatcggcacaaatgatccaagtccatcattcttggtgctaaccctggttccttgagcggtactccacaaagccacccacgcatagtgctcctctcaccttattctttccgtttgtcaacgcccacttccggtatccacacagatggatcaacagaggcagtactggtggtgcgttgttgagatcgcctctcaagacattctctcccttcgtccggtggagaatccctgtaagcgcataatttatcatctccatgtccgtgttagacacggtgcctgtagactccctggagtaaaagacgttggcaaccgatcgctgaaagtagcggatcagaggactccggatttggttgctcttggacctcgccgagtttagcggtagattgttcccaatagtggcccacaagtccttaagctcttctctgtcaaatcgtggtttggttccatttccactagggaaaccaatcagttcttccaagttcttgatcgaaagctgataccgctgttcatccactgagaacgtcaagaaacctagtcccatggtatccaactcaaagtctgtgagtccctcatacatctccacttgcagcgtggaaagaaaatcgattgtctcctccttataggcagggtaagggtaaggcatgagtgtctccagatgacacttctcgaacagatgctgtacgtcctccagtaaccccagctgggctaaagtctcatagcacggatacctcgttcccctgaagtcattcatctcaaagaacctgatatactcctccactgtaacctcgtcgggtttgttcagcagcttcgtctccttacgccatgactctggctcatactcagtttcgatgtcctcatcaatcagctcatatctactcgacatcgccctctttcctctggcgatttcagctcttctctgattacgtcgggctgcagagcgttcgaattcatccctgaagctctggtaaacatgttgagttgcttccttggagaaagaacaggaggtcgagtagtttggatggtgtgtagacgcgatcgagtatgtgtagaggttatgattccttggtcaaacggtgatgagcgagaggcaacgagaggttgaatgaagttggaagagcggtgattcgagttgttgtggtagtggagaggtcgagtgaaggttgtgaggatgactatggtgatgagcggcggtgattccttcaggccgaatgatgaggcttggacggaagagaaggtgatgcgaaatcgagtgtcgcagcagtaggtgaggtcgagtggtttggatttggtcgagtgtatgaggaagagagatggggaggtcgcgtattttgaagagagaaggcgatgggatcgagtgaatgggtaaggggaggtcgagtggagtggagaagaaaagatagattttgttatcaccttatggggagcgtgggagacatggctgcagcagtgggtccctcgttgtcttcatgtctcttctctgtattctctgtttactagaaaaatccccaggaaattccgcaatcttctaaacttgatgaactctttgtaatattctgtagcttctgttggtcgagtaaaatgatgaattttttttttaggtttttaaacatcactcatactcgaccaatatactcgatctc

SEQ ID NO: 21625 - DNA, 536 bp, Arabidopsis thaliana
tctagtaacgtgccgccagtgtgctctaaaggtttctagttgtgagaccgataaggaaaatgtagatgatggaaggagacatgggcaggggcagccgtatagatataagtatgtgaagaagacgtgagtgccggagaaagtcagacagactcaattacttctatctgtcctgcaactcttgggatcgtttgggtttgggcgttgaggggtcgttagattaaatatcgttagatttcctttcattttaaatcgggcggttaagctcaggtgaacttatagccaggatggttggcggctcaggtacagtacggcgtcagaggataatgaatataagattctgcttgtcttgtcctatttgtgattacacataaagcggctcattggggattctccgtgatctatgaaagttgtttagggttttatacatttaacattggttgaattcactggtggtattttccgctacaaagcaaacaatcaactatagactaaacaagattgataggtaagaaacattccatcccgggttaagacat

SEQ ID NO: 21626 - DNA, 2177 bp, Arabidopsis thaliana
tcgactctagatcccccgcgatgacacgttcgctactcaagcggatgagtgacacgtggccacctaaatttcggctccaagctactaatattcgattccaaacaacttttcttgggccccaagttagccgagccacgcatccttggcgcggtcaacagtcggtcaacgcttggcaaggcaaactttcgcccgtggcacgcccgttcttgcccaaacttgcccatttgtgcccattcttgcccaaacttgccctttgatattctatggtgttttgggcacctaaggtcaattggccatgcattcgggcaactttcgaaaattcggactcttgcccgtggtcgatgtccttacgcgggtcactacactatccgtttgagattatgtgtgatgcatcagattacacagtaggaactgtactaggccagataatagagaagaagcttcatgtcatatattacgccagccggacgttagatgaagctcaaggaagatatgcaacaactgagaaggagcttctaggtgttgtattcgcatttgagaagttcaaaagctatttggttggatctaaggtccctgtctatacagaccatgcagctttgaggcatttgtatgccaagaaggatactaaaccaagactgttgaggatgatacttctgttgcaagagtttgacatggaaacaatagacaagaaaggcattgaaaatggtgcagtcgaccatctgtcaaggatgagaattgaagaacctattccgataaacgactcaatactagaagaccaactcatggttgtagaattcttcagtgggagctacaacatgaaagagttccaccaactaaatgctgttgagggaagatctccatggtatgctgatcacgtcaattatttgacatacaagaaagtgtcaaatattctgcaagcaggcttttggtggccaacaatgtttaaggacgctcacgagtttgtcccaaaatgtgattcatgctggagaaatgagatgcctcataacccaatcttggaagtggagatctttgataagtgtgcattttacatgttttgagcatccatttgttatcactattgcatcatatcaccactgttttataccatttctcatcatttgtcatcactttgcatggttaggatagttttgcatgcatgttgcatatatgtgttgatttcaggtaatttggagctgttgactagctaattggaagaagcggaaaggaatcatgtaaaaccactcgaccagtcaagatctcaacagaccactcgaccccctggtcgagtagaagacctcagcactccacgtcacaacttgacccacatggtcgagtacgaccaggactaccactcgatcacattactcgaccccctggtcgagtatcatcccgtccaccacatcaccttcactcgatcacactactcgaccacctggtcgagtaccttcatcaccttcactcgatcactctaccaccaagccgagtaccaccatccctatcactagactacatactcgattgccagcttcagagtcttcttcattccgcactcaaccagacactcgagcacaaggaagaaaagaagactctagcttatcactcgacctctcactcgaccacctgggtcgagtgccgttcttaatctgtcccaagactgcgtcgttttgagtattagggtttcacaaatattttgctataagtagcatgtactttacatttttgtttatctaagttttattccgcagacattgtgttcttgacgtttttgaatccgggtttctcttaatctattcagtattcagtatttgttcttgatttcgtttactaagttgttcatcctgttatcatcttggtattactctgttgttatcatgctttcattctattcaacgtttatgttctctgcaatgatgtctgggtagtgaataggtttctgaggatgggtaggagtagtttagaattctcagtatgctaggtggttgagtttgatttatagatcccttctggattagttgttcttaatgcctattgttttctgatcaactgaaatttgagccaagacatttctgcgcccgaaaggtgttcgatgaaatgtcttaaccacttattccagagattcgtggctctgtaccaaggtattggttgcatggagcgctttggctttaacttgttgattg

SEQ ID NO: 21627 - DNA, 1930 bp, Arabidopsis thaliana
gtcccaatagtgcccacaaatccttaagctcttccctgtcaaacctgggtttggtccctttccactagggaaccaaacagttcttccaacttcttgatcaaaagttgatactgctgttcatccactgagaacgtcaagaagcctaaccccatggtatccagctcaaagtctgtgagtcccttatacatctccacttgcagcgtggaaagaaactcgattgtctcctccttataggcagcgtaagggtaagacaagagtgtctccagatgacacttctcgaacagatgctgcacgtcctccagtaaccccacttgggctaaagtctcatagcagggatacctcgttccccagaagtcattcatctcaaagaatctgatatactcctccactgtaacctcgttgggtttgttcagcagcttcttctccttgcgccatgactctggctcatactcagtttcgatgtcctcatcaatcagctcatatctactcgacatcgccctctttcctttagcgatttcagctcttctttgattacgtcgagcagtggagcgtttaaattcatccctgaagctctcacaagtatgttgctctctcggtctagtggatcaggactccgcttcatccacattataatcagggtccatagaggattctccactgtagttactcatgatgaaacctgaaaacagacaaaaatcaaagataaacgttaatacgttagtcccaacaaaaccaaaacccaaaccaacagagtaaaccggtcgagtgtaccaatttttttttttttttcttcggtttggtgaacttgcggtcgagtgactccttggttgtgtgaatggagtgcgcttcgcgatcgagtgaccttgagaggcgagagatggtgaagcggtttaaaagaggtcgagtgactttcggagatgatcgctagttgctttgtaatcgagtatgtgtagaggttatgattccttggtcaaacggtgatgagcgagagccaatgagaggtcgagtgaaattggaggagcggtgattcgagtgattgtgctggtggagaggcggaggtgctcttgccgtgaagtcgagtgagtaacggtggtcgagtgaatggagcaaagcggtgaagttgatgatgatttgaaatcgagtacttggtgagaatgcgagtgagcgatgatgagagagatgcagtgaatcgagtgaaacggcgaggtcgagtgactgtaaggttgagaggcggaggtgtagtgatgtcgcgaatggagagatgatgagcttgatggtgataagcgttcggcggtgaagagatcgagtgggcgttgaggattcaagtgcgtgaggaagagagatggtgaggtcgagtgattgagagaaaagagatgagagtttggttgattttggatgagagatggaggtggagtttaatggaagtggaggagatgacgaggtgatgaggtcgagtgaagagggatgggggtcgagtgatggggttgacgtcgagttgaggagaagagatgaggagagatttcttgtcctttggtctgttgcatggaggacatgggcgtcagcggtgggtcccacaatgtcttcttgtccttattgtgtactctttgtttactgtaaaaaccccaggaaatcccgcaatcttctatagacttgataaacgctctgtaagtctctgtagcttctgttggtcgagtaaaatgatgattaaaatttttttgggttttaaacattactcatactcgtccaatgtactcgatctctaagccatctgtagagtaaaatttttgaatttttactctagcttcacgttattcctctactcgtgagaaccacaaacacaactaaaacatatcaaaaataacaagaaagtaaagattatttacaaggataatcatgggacttcctcccaagtgagcttgtttaaagtctc

SEQ ID NO: 21628 - DNA, 1900 bp, Arabidopsis thaliana
atcactgttttatatcatttctcatcattcttgcacactttgcatgattaggatagctttgcatacatattgcatttctgagttgttttcaggtgatttagagctgtttgcgagcaaattggaagaaacgagccagaaccagaagacatactcgacccccaggccgagtgactttggagccattcttcccacatactcgacccccaagtcgagtgactttggagccattcttcccgtccactcgaccaccaggtcgagtaacctcagctcaggccactcgacgacattactcgaccccctggtcgagtacagcttcgccacgccacctgaccacactcgaccattcactctaccacgttactcgaccccctggtcgagtatcatcactcaccaccatcaccatcactcgaccggacactcgatcacgtcttcacagtccactcaaatccgcactcaaccagacaagctgagcacaaggaagaaaagaagagaagacaaagtgtttggaagcggcctggacctccatcggatcgcgaagcccatctcggcccattatcactctatgggtcgggcgattaggttattggctcgtctactatcattttatttcgtttggtataaatagatgttttagggttctgtcctgagacatccagtcgacattgcgtttttttttgcttcagtattatttttcagttttactctgctacgccgcttttgcttctgcaacctgtagttcgcgatttttccaagttattgagattccgcgtttgatttcattagtcatcttgtttctctactctttatctctttacttatgcaatattatcgtttatctgcgtttatgtctttgagcatgttgtctgagtagtgacttagaattcttagggatgggatagagtagttgtggaatccgtagtctgtagaatggttaagttttagaattgattgaatccctttaggactagttgcgtttactgcttatttctttctgatcaactggaattcgatcccaagcattcccgcatccagaaggtgttcgatggaatgcttgatccactagttcctgagatatgcgtctctatcccaagggattggctgtttagagcgtttattgactttatcagtctgttcgtattgcctgcatagttagattccgttaatgggaattagtctgggctagctttgcttgaggatttgtatcacgggagtggattgatctgttgttgaacctgttgtctagggatagcttgattgcgcttgttaaccattcgaataggctaggacaccactctactcgattaccccatccttaggaatttctcgtctaccttatttctctgttttatcgttatcgcttaatcgttctcattgcctgtttcttagtttttacaatcacttgaccaatatactcgaccacacccagtgtctggcaacagactgtgcagtcgagtatagctgtttcatatcctgtctgttactcgacctgttactcgaccacatcctacttctggcatcagcctgttgtggtcgagtgattttagtaattctgttattgcttctgttttctgcatgttcgcttaggactgttagaaaccccaaatctgtttttgcttggcttgacttagagacttctgatcacatctcatctgtttgcatcacacccatttggattgacacctaaaatactacaatgacatgattggtgttttaggaataattgactaaaaatatattatcagaagacacaaagccaaagactcatatggactttggctacaccatgaaagctttgagaagcaagaagaaagttggttagtgttttgggagtcgaatatgacttgatgtcatgtgtatgattgagtataagacttaaaccgcaaccggatcttaaaagcgt

SEQ ID NO: 21629 - DNA, 2545 bp, Arabidopsis thaliana
atcatcatggagtcttgcataatgacataagcaaacgtctacatataaccatgttacgctttcgcatatgtaagtattacctctgaaatatcttgtgttggtccatcaggttcgcatggatcaacagagccttctagatttacagttcctccaccatctacacgtatgtcattgtacacagctggtgcatggttcagctccgaggatgtgcttccagaagataaagaagtaacctcctctcttttccttttccgtgtaacaggttgctttgtccctttcttcttcttgcttttcgatttaggggtctcaggagcccctgcagcagtttcggtgatcttctccttgaaatttttcaaaatatccttacttatgttgtagcggaggtcttcaagttgttgagtaaaccattccttcattccagccaattcaccatgagtaacaaactgagaagaggagcttccttgaccagtctgcgttgcatcttgctttgctgtctttttatggacagtctttccaacgggtgtagcagctttatcctgagtaggcaggggttcaacattcaatccttctttcttacttgaacgcgtgaaaggcttgcgacggatggggtagtattctttcttcgcccgtttcacagctttacttggttcacatttgtcttctggcccaacagttcgtgtccctacaaactctacatcatcattagcaggcgctacgccaacatactcggcgtttgttgctggagcatctttggaagagcattgtatgttgtgtatgggccatgtttcagccttgaagcggtgcttctactttatcagagatattatcaactccaccccttcatcctcttcttcatccggccacgacagatccccctttacagtttctgactgatatagtgtatattccacagacagctacatgattaaaagaagagcacattagcttaatattgatgcatctttttggataaatatataagttcaaaacaaccgctataatgttagaaccaaagccaatagtcaacattacttacattagcactttgctcagcgtcatgaacatctgattaccgcagaagaattatgcgaccaaggtcaacagaaaagcttttggataaaatttctgaagtcaacagggtcttttatcctactgcatagggcaggaacggagttgagtaccaggagctggagtgcaagagggaactcgtaacagacactgctcttctgagacagccggtgtaatgcccctgaccttgactatgcggccggacgtgcagcctatcgagtaaaatgcgagatcaagccaagaaaaggcaagatcagtttggccatttgatgtggcaagtcatgggtaaggagcattgcaatggatcaagtctacgggtaaaggaatgactctccatcagacagactaagcttagctacgatgcgactatcggtaaacctcaaaaccattaggctagcccttagacctaggatagcttaggaaaccttagttttaggaaaccttagaagaagtaggaaaccttagaatgactaggagaccttaggggaatccatttgggcagtgggatatgagtatgggtcttgaatggtcgagggattaatcggagaatgctgataagtgacgataacgagcttacttggttaattctggcatggaacgagttatagacctaaggaagccttgatttatgtcatggaccctcatgagacattggagatggagtgagtcctatcaatgctcttgcggtccagtgacagatcgtgggtttcgccggaatgaagaaacggacggtcaggattgaactatggctcatgtttatctattaaggctcaagcttatccataattctggtcatccttatcctttagggtcgagcttattcattttggatgatgtttatccggaaaaaaatggaggaaccaatcggagaccgattagtgtccggagcgcccgtggagtgacacttatcgaactttgattggtccgggccacctcctgcttgttttggccgaccttatgagccgacttaagaccctataaattgtccacttcgtcccatttgttcctcagacccaaaatccactagaaaacgcctagttcccgggataagaccttagaagccaaaccgctcgaaaagtccatgtgagtacttgagtcacgtgaagtagcacgtgaataggatagtttattattttatttccttattatagcttaggaggttaattaggattagttagcttaattattcgcttaatccctgattaggatagttaattaggtttagtaatagttaattaggattagtgatgcccaattaggattagtattctctaagcatgattaggactagttaaacctagattagggaaactaaccgcgattagtggtaattaagtatgattaattgtttgattagtatagttttgcatataggatagttgcatagtagtatatgagtctgttgtcatgttagtagtctttaattagatgactaacattagccgaaccatgaggatcccgtccgtatgctgtgcgt

SEQ ID NO: 21630 - DNA, 2694 bp, Arabidopsis thaliana
aaaacaaaccttttttccctacaaccaaggttttgttcccaagcagcaatttcagtggaccaccagccgcaaccaccacatgggtttgcacctcagcaaaactgtaacgcccgcgatcctcaataggatcgttggctaagacttggtccgagagtagaaggtggagtctcggacaagcgagaaggagctggccataagctcggacaaaggggaaatcatgcgggctaagctaggatcgtaaagaaattaactgggtcagctcgcccaaagctcaagctcagctggaaggagtgacggttactcaggtcgagtgacagtccagctcgggcagctggacgagtgacggttgagctcgaggtagctggacgagtgacggttgagctcgaggtagctggacgagtgacggactagctgggcggttatgggcgaagagatacaactcttcggaaaggtgcaactcttcggaagggcgcaactcttcggaaaggtgcaaggaacggatgtgttgattcgggaagcatccattcgccccctatataaggaagggcgcccaggaccattctactcaccataacacaccgaaaacacaagaaactcaccattaaaactctctccctcttgggagaataaatagtcttaggattcggtagtcgggctgtggccgacaataaagaaggagggtcggatcgacctaacctcgagaaggaaggtaagggatcctagactttgagtctaagggttctaggatgtgaattagtagtcggatccttgaaaagatcgactagagggctgggtagtatccgggtcatgtgcatcctacacaagactcggtctgagtagggatcggctgaggcgagacgcggctcggcagaggaccggcgggtcttaactgacctgccgagaatcgcgtggactgatgcgcgatcttcccctctctgaattctctccacggatccgagtagtgtatggcatatagagcattgcatggacttgcatatgattaagtaaatgagattacttatggctctatgactttcaggaacgaatggtgatcgtgggaaggacttggcttaggcgcgagagactcaaggccgggatgatgggtggtgatagttcggatagtctagggatcgattatatgacttgtaatagcttatatgcaaactcataagttgtatcgaatcctttgcttgatcaataaagtatccgattgtttgtttactctatttgtctcatatattgaatcacggaatcatatggaacggattagactaggaaagaacctcataaacggttagggccgagtcacttagtggcttgggtcgagagaactcgtccggactttaggcagtccggatcggggcctttcaagttggtatcagagcatgcttggttctaggactaggtgttgggttaaggggtatcaccactcgtcggcttgagaatctcgcggtagttgctctttactcttttgcgattttactaggagttatgtggattaactttggaggtttcgcagatgggtaagagcagcaaaacaggaaagagtaagaaggacaagggcattgtcgaggagactttggttgaggagaaaacgatgatcaacgagaaaaccagagtcgggacgatgctcgatgggacagactcggtcggacctgagaccgggaagaagtccataaatgaggaagcacgggagagtagcggtgcaagggacaacacggataaccggaacaatactccaacggcccaagaacagtgggatttgatgaaaggaatgatggcgcaactagccacattaaccaaggccattgtagcaaatccggtggtccaaagagtggataaccaaaaggacgatgaattggaagttgtggaagtgaatccgcaaccgaatcatgggagaaaaaggggagactatctgagtcttctcgaacatgtctcaaggctgggcacgagacacttcatgggcagtacggacccgattgtggccgatgagtggaggagtagactcaagaggaacttcaagtctacccgctgtcctgaggattaccaaagggacattgcggtccacttccttgaacgagacgcccataactggtggttaacgtcgagaaacgcagaggggacgaggtccggtcctttgcggatttcgaagacgagtttaacaagaagtactttccaccggaggcttgggataggcttgaatgtgcgtacctcgacctagttcaagggaaccgcacggtgcgtgaatatgatgaggaatttaaccgcctaaggcgttatgtgggacgtgaacttgaggaggaacaagctcaagtgcgctgatttatccgtggactaaggatagagatccgcaaccattgtttggtccgaccattcaactcggtttccgaattggttgaaagggcagcaatgattgaggaagggatcgaggaggagaggtacttgaaccgggagaaagcactgatccggaacaatcaatccaccaaacccgcggataagaaaaggaaatttgacaaggtggataacaccaagtccaatgctaagaccggggaatgcgtgacctgtggtaagagccacagcggaacttgctggaaggccataggtgcatgtggccggtgtggaagcaaggaccatgcgatccaaatttgcccgagaatggaactaggacagtccaaggttctcggtgaagagaca

SEQ ID NO: 21631 - DNA, 556 bp, Arabidopsis thaliana columbia
  unsure (1)..(556): unsure at all n locations
nnnnnnnnnnnnnnnnnnnnnnctaaaggctggtaaacgcattgttgaattgaccaaacgttattacgagcaaaacgacgaaagtgcactgccgcgtaatatcgccagtaaggcggcgtttgaaaacgccatgacgctggatatcgcgatgggtggatcgactaacaccgtacttcacctgctggcggcggcgcaggaagcggaaatcgacttcaccatgagtgatatcgataagctttcccgcaaggttccacagctgtgtaaagttgcgccgagcacccagaaataccatatggaagatgttcaccgtgctggtggtgttatcggtattctcggcgaactggatcgcgcggggttactgaaccgtgatgtgaaaaacgtacttggcctgacgttgccgcaaacgctggaacaatacgacgttatgctgacccaggatgacgcggtaaaaaatatgttccgcgcaggtcctgcaggcattcgtaccacacaggcattctcgcaagattgccgttgggatacgctggacgacgatcgcgccaatggctttagagnn

SEQ ID NO: 21632 - DNA, 602 bp, Arabidopsis thaliana columbia
gttacatatcacacgcactacatcgtcattatggtttgagatacgtatattagggaaatatagcaaaccagaagcatagctataataacgtgggcgtttgtcttcagaaaacttcatatgagaatcggcggctactacaagagacgacttcccataatgattctgaggctgaggcgacgagaagaagttccactcaccaccttgtataaccccaattaagagacgtggattagacgaggacctgttgtggaataactcggtgaaatcttgacggcaaataatggactcccatagcttcgacacgcatcgaaacctagtgattggctttacagacaatctcgagagtatctcgtaaatgagatcagtagggatggaatctgagtttgctcctctattcatgatcgtcttattcatgggagagagatatgaatgtcgattcatcgaagactctctgaaatatatatatagaaatggaaaatatcttgagggttattaggaaatgaatttgtgaagagttattgattttaaaagtggagagatcttaaagtgttttatagatttttacacattgtcaataattactattcaaatatttttatgga

SEQ ID NO: 21633 - DNA, 307 bp, Arabidopsis thaliana columbia
ggtctgcactggatcgccgcttttaagaattgctaatgccttggatttgtctgtgaatgatgactcgaagagtaacatgttcagcaggggtatgtttgcctgtgttcgtaaatttctctctgtgtctcaatatttgccgtggttctaattggtaagttgcatgggcaaatgccaggttccaccttgctcagagatgtgcatattggaatccctagcagcggaggttagtactattagtatgccattgattccggagttcgaccatcggtctctcgagtcggctattgaatttcgcaatgctatgcag

SEQ ID NO: 21634 - DNA, 684 bp, Arabidopsis thaliana columbia
atcccgataagatattatgtatgcacggtggcctttctcccgatttgaccaacgtggaacagattaagaacattaagcgacctactgatgttcctgactctggtttgctctgtgatctgctttggtctgatccaagcaaagatgtcaaaggttgggggatgaatgaccgtggagtctcttacacgtttggccctgacaaagtcgcggagtttctaataaagaatgatatggatctcatctgccgtgcccaccaggttcgtcgtctacacactgttcgtttctattttactaaagatgtcacggaacttctataaaaatataactgttgtgtttttctttttctaaaaggttgtagaggatggatatgagtttttcgccgatagacagcttgttacgatattttctgctcccaactactgtggtgaatttgacaatgctggtgctatgatgagtgttgatgaaagtttaatgtgctctttccaaattcttaagcctgctgatcgaaagccccggttcttatgaagtaaagaggtagtcaagtcttttaactaacttgtgatgagtgtgcaatcctgtttcagcttcagattccagatgctataaaagtcatcagcattctcgcaaattcttagatatgcattgtcacttttgttcacacttgttagattgatgagtaacagaagg

SEQ ID NO: 21635 - DNA, 567 bp, Arabidopsis thaliana columbia
gatgcgtgtgtgggttcacctgcacaacaacatctgtaaagtcagatatataaatgcatttaaattaacaccgaacaactttttagatagcaattctaactagttagaatttttaagctcagacatgttactctaagaacccagctcaatttctcaaagttaatttcagaatccaattttaacaactagctttctcaataatataaactcgaaaagagaagcctagttcctctgtgaagggagtaaatgaaattaaaagtattaaatctccaggcctgttataaacatacatcatgtcagaatccaaacctagtatgacatctttaatgtaaataatatacgtgtctatttatctcctgctcatagagcattcaaacaaaaataggttatagcaaaaaaaaggtcatctgttatatattcctttcaaaacagggagacgcaaatggaacttgccagcaggttttgaggcttgatatcacggtgacaaagaccaaaggaattatggatgtaagcaagcgccctgcaaatctgtcaccattaacagaaacttatcaaaaatgtttgaag

SEQ ID NO: 21636 - DNA, 571 bp, Arabidopsis thaliana columbia
tgcaacagccatctttcacaagcggcttcactttttcttccttcttatcgccacaacaaccagggtgagaatgatcagaactggttttactacttggtttcatcatcacaacattctcttgatttttcttatctccacaacagcttgatttgcattgaccattcccgctctttgttaacaagcctgcttctaagtccacaacataatcatcatcgccttcaagtttcctaccattcaacttagatgtagaagccctgtaacactttttgttcccaatctttttcttctctcgcagcagcaacatactattgaaaatcacaagcagacaagtccctacatcaacaagaaccgcagcccaaatcaaaggatgaccagcaaatgccaaagcgagtattcctgcttttaaaatgatcgatagacacacgttttcaacaactttgcgtcgtgctcttctcgctagcttcaccgcttgtggtatccttcttatatcattagacatcagaataatattaccagtttgtgttgcaagagcagacgcagaaattcccatggagataccaatatcagctgt

SEQ ID NO: 21637 - DNA, 565 bp, Arabidopsis thaliana columbia
ccgatgtctctgaatcacttttcactctttgatagaacaaaacgtaagcagccgaagtcttgatctcggattcatttacagctgaaacacggctgtcatcaaaattataccatttggtctcatccatcaactgcagaagcaaacagccactacacgttagtttcgatgtatttgccactagacttattaggaatgcatgcaaaatcaatatagataacaaaagacacaataccttagcgtaacgagtgtagtgaccacctccaaggccaccataatgattgctaatcgcatacagctcgtaaagatatgactgaccgtcttcgttctttacgtacttgctaagatctagatcgtgaatatggaagttcactaacgtatcaatcttattcttgaaatatctgctatacgtgaaccgtttcaggtggacacaagaatatctggcaacttccacaagtctagcttcttgttcgcttgtctatgttctttgcaaccaggacaataccacatgtcatctggtcctagaggctcttctgctagaaaggcttcaagcatgaaaacaaagata

SEQ ID NO: 21638 - DNA, 446 bp, Arabidopsis thaliana columbia
cccgcgacattccctctttgataatgattgcaaaaaaacacaggtgtgtttactcaaacgtttcccgtgtcctctacggtcagtatcattctttcggtgacgctaatttctccggtggttggaggagaacaaagtctcaaagagacggcgaacgaatacgaagacgatgcgcgtgtagagactagacggtgaacgatcacgcatacgatgagcgtggagagagtctacctctctcgacgatgaggaataatcctgtccttccggtttccgatcctcccctcgccggtgagaatgatagcgatggtaaaggtgtcgatgatcggcttttcaaaggatctgccatgaccaaacgtggagcttatgctgctctttcttacatggcttgtgctggtaatttcctcgatttcacttgtatcatttgatcgaatcacgtgttttggagtaga

SEQ ID NO: 21639 - DNA, 577 bp, Arabidopsis thaliana columbia
tctctcttactctttttaggtctaccccgatcccgtcagagtggtgtcaattgggaggaaggttgaggatctcttggctgatcctgaaaacaatgaatggtcattgctttcttccgagttttgtggaggtctgtttccattggcattagctattgggaccaagatattacgttctgaatagaatgttgagtatagggttattttgacaattccaggaacccacataacaaacacccgcgaaccaaagcatttgctcttctatcggaggagggaattgctaaaggtattcgtagggtaactgctgtgactactgaatgtgcttttgatgcattgaatgcggcgtccttacttgaaagagaagtagaggatgcctccagagcggagggaagtgcattggaaaaggttttctccctctctttgtcaaactattgacaaaatgaagacgatgtcgttacttggattcacgtaaaacttattgtgtttgtatttgcacattcacagaaagtttctgctttgaaaagccgagtagatgcagcaattatcccagcagctaaaaaggcagatattaggactaaga

SEQ ID NO: 21640 - DNA, 551 bp, Arabidopsis thaliana columbia
  unsure (1)..(551): unsure at all n locations
nnnnnnnnnnnnnnnnnnnnnnnctaaagcctgcaatataccgaagattattacaggaccatgcaaaaaggggaggcattgcgcctcccgttaaaacattaaccgcgcactgcaccacgccgtctttcactcgcgcttcgtaatgtttgacggaaaactgttcgtcttccatgcacaagccgtcgcttaagcgaaaacgctgttttttcagcgggctggcgacccacagctcgccctggtgttccgcaatcagtccgcgtgacagcacgctggactcgaagaacgggtcgatgttgctgatcgcaaacacctgatcgctgtgatacgggcggaaaatcgcgacctgctcgtcacctaacagcgcgcagacgccggtttcaggcaggatgtcatcgattttgcagatgtctttccactggctcatgcgttgtcctccaccagagttactgggatacgttcatacggcgttgccggacggtgctgttcgcgctctggcaccatctgcacgttcgggtcacgcttgtcgctgttgatgaagtgtttgaagcgag

SEQ ID NO: 21641 - DNA, 579 bp, Arabidopsis thaliana columbia
  unsure (1)..(579): unsure at all n locations
tnnnnnnnnnnnnnnnnnnnnnnnctaaaggcatacagcgcattacgcggcacccaccacgcgacagtttagcgaaaatgcgcggcgctttaccgtcacacgccagggtgtacagcatacgagtagacgcatacataccggagttacccgctgacagcaccgccgtcagaataactgcgttcatcaccgccgccgcagagagcagacccgcgtgctggaacaccagggtgaacggactaacgctgatgtctttaacatcgttacgcagcaggctcggatcggtgtacggaataatcaggctgataatcaggatcgcgaacacatagaacaacaggattcgccagaacacctgacgtaccgcgcgtggaatgtttttcgccggatcttcggactcgcctgcagcaataccgatcagctcggttccctggaaagagaagccgacaatcatagctacgccgatcatcgccgcaaaaccaccagcaaacggcgcttcgcgagttgtccagttgctccagcccgcagctgcgcgcctttgaagataccgataatcatcagcacgcaacgatgataaagcaatac

SEQ ID NO: 21642 - DNA, 625 bp, Arabidopsis thaliana columbia
tcctatgcattacatatagtagcacattctcctcaaaatgaaactactatgcattatgaaattcacaaagctgagagagtggccatttatgcaattcacattatacatctctaaaactatattataagttcattatacatatgttttattaacatatacatcacattatacattatacacctaaattcacaaggtcttatagttcttcttatttcttcaaattgatcaactgtcttagtcaattatactacaaactttccaaaaaatcacagagactaacataaagagcaaaaaacagaggaactgattatagagaggactaacctcgaaatgaacggtgcgacaagttttagaagcgtcaagagtgtagtagaaagaagtgccattgttccattcgaggtcataagtgagcttaccaagctgcttctgaatgatgttaaagttacgtccattgacccagtcataccaaagatccacaatctccaatgaccctgatttgttcatcacatcaacgcgtggaactgctccggccataccgcaggaactggctccttctccggctcagtacaggcggatattttgtcaccgcggagagacgaggaggaggatacgatgaagaatggat

SEQ ID NO: 21643 - DNA, 525 bp, Arabidopsis thaliana columbia
gactctagactgagaagcctctcaacatacttccccatgatatcaacctcaagattcactttctgcccaatcttcttagtcggaatcactacattctgttgcgtataagcaatcatcatgaaattgaaacagctctcttcatcaaacacatcaacaaccgtcaagctagtcccatcaacagccacaaatcctttaggcacaatgtatttcaacaaacccttgtcagctttcaccttcacccacaaagaatcaccctctacctccattgattcaatcactcccgtcccatccacgtgtccctgaaccacgtgtccacccatcctgctcactggctgcaacgcacgctccagattcaccggagatcctttctttaactcctccaacgatgtttttctcagcgtctccggtgctaacctactgtgaactcctctgcgttaaactccgtcaccgttaaacaagtaccgttcacggcgatactgtcaccgagcttcacgtcctctaacaccactctcgctccgattttga

SEQ ID NO: 21644 - DNA, 397 bp, Arabidopsis thaliana
gatggtacaaggacaggaagcattgctcacctgattaatcattcatgtgtggtatgaatatatctgttaatctaattcaatttagttagcatctgcaaaaactgagcatttttgtctaactttaaggcagcccaagttttatgctcgagtcatcactgttaatggagatgagcacatgatcagattcgcaaagaggcatatccctaaatgggaagagctgacctatgactataggtttcactttgatgccctttgaatcatctgagatattctatgatcattttctgcctctgatcttgtagtgtttacaggttctggtcaatcgggggacgcctttcatgttcgtgtggcttccagggtgtcgaggtgttgttaatgagtacagaagctgaagaac

SEQ ID NO: 21645 - DNA, 771 bp, Arabidopsis thaliana columbia
tcccaaactcttcactacgttggtttgtttcatatgtttccttcacgacctctgtctcatcttctccatcatcagacttcattagctgcacaaacagataagcatagctaaagttgattatccatgtcttgcaaacaatttactaatgtgcttgttttctttgaaatataacctgttgggttaccttacttgactcctgcaaagcgttctttttgtattcgtctaactgaagaattataaaaacaaagtgtcagcaaactcaagttcaacatataacactcactagtctcaccataagttatttacctgataagtaagctgctcaattttggtagcctgctcgacacacatgttcttgagatgcttctcgtccacgcaagcttcttctattgccttatatcctccctgatgataaaagatacaatagtcaaaacgaatagccttctactaaagaaactgaaaatgaacaaaaggaaatgcatctcagggtttctagacatacttgagcttcttggtcaagtttctgtctgcaagaaagacagaggagaatcgatgatccaccttcttttggtctatctttctgtaacaatttaaccgaagcactaagattatcatcggcttcatcgcaaggcttcagagagagatgcccaaacgagaaggaaacagaagatctgtttgacagtgagctccgttggtgacagtctataatatttagtcctctctggagacttgcagctagagaatctgtaggacttaaaggctttctgtttc

SEQ ID NO: 21646 - DNA, 570 bp, Arabidopsis thaliana columbia
  unsure (1)..(570): unsure at all n locations
nnnnnnnnnnnnnnnnnnnnnnctaaagccaccaacgtcatttccatcaccgacggtcagatcttcttggaggctgagctcttctacaagggtatccgccccgccattaacgtcggtctttccgtgtcccgtgtcggttccgctgcccaggtcaaggccatgaagcaggttgctggttccctgaagctcttcttggctcagtaccgtgaggttgctgccttcgcccagttcggttccgatctcgatgcctccaccaagcagaccctcaaccgtggtcagcgtctgaccgagctcctcaagcagaagcagtactcccccatggccgtctctgacatggttccccttatcttcgctggtgtcaacggttacctcgacaacattcctgtcgctaagatcctccagtgggagtctgacttccttgcttacctcaagagcaaccaccccgaggtccaggagaccattgagaaggagggccaggtcagcaaggagcttgaggctaagctgaaggacatcatcccagcttcaacaagtccttcaacgcataggtgagcaagcgacatacttgtcgat

SEQ ID NO: 21647 - DNA, 546 bp, Arabidopsis thaliana columbia
  unsure (1)..(546): unsure at all n locations
tnnnnnnnnnnnnnnnnnnnnnnnctaaagacggcagtattagccactgtgggactacggcattagccgtggtatctcgtcaaccgattggcattgatatagaagaaattttttctgtacaaaccgcaagagaattgacagacaacattattacaccagcggaacacgagcgactcgcagactgcggtttagccttttctctggcgctgacactggcattttccgccaaagagagcgcatttaaggcaagtgagatccaaactgatgcaggttttctggactatcagataattagctggaataaacagcaggtcatcattcatcgtgagaatgagatgtttgctgtgcactggcagataaaagaaaagatagtcataacgctgtgccaacacgattaattgacaacatctggtacgattcgcccgcagccatcactgaccacgggcgaaagtgtaaagcaggtgccttaccatcctgacctgacaaccggatatgcggggattaccccataagcgctaacttaagggttgaccatctgaagaatgc

SEQ ID NO: 21648 - DNA, 1059 bp, Arabidopsis thaliana
gaccatctgatactgccgtcaccggagccggtgagagcaatcgccggagcaggagaagaagtaaccggagtaggagatggaacgacagcctcagccacagaagaagaagatttcgaagcggctttactcttagcttcttcgatctcagcttcagtctcagctaacaatccaatcgcagcaccaaccggagctgtttcaccttctccgacgacaatcgcagcaagataaccatcgtaaaacgtttctacatccatatcggctttatcagattcaacaaccacaacactctctcccttggcgagtttctcgccttctgttttgatccatgacacgattttgccttccgtcatggttgatgataacgccggcatgaaaatttcacgaatcttagatcggaccgtcattgaacgacggtgagaagtcgccggagtcgtggagcggaaaacgacgctgcggagggatggggatactgaggaagcgaatgaaatgttggatttggaattggttagtgaagctgtcgatagaaacgaagaagaagaaaccgccattgttgaatcacagagagagagagatctgagagagagtttagagagagtgaagtggacggagaagacgaggttgaagttcgttgagcgtcttcgcctacatttgtatcagttaccagtttaataaccggatatataattaaaccggattaatttatctgaaacttcggtttaggttaaaccatctagaaacaaagaaaatttagatgcttctcaatggatattaggtaacataacaaaaccagtggtctgatatatcttctctgctctacctaagttagagaatcagattccaaaatctggatttataagtatacttttgttgtcttaaccaaaaacatgtcatacaatattgctctgtcgtctcatgtcggaaaaggttttgtgttgtctgttatttgtttgaacaataattgtcttggatttgtgataattttttttttttttggggtggtgaaatgcagaagcaatgttgtgttgtgatgaggattaacttggattgcaatgcttgttg

SEQ ID NO: 21649 - DNA, 476 bp, Arabidopsis thaliana columbia
  unsure (1)..(476): unsure at all n locations
nnnnnnnnnnnnnnnnnnnnnnnctaaagaacaacgaaggccgcgcccaacgtttcttccaggtttacgatcctgcttattacgacagcaaaactgtcatgctggaaagctggcgctggttacactcgctgcacagcaccctgctgagccgtgaagtggactggacgcagctcgaccatgtgattgacgctgttgtggcgaaaatcccggaactggcaggtatcaaagatgctgcgccggatgcgacattccgtattcgtgggcagaaactggcccgtgaaccgcaccgttacagcggtcgtaccgccatgcgcgccaatatcagcgttcatgagccgcgtcagcgcaggatattgacaccatgttcaccttctcgatggaaggtaacaaccagccgactgcgcaccgttcgcaagtgccgtttgcctgggcgccgggctggaactccccgcaagcgtggaacaaattccaggacg

SEQ ID NO: 21650 - DNA, 555 bp, Arabidopsis thaliana
tccatcgtctctggttctgaaggtttttctttcagaaatgacgagtacaaacacgagaaacaaaggcaaatgcatagtagaaggaccaccaccgactctaagccgttatgagtcacaaaaaagccgcgactggaacacgttttgccagtatctcatgaccaagatgccaccagttcacgtatgggagtgtgaatcaaaccacatcctcgatttcctccaaagtcgtgaccagtttggtaaaacaaaagttcatatccaaggatgcgttttcttcggacagaaagagccaccaggagagtgtaactgcccgttgaaacaggcgtggggaagcttagatgctttgatcggacggctgagagcagcttacgaggagaacggtggcttaacggagaaaaacccgtttgcccggggagggattaggatttttctgagggaagtgagaggttcacaggcgaaggcgagaggagttttgtacaaaaaaaagaagcgtcttgtagttgttggtacgggaactagtactacttggacttaatttgcctaattaaatcaccttgg

SEQ ID NO: 21651 - DNA, 446 bp, Arabidopsis thaliana
tagatattaagatgaaagctcatagttgcttgcttctttttgtttttttttaggttgctggtatcccaaagaagttggctccaacaatcggaatttctgttgatcaccgacgcaagaaccgttctttggagggtcttcagtccaatgtccaaaggttaaagacttacaaggctaagttggtggtgttccctcgccgttcccgtcaagtcaaggtatcaatcatttgagatcttagttagagtagtatatttgagacaccctcttgattcttgagttcttgttataacaattttgtatcttttgttttcaggctggtgattctactccagaggagcttgccaatgctactcaagttcaaggtgattacatgccaattgccagtgtcaaggcagctatggagctagttaagctgactgcagatttgaaggcgttcaaggcttacgata

SEQ ID NO: 21652 - DNA, 2001 bp, Arabidopsis thaliana
tcgaattcatgtttatactcactgagtgacccggtctgcctgatttgcatcaatgttcatgaaagttctctccgtcgttgggaccaaatctcgcccacaactcagcttcaaacacctcccatgtgattagcaccctatcgtggcggacggccttaatgtagcctgccaccacccgttagccaccccgtcaagatgaaaagtggtgaatcgaacggcttgttccactggcccctcgtgatattcaaaatattgttttgccttgctcaaccatttcgtcaagtctcctccatggaagcgtggaaaatccagttttgatggtctggcgatggcgttattgttgttagccgtcaccgcagcgaatgggttatctggttctccacggttccctgtcgattggaactggttcctttcggtccttcgacttcctcttgaagccgctgaccctccactttctctctgcgtcactgcctctatcaaatgcgcgagagcctcctccaacctcctatggcggtcctcgttatctcccttgagatcaaccatagccaccgtcattctctgcatctcatcttgcatcatgtcctgactcgtttccaactgctctaactgatccttgttggtcgccatcggctctacggttatcaccggagacacgacctgcttccctttacgtttggatcgtcggagggtaatggctctatttttgtgaaaagaaaaaaaagaattgtgctctgataccacttaatgcggtccctcttcaaagctagagattgctagaacataagacaattggtttgggtagtaatgactacctccttttggtttttcattgattatatggaagcaaaatggaactacacgttcctacaaaacaagaagcaaataacaaatgggaaagtggaaaatagaataactagtggtattctgcgaaattcactatgcttaatagtattgatctcatctctcttgtaaatccctaaaactatgaaagcattataatcatgtttgataagttcacctaagtaatcgacgctatgacgcatctaaataataggctcatctaagatagttcgagtaatagacacctatggtgggcatacctattaacctaaaatcaagttctagttaattactctagaactagcattaagaaaaacattaagaacaatctaagatgaagaattctaattatattatcctaacagggtttttgatctactaattcatccaaatcccttgaaaacccaacaagagaattactcagacatgattatcaaagaacaaaacatgtataaagtaaaaatcaaagtaagaaacaagaagagaatagagtttagaaagatcttctttaaaactatatatatgacctaaaaacgtgatggaccttctttagaaataagagaatgttttgggccaaatttagaaatcttcaaaacatcaataagttgcgttttcgaattgccgtcaggtattggtgtcgttcgacactaggagtggtgtcgttcgacacctacgcggattttgatctgcgaactgcttctgcaacttaagttgtctgttttgctctagaatgctccataatctccaaatgcttctcaaacatgtaaagacctgaaaaagactagaaaagactctagaaataacaatagaactctaaaacctttacctaaatcatagctaaaagcagtaaaaatacggttatatcaatctacttccgctgagttaaaaacaatagaactcctcatctaatctcactattttaaggtctaattctcacatgttgtgaacatattctagatattgaaccgcaaatgatttgttgtaaatctcactatctctctatttctcacactcatttacggtttcattgtctttagagagaaagaacaaaaaccattttactttaatcttctacattgataatatcttggataccttacataacacaaagacacacatacatatactactttcactacttgacgcttggcctgaacgcaataa

SEQ ID NO: 21653 - DNA, 1908 bp, Arabidopsis thaliana
tgaaatgtcagtatctggcatgactactctatcttccaagagagttgtggaggatacataagtggagagatgttccacaaccaagaagacatgcttgaaaccaataaagttggagaaacttgatggtaacaacgagatagagcttggaaagtgataactaggtttttacgcctacctatggtctgaagtgtggtgtgttcagttcaattccccttacacactaacatgtcgatgcagctatagggggtgtcaatccagtccactgttattgctagcaattaagatgcatacagaagcaactatgtcaagccagattataatgatggtgggtttctagtaacaatcctaaatcaagattcaaacaactaaaatgagaatttatgttactgatgatgaagattcagaggagaacataagattggctgaggagtatgttagggagcaagaaataaacgccatcaatctctctctagccaaggcagaaccgagatgaagcttgtgcgatcgcagatgcatagcgcagtctcctcggctccaaacatcgattggattccggaagagtctcgcaacacacctttcactcgcaagatctccaacactaaaaatcgaatacttcaacgggtctttcgacccaaagggtcatttgaagtcttttataatctctgtggcccgagctaagttcaagctttatgagagagatgcgggtctcagtcatctgtttgtcgagcatctaaaggggccggcgttggattggttctcgagacttaaagggaattctgtagaaagtttccaggagctctcaacccttttcctcaagcagtattcaatgttgattgatccgggcacttcggacgccgacctttggtcactatctcagcagccaaatgagccactcagagatttcctcgcgaaattcagatctaccctagccaaggtcgaaggatttaacgacattgcggctctctccaccttgaaaaacgcattatggtacaaatctgaattccagaagaaattaaatttatcaaaacaacagacgatccgagacactctgcaccgggcctcagactacgtttcccacgaggaagagatggagttgctatcgaaaaggcacgagccgtcgaagcaaacatcccgggatgacaaatcccaacctggcgttccgagcccgaaaaagggcgctcaaggcgggaccttcgtacatcacgaggaacaaaatttctccagagcccataattaccaagctgatacgccccggggaagaggaggaggccgagaaagagtcttatacttggaccaaagaccaacctataggaaacgagcaggaatattgcaaactgcacaaaagctacggtcatcaaacttccaggtgtcgtagcctcggggcaatatttgcagccaagttcctagctggtgaaattggtggtggcctctccatcgaggacttggaagcagagaaggcaagagctgagcaagtgaacgttgtggcaaaccccaaacaggcgcctgttgcatcgaaacctgaagggccaaagagaggtcggggcgatcgcgaggcggacaacgacgaactagaaactggtcgggaaagaatctttataataatgggaggctcgacattttgtcaagacacgacagcctctatccaggcctatcaaaggaaggccgattcgaattgtaactaggttcgaccattcaacggaccagatgatgaagtaacttttcacgagagtgagacgaacggtttggatcgaccgcacaatgaccccttggtcataacacttactatcggggattttgacgtcgagtgagttttagttgatataggaagcacgttggatatcatttttcacgcaaccctgcaagagatgaaggttgatatgacgcaaatcatatcgactccaaggcatg

SEQ ID NO: 21654 - DNA, 1762 bp, Arabidopsis thaliana
tctctccactctgcaagtcgagatgtatcagagacttactgcagatgagctggagagtgaagggttgggttcttgactttttcagttaacgagcagcgttaccagctatctatcaagagcttggaggattatttgttttcccagtggaaaggaactaaacccaagttcgagagggaagagttgaaggattagtggttaaccattgggaacgatttggcactcaactctgcaaggtctaagagcaaccagattcgaagccctgtgatccgctactatcagcgctcagtagcgaatgttctgtaccccagggaatctacaggcaccgtgtctaacacagacatggagatgattgattctgcactcaagggcattctccggagaacaaaggggaagaaggtcccaaagggcgaccttaatgatacaccaccggtcatgcttctattgatccacctgtgtggatacaggaagtgggcgcacaccaacgggaggaagaaggtgcgaggagccctttctgtaggtggcgttgtgacactgattctgattgcatgtggtgtacctctcacgtctctagggtttgatccgaggatgatggatttagatcacttgcgtcgttgtgagtttctggagtacgacatggttggcgatttctatcgctacaaattcgagcactccctgacctgaacagccaacattttgcttccctgcatcgaggccacaaccatacttcagggtgagaacaatgactttagacctgcgcgtgattacctctactttgagagcgctacaccgactgatgacaatgtccttacgacggaagctacagaggatgatattgctgagacggatgaggataggaaggaggagtatgatacgagcatgtatcatttcagtgagcacgtacctccagcgccagagagcaagagcttgagtgaagctcatagaaacaacagtaagttgcagaggtggtgcaagaaacaagataggctacttatcaagtgcttcaaagccatcacgtttctgacggacaagataagctgcttgtcttctactatagctattccgcagggagagcgtcctcaggacatgccttcgaggagatatgacgcgccagggccaagtcatcacaggcctgagccaagtcaccacaggcctgagcctagtgaccgagtagtcccaccagtccctgcgaggcattcatcattcgagcctcgggagctcgggagaaagaagaaggctgcactcgctcggtctggcagcaggagtacacgacttctccagtcccgtagcttatgcgaccgcggtgctggccgtagcagaagaagagaggtcgagtatcatcagagcggtgctggctgcgacgaaggagcagaggtcgagtacccccagggggaagctgagacacaacagggagattcttcgatggcctgggagcaatcacaggcagctattgacgaccaactccgctccttcttccactgaggtatgcacctcactccaccattgtaatataccatctcttgtttttattttgtaatataccatctcttgtttttattttgtttttgtgatgtgttttgtcctgagtactctcttccaaatttggtcacacaatggactgtgtgatttaagtttgggggagggctcaggaagtgtgtgttgcattgtatataattttgagtctgcattcatctaaggcatagaaaaaacaaaaaaaatgaaaaatttcagaaaatgatttcacaaaaatagagtgctcatgtag

SEQ ID NO: 21655 - DNA, 639 bp, Arabidopsis thaliana
aggtatttagttctttattgtaacttcccgcttgttctaacatatattttcacttgaattgtacttttttttgtgagcatctgacttggtttttgtgccttttgcggccatcatatttctgtcactgtgtatatgcagcatacatggtttgttttactgataactttttaaaatatgtttcagatcttcctcctcatcaagagattggaatgccttctctttcgccaacaatgactgaggcatgtacctctgaatacctcttacgaaaattaacatggtttattgttttatcattctactaaagatatctgttgaaacttcagggtaacattgccaggtggctgaagaaagaaggtgataaagttgctcctggtgaagtgctttgtgaagttgaaactgtaatgataatcctgattgaatctcttcctgtattgattcttatgccaggaataaaacacttatctcaatcttaatattttaggacaaagcaacagtcgaaatggaatgcatggaagagggtttctcgccaagatagtaaaggaggaggggcaaaagaaattcaagttggggaggtatgagagtttctgaattttggagacatgttaattataatggggtctcatgaagtatttgattgtg

SEQ ID NO: 21656 - DNA, 2456 bp, Arabidopsis thaliana
ttaagcacgaacagtgcatcaagcaatgcaatggttatgaactcacatggtttcgggctcaggccacgagacaaaaatggtccctttaatggtttggtcgagtaacagcggactctcagagtcaagattgcgcttcaatagaatgctaaaggtataagccaatggacacctacaagaacagactcccatctacctaatgatatagtctgctagctcagaagatgatctcagtcccatagatgtcctaactctaccatttttctcattcttactctctcgttggttaaagttctaaggggttctctttgaaacgatttaagagtctagcggatttggtcttatactttgacaaacttaaggcttttcttctaatcttagcacatagggcgttttacccttttctttgaatcacaatgcctaacttctttgaattccaaaacctttactagacttaacactttcgtatcccccttagaactctaaactcttactctctcttttttttttttttcttttcattctcattctcattccttccatacacaatcccaatcccaaatacaagtctccacctagtcctagctaacccaaaaagcgtgggctaggtctacatgaaagactgctcttgtcggctcatacctaacatgttataccaagctcaatcgaaaaagacctcacaatcacacacaaatgatctttggctttaaataaggctaggctaagggtatgggaaactgctctaaacgtgagagtcagctacttggattaacaaagggtggtgaagtgaataagataatccaactatgtatatggtagccatgagttcacaaacaatgcatagacatgataattgcaaattcattttaggttctaatagatagggaatgacatcagattagcgagttttgaatcaaagctgtatagtcaagttgtaaattcaaagtagggtgcagtcttacttcagagaaacaatgtgttatgcaacagagaactaacaacctgggcattgaacttacttcgccgaatcaaaacatgcttaacagtttgaaatcatcattatctcctatgcacattagcaatcgtaaatgcaagcactctatatacaatcctaaataaaatgcaatctacatgacactctatttttgcgaaatcattttctgaaattttttcaaatttttatggttttttctatgccttagatgatgcaaaatttgaaataagaaaagagaacacaatgttaaccatgtcttgaaccctcccccaaaattaaattacaaagtcccttgtgtaataaaaatctgaaagagaattcaagatcaaaacacaaaacacacaaagaaaaataaaaagatgttatggtatatacaatggagaggtggtgttacctcagttttcaggtgaagtaggaggagacgaaatcgtccatactctcctttgtgtaactccaaagaacgggttgtgctgaacttggattagctggatgctcgaccctttgctcgggttgttgatcgagtggctcctcaagtggtgcagtagagaggcttgctccagcgtccgatttccttgttcttcttcggtttttcaacttgctcctcttttccttttctctaggttcgaaggatgattgccttgctgtacttgaggaagaacagctaatcttgagttggagattgttaaacttcttgttgagtgccgcgatagctttgtcctggaacttacacaagctttggaggaaaccaaagcgcttgtgaatctcttttgagtctttactttgccttggtgttgagtactcctcgaagtaaaactgttgtgtagcgtaagactcgtccagagattctgcctcattatcataatgatggattggagactcatcatcattcactccttccatcggcacagcttcatcacttaaaatatagaggttctccattggtggcaaaactcaatgttgccaccatctctggttgaagtggaagcggggtttgggagtagaaaaatggattgtcctgatgtggggtaatcgaacctatacttatataggccattcttctactgcgaccaaaaactcttggaattgataaggtgttgcatatcaatccatcttggaggaatcgacgttgaatgtagaggtacattgcaagctctcaaaattggtgtcacaactcctcccagaaccattcttcctggtttcttaagtcccttagcccatcctctgtaactcagcaggtgctcgattaggtcgaatgagaccgaagtgtttgtccgaattccagctagaactgtaccattcgatgctataccaagcaacgcttgtagtgctgtctcaatcaactctagttctccaaggacaaaggttccattctgctctcttgcaaatagtgcacttgccaaggacctatgaaagtatctaaccaccggactccttatctcgttgctcttggtcctggaggataaaa

SEQ ID NO: 21657 - DNA, 2474 bp, Arabidopsis thaliana
ataatatacaaatggtagaagatataattgccaggttttgaaactggcttctaaaatggttacaattaacatgagtacttgttacttgtatacatatcattgtttagaagaacaaaaagttgcttaaagatatctctagaaggggatgtaacaaaaattgttttgtatttggaataaacttctaataaacttttctaattgttgttcgaattgtcatgttattttgttattcgacttcttgagtacttggacccaacattgaataaattgtaatcaaattatgttaagccaactttaatatctacattttatcgcaatatgtaaggacaaaactcttcttactacataaattaaaattagagaatttcaaatgacaaaatctaatggaagttgaattaggttcatgaagatttatgccgctatatcatattagggcttaagaactctttttgtcaaattgctttcattaatttaaaggtttagaatacaaagatggagatggttttctcatgactccaaatttcatataaacgaacttgacaacactaaaggttacaacataatagggcataactatagaggttatgtataaatagggtataattgtaattagtattaccctagtctctcttgtaactagcctatatatattgtaattacaatctctaataatattaaggcattacactatatggtatcagagcctctcgactcttaagacctaaatttctcgtgctttacgcagccttctctttcatctcttctcatctttcacgatgacatccacaccatcttccacagagacaattgctttctctgaaacaccaaccctccttaatgtcaatatgagcaacatcacaaaactcacttccacaaattacctcatgtggagccgccaggttcacgctttgcttgatggatacgaccttgctggttacatcgacggatttgtcacagcaccctctgaaacaatcaccactaccggtgttctcactgccaattccgcttacaagttttggaagcgccaagacaagctgatttacagtgccattcttggcacaatcacgatcaccattcaacctcttctgtcacgatccaacactgccgctgagatctgggagaaactcaaggccacttatgctacaccaagctggggtcacatccagcaagtgcgccaacacatcaaacaatggagcaagggcaccaaaaccatcaccgagtacttccaaggccacaccactcgttttgatgaactcgctcttctcggaaagcctcttgaacatgaagagcaaatcgagttcctccttggtggtctcacggaagactacaaatctgtggtcgatcaaacagagaatcgtgacaagcctccaaccctcaccgaacttcttgagaagcttctcaaccgtgaagccaagttgatgtgtgctgctgccacaacgtcttcacttccggtcactgctaatgctgcaaactacaaagggaacaacaacaacaacaaccaatacaacaacaacaacaacaatcgcaacaacaaaactcaaggccgtaacaacaacaactggcaacaaaaccaatctcaacagaggcagaaccaatacacacagaagccgtatcaaggacgttgccaaatctgtagcatccacggccacagtgcacgtcgttgccctcagcttcaaggcggctcctacaactcgcagcaatcaacaccagtctcaccatttacgccgtggcagccacgagcaaacgctgttatgcgtcgccatacaatgctaacaattggttactcgatagtggtgcgactcatcacatcacttctgatttaaccaatctatctctccatcaaccttacacgggaggtgaagatgtcactattgctgacggttcgggtttgtcaatttctcatactggttcagctttactttcaacaccattacgctctcttgccttgactgatgttttatatgtgcctaatatccacaaaaaccttatctcggtttaccgcatgtgtaacgctaacaaggtgtccgtggaattctttcctgcacattttcaggtgaaggatctcaaaacaggggtccaattgctccaaggcaggactaaagacgagctgtatgagtggccggtgaatccccctaaaccgtcatccttcctcactaccattacaccaaaaacagacctcacttcatggcattcacgtcttggccacccatctttatctactttaaaagctgttgttgctcaattttcccttcctgtttctcattctttaccaaaacaattcaattgttctgattgccttttgaataagacacacaaacttcctttccatacaaattccattctctctactcaaccacttgaatacctatacactgatctttggacatcaccaatagtgtccattgacaactttaaatattatctcgttattgtcgatcactatacgagatactcatggttctatccactcaagc

SEQ ID NO: 21658 - DNA, 1498 bp, Arabidopsis thaliana
attctagtagaattcttcatctttgattgatcttaatgctagatctagagtaattaactagatcttgaatctagacaatagatatgcccaccaaaggtatctgtagttggatctattattattatttgatgagcctggtttataggtgtgtaataaaaatcggcctatatactaaggtgaacaattaaactcgtttagaatgcatgtttaggttaaagatctctcggcttctccggttattcttagctataggcatagggagtttcgcggaacaccaccggttattccatgattagagttcgagtttaagaatggttcgataaaagcctagctttcactagatctactaaccaatagtttccagagaatatcttgtccctaactctttatttcatcgtttacaaccaatcaatctgctgtctttttactttgttttcttttactttcaatcattccctgctagcttaatcttgatactgaattcattgtgttaacaaaacaattttgtgaaaatcgatccttaaatactgcaattgatctcttatttgagagagtagttcttagggtaatttgaaccctatcaaatttggcgccattgctagagttcttgggaatcaccattgagtttactttaaagatttcgtctaatttttacttttattttgttactcacgcgtttcttgttttcttcttttttgtgtttcaggtgtatgcctaggcaaacaaggagcacacaacataaggagctcatcaacttgtctgttttgaacttgggaaatcttggacgcaccaaccgaaaaactcagagattaacaatggctgacagagtcatctgagctgatgtagaaggagttttgagagatgaggatgggcaagcctacaatgaggctggtcagagattagatgatcatggactcatcctacctgaggacgccaatgaggatcaggcgcgcctcaatgcgcaattagctgccagagagcagcacggctcagtgtcgagcgacaccaactgggtgtcgatcgacaccttcaagagcagaacgcagatgcgattggtgtcgagcgacacaacagaggtgtcgagcgacacaacagaggtgtcgatcgacaccaatcccagattcctgcagctattccttcaggtgcggaaccacgtcatactcttggggatttcaacaggcctgacctgttctatgctaatcgttcagcgattgtacccccacccttccagaggaacgactatgagctgaagcatggctattttgctttagtaggctagcatcctttccatggattgtttcatgagcagccaatggaccatatcgagcgttttgaggacctcgttccgagcatcaaagctaatggaatctcagaggactacctactgtgccagctcttcccttattcacttgctggagaatccgcttcttggatgaaacaacttaaagcaggttccctcaagacttgaagaagcatcaagatagctttcttgaacaat

SEQ ID NO: 21659 - DNA, 2118 bp, Arabidopsis thaliana
taccccatcctcgggaattttttatctgattgaactctttgtttactctactgttgtttactgcatcttgttatctatcgcttaatttctgcagttctttcttgttactcgacctcatactcgaccaccaagttgtctggcaacagactgtgcagtcgagtatctgtgttttattttctgtctgtttactcgacctgtcactcgacctcacctagtgctctgcaaagagctgtgttggtcgagtgttttactgtttctacttgaatttctgttttctgcatgttcacttaggattgctagaacataccacaacctgttattgcttggcttgacttagtgacattctgatcacatcttgattgttagcatcacacccatttgtattgacaacctaaaatattacaacgacatgattggtgttttaggataattgactaaaaacctattatcaatttggaaagggaaccaaacccagatttgacagagaggagcttaaggacttgtgggccactattggaaacaatctaccgctaaactcgacgctgtccaagagcaaccaaatccggagtcctgtgatccgcttctttcagagatcggttgccaacgtcttttactccagggagtctacaggcaccgtgtctaacacggacatggagatgatagattatgcgcttacagggattctccgccggacgaagggaaagaatgtcttgagaggcgatctcaacaacacaccaccagtaatgcctctgatgatccatctgtgtggatataggaagtgggcgttgacgaacggaaagaagaaggtgagaggagcactatgcgtgggtggcgttgtgacgccaattctgcaagcttgtggagtaccgctcaaggaaccagggttagcactgaggatgatggacttggatcatttgcgccgatgtgagttcttggagtttgacatggctggcgactttcaccgctacaggtttgagcattcatcgattagaatcgccaacattctcctcccctgcattgacgctattaggattctcgagggcaggaacattgacttcaagcctgcgcttgaagatctttatttcgagggcagtccgccaactgaggagatcagtcacaccgaagagctacaatagaagatgttgatgagacagatgatatagatgaggtggagtttgacacaagcatgtatcattttagtgagcatatacctcctgcgagggaaagcaagagtttgagtgaagctcacaggaacaacagcaagctgcagaagtggtgcaagaaacaggacaagttactcgccaagtgcttaagggctatcaagtttctgaaggacaagctcagctgctcctcttccactacagctattccgcagggacatctccctcaggacatgccttcgaggagatatgacgcgcccgagccaagtcggcgcaggcctgagcctagagagcaggagatcccgcatgtccctgcgaggcattcatcattcgagcctcgtgaatctgggaggaagaggaggaccacactcactcgatctagcagtaggagcggatgacttctgcagtctcgtagtttacgcgaccgcggtgctggccgcagcagaaggagagaggtcgagtttcctcatagcggtgctggccgccacagagctgatgaggtcgagtacccatctgctggagctgatacagaacaaggaggttcgtctgtggcctgggagcaatcggaggcagccattgacgagcaactacgttcattcttcgactgaggtaagcgcctcacttcaccattgtattataccgtctgttgtgatttgtttcttccttttttgtttctgtgattggatttgtcctgagtactctcttccaagtttattcacacagtggactgtgtgatttaagtttgggggagggctcaagaagtgtgtgttgcattttgtataattttgagtctgcattcatctaaggcatagaaaaaccgaaaaaaaaatttttgaaaaatttcagaaaatgattctacaaaaaaaaaaagaatgttcatgtagttgcacacatttaggatcgagtctagagtgtttcacttaggattgttgcatatgcataggggatgatgatgaga

SEQ ID NO: 21660 - DNA, 2754 bp, Arabidopsis thaliana
gaggaggcacgtgacatttgtgaggaggcgctagaagatataaagaaatatggtaatactttaaaatacacatacgctaacagtttttcatacctggaatgtggtgatgtaaacactctagaagtgacctctatcacactctcatcaataactctattagacgtacacggttcccgagcaacgtactcaattgaattgggcagataaaataagtaagttaatgtttatttgaaaaaattgttagtaaatgcgttgacccctaatatagcactatacatgaagccatatcgttccacttatatgcaatacaaacagacgtcaactcaaccttctgtcagaaaacgtaatgagtattttatagacgtacacggcgcgattatgagaggtacacagtagtttgtttaatttaaaagttactaatataatgcactaaatatacatccacgtcacccacccacttacattgatggttattctcctctttaaaactcatgtcaaacacacttagttgaatacacgaatccgtctaaacctcctcgtttgaaaaacaatgcctttcctacctccgctaacccctccaaccgagttgtacctaggaatccaattgccaaaccccataagcatacttgtcaactacctccccgtcagccagactcccatagagacgctaaggaacttagtctacagttgtgacatcaacacccttgcaatcgatgaattcatgacgttgtgacatcaacacccttgaaaagttctgggaaatgacacccacccttgaagctggccacgcggttgcagagatggtgatgtatcacatcagccagcttcacactgaaaatgctggccgctgggaaaggtcttggaggtttgtccacccgccgagttgcgtagggcaatgcacgttccatcatggctgcagggtttgttttttctactggtacgccagggagattgctatattctactaaaagcaaagctgctaaggtctaagctactctactcggctctactctcaagtcttttggtatgacggatgcacacatattttgcaacacatgtgtatgtttcgttgaaaaaattatgttttttgaatcgttccagtttatttatcttatgaatttccctttatataaactgcctgtccttttttacatttctggcttttgaatgaattaccactttaagtattactagatgtcttcgtgtacgtacactatatagtacattaaacttgggttatcgtacattgggaaattgcgtacacaacataagtataaatctaatagtttttgatgttgaaggcaccaaaactaatatacgtacacgatagcgtacaccagaaactatacgtacactgcgagaggatttgaacaataaaacaaggcacgtacataaaacaaaaaattaggttaacatttaaacggaaacaggaaacaccaacgactgaaatgtagtttggttcttatggaaacaacaataacaactgggaaagaaaacttaattgaaatgtagtcttatattatattaaaacggagaataatggttcattccctctagctaaaaaaccaccatcgagatatccgcaacttctggtctgtccggattggcaaccacctttgaaatagcaccatggctctcaagcttcgggttaaccagttcggttagacgccaaaagctgagtgcgacaacaaaatttcccttacccaaactctgaaagtaaccatccaagtactccgcctgttgattgcggcttcgcaatccaagacttcattgctacgttagaaataaggacagttagcctttagagtgacattgtaaataaaacaaatgaaaagacagttactatctatcttttatcttgaaactcagtttgagaccgtaatagtctgtagtcaatgcgccaacatcaaccaacgctccaacgacatctagatgatggagaaacaaagataataaacaaaaaattcaaaaatgtaataaatgaagcatcggagttattcttcctcaccgactaaaacgttcttgtaagcagatttctccaaaatgtagtcgaagggagtgaaatcgaaatctggaactggtggtgatctcggtggggccttaacgacgaaggtccgatccataaacagtatgccgtattcatgctttgttgctctgactgagtcagttgacttacgaaccaagaaagaggtgattgtcttccactcattttcaacgaatcggtcttcgtaaaacggagcaaggcgatgatcaattctgaggacacaattctgagaccatatgaacccctccatctcacggatagcaagaacaagcgaatcgaaagactaaatttttttttgtgaatgatataactgccggcacaagaaatgggtttagaatgaggattgtggataaaattaaggaagggaggagacttaaatagaggaaatctggaacggctacagttattaatgcggttccaactacacttgattcaaacttttggtaatagcctggtaaccgtcatatagggtaattataacgttgatttgacaataaacagcaacagttacgtcctttccattaaataccaacacaaccacaatatacccaacaatgtctccaactccgttcatttaagagggggaataagttagattttcaaaaaacttatttcaaataactcaaaatattgagcaaccacctctatgtacccttattacatgaactttaacacgtacacagacaaaaacgtacatagttatacgaacg

SEQ ID NO: 21661 - DNA, 616 bp, Arabidopsis thaliana columbia
  unsure (1)..(616): unsure at all n locations
tggagattcaatttgnggtgaagtctgatgagaaaccagtgggagaaaggtttcagagaggtgatagaccttcttgggagaaacgagatggtagaaatgattcaggttctgataggagaagtagatccagaggttatggtgagacgaggaatcgagattcttttcgtggtcgaagagatgatagaatcagtgaagtggaagaagagagtaagaaaggtggagggaattcaatttgggtggctaatgatgataaaccggcgaaagagcaatcgccgagagttaacaaccggtcatcttgggatgatagaacaagaaatcagaactcttttagtgcccgaggtgatgatagaatcactgaagaagcagaagaggaaacaatgaatcatgcccctgaagatggtgatggaatcgttgaagaagaaccagataatactaggtggtctgagatcaaaaatagattcaataggtatgatgtaagagatcaagggcgtgacgatgcagcttatcgaaactggaataggcaagagagctggggtaggaaaacatggcaagaggcgactgagtccagtgtgcgtaggctggaaggtgaagtggtttatggagtaagtccagtgtt

SEQ ID NO: 21662 - DNA, 328 bp, Arabidopsis thaliana columbia
aatccaaacgaataaaacttatgatagaattttgtttttttttaaaatcctttgtgaaataatttcccatattagcatttaatgatttttgtatttttctctcgaggtattattaattgaaattcaaatatccacatgccttgaagataataaataggttaaattgcatccaatagaaagaaaagaagacagaggaagataaaacaaacctttaactgaagaaagagtttgagtatggcagcgtcgaccataggtagaagttcatcggaggataagccggggaaaagaacatctccggtgactggcaagcccacgaagatccccaact

SEQ ID NO: 21663 - DNA, 1809 bp, Arabidopsis thaliana
agttttggtgttttctctgtgttgtgtgattccaaaggtcttggcgccctcccttatatagggtacgatggatgcttcccgaagcatcacatccattccttgcacctttccgaaaagttgcatctctccgcccgtaactgctcgcccttatccatcctttgggcgagcaaccgttcgaccataaccgttcaagtaaccgtccccataaacgcctagctggtcggacagtcgaccagctacctcgagctcaaccgtcactcatctagctgcccgaactggactatcacttgacccaagtaaccttcactcattccagctgagcttgagcttcggatgagctgaccctgctgattctcttacgatcctagcttagtctgcatgatatccctttgtccgagcttatggccagctccttcccaacttgtccgagactccaccttttttcctcggaccaagtcccagccaacgatcctattgaggatcgcgagcgttacagcctccttgcttttcaaatgagatgtctcctgtaaagtaccagggatcacttgtgtctttccctacaatagtaagtttctcccaaattgctcttctctttgctctatctgttcaccatagattaaagaggcaaagaaaaaataattcgcagctttaacatgtgtgtcaatgaaatttgtggaggaagtcagaatagtcacttccacttcttgcttccaaaagaggtccagtccacctactcctgggctgtgtggggaaacaagatggtgtgaatggtaattcattcaagttagagaggtaaggaccaagtcatcacgattctttgtctccatgaggaacaagatttctggtgagattttggagtgaatctcacgcagacgctagcctgttgtggggttccccaacccacaatagttccacctcggtacttttaaggaatctgagttggtggatgttgaaattccaccttctctttcactcttggaggaataagattcactcttggattaggctgacttgaggagggaaaggagctacccgcctgaagatacaacttttactttgatttaggttttctgctagtagaagcaggctcttgagaatttgaattattcttctcaggtgtggattttcttttgggggaactttgaattattcctttgtttcttttgcttgaatttgatcctagttggggtaataaagttttattctgggatttatttagggggggatgtctccttttcttttttttgcaggagcagcaatgattgtggtcagttcagccggatgaattggcagatcttggttcagcatagagtacttgtgcagcgagggagtttgttgggcgtctgtttcttctgaagtaaggtaagtttggtttgagacaataacagcttccaacataattgaggctgtttcagccatgagacctttctcttccccttggatacctctgcgttttcttgctgcactttcagttggatctgcacatctcacatattggagagtagcatctctgaggtctcccatgatttgatcatttgtagggataggaggtggcggtggtggtgtgacctcaaaggtgataataggtttttagtcaattaaacctaaagcactatcatgtcgttgtagtattttaggtagaaaatccaaatgagtgtgatgctaacaatcaagatgcaatcagagttcacatagtcaagccaagcaataacaggttttggagttctaatagcctaagtgaacatgcatgaacagaaatcaagcagaacagtaaacactcaccacacagcttgttccaagcacgggtgt

SEQ ID NO: 21664 - DNA, 626 bp, Arabidopsis thaliana columbia
tgactaagaggacccttacattaatcgcaggttcgtgtagtagaagttcctggtgtctccatggaactttgtggtggcactcatgttggcaatactgcagaaatacgagccttcaagattatctcagaacagggcattgcatctggaatccggcgtatagaagcggttgcaggtgaagcattcattgaatacataaactcacgggattctcaaatgacacgtctatgctcgactctcaaggtattctgcttttcctttccatgttttaaggcatagtgctacttacccttttgcggtgaccaattggcaattgttgtttggtttttaatctgaaggtgaaagcagaggatgttacaaacagagtggagaatcttctagaggaactacgtgctgctagaaaagaagcctccgacttgcgttcaaaagcagctgtctataaagcatctgtcatatcgaacaaagcatttactgtaggaacttcacagactataaggtaatctattgtttcctgttcagaaaaattgacacactataatttcaactaaacgtcttcatttgaatgtgtaattcctttagagtgctcgttgagtcgatggatgacaccgatgctgactcattaaagagtg

SEQ ID NO: 21665 - DNA, 759 bp, Arabidopsis thaliana
tcttcaatcttccaaccagggtctttgatatgatcttatagctaacattacatagtgcaatgggcctaaaaccactcattgttcgaggtgtctccggttttggtattaagcaaatattggtgtgatttgtctcagcccccaacactcctgagttgaaaaaatctcaaacttcctttattacaacttctttgatatcaggccagaactgttgataaaaagctccagtcaatccgtcgggacccggtgctttatcctctccaatcccaaagactcgattctgtatctcgtcctctgaaacttctcgaaccaaatcattattgatctcattggaaactcgtttctgaaagccatcaaacaccgcttgatagtttatatgaggcgatcttgttgtagaaaatagctccttgaaatacccttctgctatgttgccaatgtctgaatcaccatgatggaaattgcctgaattatcttctaaggatagtattctgtttctcgccaatctcgtctttgctcaggcataaaaatatttggtgtttctgtcaccataattcttcaagttgttcctactcttcaacctccaatatgtgtcttcatcatgataagcttgacttaaatcttgtcgaatgtgatggatatcctgagttgtgaagtcgtcattcgaaagagcaaaatctaatcgtcgtttcaagacttcaacttgttctgctaaatttgtacgatgtcttcttttccataaagccatggatatgcggcactgtt

SEQ ID NO: 21666 - DNA, 555 bp, Arabidopsis thaliana columbia
gtgatagtgtttccaagactgtgagcatgttggattctagaaatgaattccaaccatctaaaaggttggatcctttggcccctgtctttgttccctctagtgcaaaactaggtccttctgttcatgagaagctaggagattttgtggtaaatgcatattcaacttctgctcttgcttcttcacatgttaagtcgctagataagggcaaggtagtgacatcttctggagaagttggccacagttttaagagtcaatatggtggtcatgattttggttcgacatcttcatacggtccttggatagaatctgaggttgggattactgagtatgcaaaactaggaagcagcaacaaatctcaaggtcagcggagattgaatccattggcccgtcagttctctcttgcagatgctaaacaaaagccatatggctatggtaaaaaccaagctgcagatgatttatcgctagtggtgaatactagcggtttatacatccagctcgttatagggaggccataatgtagtagatgcagacttagcacaatcctcagtaaatgtg

SEQ ID NO: 21667 - DNA, 605 bp, Arabidopsis thaliana columbia
ttttcaatctcagcatttcgatcgttacagttacatgtgttcaccgatcggacgacggtgatcgctactggttcaggagatgtgagtgtacctaacttcaccatatcgatgctcacttctggcaatttcgcagcctcaagttctttctcaaccaaatccgacggcgttttgcagtatttgtaaaccacatagagtatcatttgaagtgcacctagaacaaacccaatcacgtttgggaactgcataaattgaaagacatataaaaaggtgaaattaaagataatttattagtgctcaaaggccaaagcaatatacctacttttaatttttatatatgaactttatcctttacaaatgtttgcaaaaaaaataatgtgtacaattataaattttgaggtttccaattaaaaaaaatcagtgttattgtagtgactaaaatatattataaaacctgtttgtttttttaaattcagatttccccctatgtattatttgtatatatatgtttatggggaggtacgtgcaatacatgtacaagtgtatgtacatatttgtagatagactcttttgttaagatatatctgtagtgtttagtgggatattta

SEQ ID NO: 21668 - DNA, 542 bp, Arabidopsis thaliana columbia
atccccaagtaaaagaacaacccatcatgttttcttgtagagtttctctatgatttgatagtgaaaccgcaaactattatccatccacattgcttcttaagtaaaaagtaagacaatacttaaaagttaaaacacaaatgaaaacatcaacaggccagatagagagtgaaaagcattgtacccattgtggcctccgtgaccaccttttggcaataaacgtagtttaccaaagggcaaatctaaatcatcgtaaacctgaaaaagacaaaaaaaattaagacggcatatgcactctagagccagaatttggagagtaagcgagagagaaggttaagtataccacaagtacttgctttaacgggatcttgtaaaatgaaacgatttgtccaaccttcaaagaattccagcaatcataaacagaaagaatcaaaataacaagtgataaaagttaaagagattggttaactaaataaaccaaagtttgtttccgatgagctcacttacagactcaccgacttaggttcatgaaagtttgtggttta

SEQ ID NO: 21669 - DNA, 503 bp, Arabidopsis thaliana columbia
  unsure (1)..(503): unsure at all n locations
nnnnnnnnnnnnnnnnnnnnnnctaaagcggatatcctgatcctgtcgctgctcgttatccagtgcgcgctgggcctgttgaccattccgttctccgctcagcatatggacggtagcgagatgatgaaactggttggctgggcgcagtcggtggtgaccttccacggtggcgcttctcaacacctcgatggtgtggcgtttatcttccgtctgcacctggtgctggggatgacgttattcctgctgttcccgttctcgcgtctgatacacatctggagcgtaccggtggagtatctgacacgtaagtaccagctggtgcgcgctcgtcactaagcgaattttagttcacatagaccctgcttcggcggggtttttttatgcgcacggtgcggggtgagttgtcggatgcgcttcgcttatccgacctacaggggaggatattgtaggcccggtaaacgtggtgccatcgggcaaaattagctcggagtaacaggttttgatta

SEQ ID NO: 21670 - DNA, 518 bp, Arabidopsis thaliana columbia
gttataatatcttgacctttgttataatatctaacccatagtttttctttatatataatgtgaatatggaaaacacaagacttcatcttatattcatcaatcttattcttattttctctctgcagttttcaaaaactttctcactgttatctgcgtctcttttttggatcaatggcaaacgctgaacgtatgataacgcgcgtccacagccaacgtgagcgtttgaacgaaacgcttgtttctgagagaaacgaagttcttgccttgctttccaggtatttacctttttgatggctttttgtgttaaatggttaaagaacaaatagtctgatcacttcacatgattcttttagggttgaagccaaaggtaaaggtattttacaacaaaaccagatcattgctgaattcgaagctttgcctgaacaaacccggaagaaacttgaaggtggtctttctttgacttctcaaatcactcaggtcactatttacactaattccaaatgggtagtaaagttttg

SEQ ID NO: 21671 - DNA, 614 bp, Arabidopsis thaliana columbia
cgtttgttagggatattatacgcttgtagccattgcgggatggtgaaggaaggttttgagtatttcaggagaatgagagaggagtataagattgaacctaggatcgagcattttggttgtatggtcgatttgttagctagagctggacaagtgaagaaagcatatgaatacatcaagagtatgccgatgcagcctaatgttgtaatctggagaacattgttaggagcttgtactgttcatggtgattcagatttagcagagtttgctagaatccagatcttacaactagaaccaaaccacagcggcgattatgttctcttgtcgaatatgtacgcatccgagcagcgttggtccgatgtgcaaaagatacggaaacaaatgttaagagacggtgtgaaaaaagtccccggtcacagcttagtagaagtaggaaacagagttcatgagtttcttatgggtgataagtctccccacaaagcgatgctatttacgctaagctgaaagacatgactggtagattgagatcagaaggttacgttccacaaatttctaatgtctatgtagatgttgaagaggaagagaaggagaatgctgtggtttacacagtgagaaga

SEQ ID NO: 21672 - DNA, 555 bp, Arabidopsis thaliana columbia
tcttggtgggaactgtttgagctcgagttctatgatgaacgtgagccggccgcagtgtcacccggttgatgctcttccggtggctcctactgccggagcgatcgatagaccaccagtgaggatgaaggatgtgcaaggcatgcccggaaccaccggcggtctcatcctccgtctctctcagttcgttcccgctcttatctccgtctccgtcatggtcactacctccgacttccgctccgccaccgcattctggtaactgaactctagagttagggatttagaatttgatgaatttagattctggaaactttagggtttttggtagtctctttgataacagttctatggaaatttggtgtttttctcatcgaatttgtttgttgttggtgtgtaattaggggtttgagatgaaattaggcttcttggttttgaaattagtgttttgagttcatgtttaatctgcatagcatcagaatttggatttagtttgagcaatttggttttagactatatgaatctgacaagctcttatctgttactgtgatagttgcttgg

SEQ ID NO: 21673 - DNA, 472 bp, Arabidopsis thaliana columbia
cttctgaatttctgatgttctccttccttctcagctttaggaaaacgactaagagtactataaataagacaacaatagcaactgaagcagaagcaaagatcaaagctttaggtacacctctgtttttatcccctgaacaaaaaccaaaacacacttaaaatgtttaatactgtaagtctgtaacattgggaaataaaaaaatctctacagtctgatttgaatcctagagttcaaaactttcaaatccataagaagtagcaaccctaccttgtgtgacacttcttgtctcattctttggcggccgtgatggcgttgcaggcactgagcttggatcatcagtgtccacatggatcatagaatctccagggagcataagccaacatacagctaggagacatcacataactacgcattttcatatcacaacagcttgggatctttgcaataccctgagacaaacaatacgaacaat

SEQ ID NO: 21674 - DNA, 502 bp, Arabidopsis thaliana columbia
agagacaatttggatctttgcactattttacctgaagagattcaaacaagtctacatgattactttttgatcaactacaaggggaaagtagccatacccaatcaacctaatttctatacatatgatgtgtgggttatgaatcaggaaggtggaaaaattgaatggttgaagaatataactttcactattaaacctcggaagggttttgttcgttatctattcgtcacaggcactactcatacgggtgagtttattttggcaccaacgtcctataccgatgagttttatgtcttccattacaatcccgacatgaatagttttagaaagataagggttcaagcacccggagttaagtttagttttgctcagaaagcttcagttgttttttcggatcacgtagagagtgtttggttgttgtaggagagacatggttttgatacccataatcatcagtatcgaaccttggaagagtttattgcgtttggataatttacacattaga

SEQ ID NO: 21675 - DNA, 500 bp, Arabidopsis thaliana columbia
taagttgtattctactagtttgttacaaatcaagcccgaggctcatcccataaatgaaataaaaaaaaactgataactatttcaattttatttaaaaaaaaaaaaagagtaattccgtaacctgcattatttggtcctcctactgtgtatctatttaatatttaaataatggtcctccctctcacctaaggagacatagagaaccatctggttctttaaggcaccatcattcaacaagtaaacaataaaggaaattaaattatcacaagacagaaccacaaaatcctttggagatctgacactggtaaagctcaaagtgtcaaactatggatccttataagaatcttaatccaaaaggttaccagagacagagaccgtttagctcagccggcgagagtggcggcacgggcggctccggtacggcccatgaaacagatgacaataagaagaagaagaagcttctccaccgcgacatcgaacgctaaagaagacaagaaatg

SEQ ID NO: 21676 - DNA, 581 bp, Arabidopsis thaliana columbia
cggaagagcaaaaaaaaaaaaggatagcttaatatacatataaaatgaattgtgaaaatgactgaaaatcttagggacagaacttttaagtccacttcatgtgtgatataagagagcactcagtatatgtaggcttattgtatataatacgtattgttgttacctcatgaagcatgttactaagttttgctttcttcatctgtatttcttgtctctctgccgtgcctagctccaccggacgtttcccggctgcttctgctccgccaccggaaccttctcctccagcgccggccgatgattctccgacaggtttatcatttccgcaactaccctttttcgatgagaatagttgggatttagcgttcatgtcatcggaatcagcgttgactacttcgtcaagaagctcttgtgctgccttcaagtacttggagctaacaagattagctataccgtttgttaccccgatcctgtagagccagacccgacccggatatcttctccatgtccggacccgaatccgacgtgaataggctggtgttgttgatgatgttgctgttgctgctgctgttgagacgagaggg

SEQ ID NO: 21677 - DNA, 578 bp, Arabidopsis thaliana columbia
tcaattagatggaaatagcaggggctcattgggagaatttagctcatttcctaagttcttcttcacttgttacaagttctctgaatcatggattcgatagatctggttatcattcatcaattatttggttacgtgattttaagacaaagatttaggactgtattattcaaatgaaccaaaacataactcttttttctgaaaatattgcataaacgaatacaataatacaaggcactatctctgagtctcggaacgttctttctttgattaagggagacagagcacacataataatatcagcagacgaatccctgaggaacatttttgccgcaagagttgagaagcagagtgagagcaacgggaattttgacaggagcaactccgagaatgctggttttaagtgcagtgccagacaaacggcagcttcaaagtcagccaaacctttgatgagcgagcaacactcctggctcggtggtgtaccgatgacctcactaaccagacctaaccagctcccacacactccaaatttgagtgtgtctcttggacatttcgtggtggcttgttttgcgggaggggga

SEQ ID NO: 21678 - DNA, 618 bp, Arabidopsis thaliana
gataagtgggagcttcggcgcaagtgaaataccactacttttaacgttattttacttacaggatatttctgattttgatcattgctagtttgatttgtagcctagtcataccttacttgcgtggcaagacactttgggacctagctctatggaaatgggaagtgatggttcttgtcttgatatgtgggagattggtttctagttggattgtgaagctattcgtttacttcgttgaaagcaattttctttggaggaaaaaggttttgtatttcgtttacgggattcgaaagccggtgcagaattgtctatggctagggcttgtgttgatcgcatggcatttcttgttcgacaagaaagttgaaagagagatgcgaagtactgtgcttaagtatgtgactaaagtattaatctgtttacttgttgctgttatcatctggctcataaagactttactggttaaagttcttgcttcctctttccatatgagtacttacttcgatcggattcaagaatcgatgtttaccaatacgtgattgagacgctctcgggacctcctcgtattgagattcatatagaagaggagaaagtagcaaatgatgttaaaacttcgagatagtt

SEQ ID NO: 21679 - DNA, 548 bp, Arabidopsis thaliana columbia
  unsure (1)..(548): unsure at all n locations
ttcgttctgggctctttatttttttcaatcaccacattttcacttgttaaaattttgttactttgctctatctgaaaccaaagctgccatctttctccttttgggttttgattagatctccgattttgggtttctatatattatgcgagctcacttttgttcgttctgattatctgacaatgatattctccaagcttggttcttccctcgctcgatcctcacgttctaaggttcgtttcgttgtgatgctttttttccgacgcttgttaattttgtgtttaatttcctatttttttcaattttccggtgaaattagggatttgtgtacggcggtggtgtgagatcggcggtatttaaccaagggaggttacgagcgccgcagaatctcgaggcggccgtcaatcaggtggatggtggattagggtttttgaggcggcactttgcttcttttgctgctcgaaagggactagaagccggtgatttaagccgtgctttcgctaaccctagattgcgtcggttcttttctagtnaaccccaaagaagaagag

SEQ ID NO: 21680 - DNA, 548 bp, Arabidopsis thaliana columbia
aagaagaaaagaaattaagtccctcgataaggaattggaatggcttccaaaggaacagcttttttcaatgttataccaatcctttctcccatatccatttcttctgcattaagcccattttctaaagcccaatcaaacgatctcaccattgacccaatggccaacggaaaacccgtgatgccaaaggaaagctggacacatccttcgacccgacccgaacggcaagaactcgtaatcttgtcccttgaagtctcgggcgtcagggtcggatataaatctctcgggtttgaacattatcgggtcgatccatgttttaggatcgcgtccgatggcccatacattgaccaagacttgtgtttccttggggatagtgtattgatcgaagatgtgacaagttgacatggctttgtgtgggacgaggaaaggcagaggtgggtgtaccttaaggttccatgatacagctgagagatagggaaggtttggtaggcttcttcttggagcttttggttcgaggacttgaagtaggtctggagttcggtttggagttt

SEQ ID NO: 21681 - DNA, 513 bp, Arabidopsis thaliana columbia
gatgaagatgaaaggaagaagaagatgatggagaagggttcggtgttggggctagagacaaagaaaagcatgtcaagggttgcttttgatctcgatgacgattgttgcgaccgcggtgatggtgttggtggcagaagcgaggaagagatggtggcgagagtgtgcatgaagtgccatatgttagtgatgctgtgtaaagcgtcaccggcttgccctaattgcaagtttatgcattcacctgaagacacctctctctcacttctttttactcctaagccaagtttgtcagcttagttattgtttggtttctaatcttgtttatatctaatcactaattaatgcttcgtatttaatgttttcatcgaacacatattttatttgttgggatgttgttggaactttggtttatatagaatacgatgattaatgtgatccgcttttccctgtacctttttctatgtatttatgtctgaatcattacaatgtaacgttgagaatatcatgttagttggt

SEQ ID NO: 21682 - DNA, 1076 bp, Arabidopsis thaliana
tgagagggaagaactgggagctcccactgccaccatttgggaagggctggtgagtgacttctctctgtttcctcttcggagctacttgtatagataaagagagtgagtttgggttttggttccacaggtttgagaatgtgtatatggacggtgagatcagagtggccaaggacatcagaggagactacttaattgttgatcgtgctccttataactggactgaatcatttgtataatttgtgatgctttttgcttcttgtataagttatacaccatttctgtctctctcctttatcattgggcctcaaatagatgatgcaggaatatagggaggaggaggaagaggaatttgaaggatcattcaaagtgtcatccttgagtttatttagggtttttgtctgtgtttgttacaaacacaccacccacattttctatgcccttttttaatgttattttcacaatccatgacttaaaaaggccaacactaatcctttgtctcttatttcattgtgaactcacaaagatgttggtgccgcaagggtagagaaacaaaagcgtgttgcttatcaggggaaggcgacagtgcttgctctccgtaaggccttgccgagcaatgttgtttcccaggagaatctcgtggaggagtatctccgtgaaatcaaatgcgataacctttctatcaaagacaagctgcaacacttgtgtaacttccctctactttctttgacaactttttttctttgagcacttgtgcaaagataagcgtgtttgtgtgtcttggtgatgttaggcaaaagcacaactgtcaagacacgctacacagtcatgtcacgggagacgctgcacaaataccctgaactagcaaccgaggttccccaaccatcaaacagaggcttgagattgcaaacgatgcggttgtgcagatggcatatgaagcgagcttggtttgcatcaaggaatggggaagggcagtggaagatatcactcatcttgtctacgtttcctccagtgagttccgtttgcccggaggtgatctttacctctcggcacagctgggccttagcaacgaggttcag

SEQ ID NO: 21683 - DNA, 725 bp, Arabidopsis thaliana
aatcaccacgtttcacgacaaacgttttgataaacgtgttgcctgccgcgtcgatatacgtcatcgcgacctgcagttcgttttgaccttcagccagcacataagcgtgtttttcaacgttatacagcggacgcggagcgttagccgggttatccgggccatcacgaccggtcagaccgctctgtgcctgataaataaactgcggtgaagtttccaacagctggaacggctgggtagagttcagctctttcgggtaagcaggcagcagagcttgctcaacatcaccaccacgggtgttgatggtcagatcaagcacgtcggtcttaaccgagatcagtttcccctggccactggccggtacgccctggtcggcggcgctacccgctgcggtggtcgttgtctgcgtggtctgttgggcctgaggttgcgggtttttatcctgctcccaggcttgccagatcatgaaagacacgaacagcaaagcgatgactaaaagattgcgttgcgaatccatcgttagtgttctctggtatcaaatggtccgggcgggacgggatcgtcacaccagggtgtaaagggtggcattttaatacgcgtttcaccgtcaaccaactgccttttatcactccaaacctgcgcaatcctcaattccgtagcttgaacaggttggagtgaaacacaatgcggcccgagtacggactaatcagcgttgatagaccgaatga

SEQ ID NO: 21684 - DNA, 525 bp, Arabidopsis thaliana columbia
tttgagcctgatgatttggtagggtaagaagccatcatcgccacaccgcatttccctgatgactctttgatgttacgttcgagcttaaagtatccgctttctccccagtttgatccccatgagttacgaacaatccagtagtcttgaccaccttctgatccgtatcccacagctacaacaccatggtccaaagatgttccacatgttcctgtaaacacaccctgaaaacaacaacaaaagggattattttatgaactcgaaacaaatcttggattaagagaaaccaaagtaaggttcatagaaaattacagatgtgtaaagctggaaagctctgccaccagcttcaatggcaacactaataggttgattagcaagagccttcttcaaagacttctcatcgttttgaggaacatcctcataaccatcgatggtaacaacacgagtgttcttctgcatgagttgaaagaaaaaacagaacataacagataagtactatacaccataaataaataaagtacaaacaat

SEQ ID NO: 21685 - DNA, 178 bp, Arabidopsis thaliana columbia
cgccagtgtgctctaaaggaagttgcgctgagaaagcgtcaggcaggttactcatcgcctgttcgaatatttctggtgactccggcatattacgaacatcaatgctgacggcggcagaaatctcgcgatcggccagggttcgagccagatcgggtaacaacactacaggaaggttatc

SEQ ID NO: 21686 - DNA, 696 bp, Arabidopsis thaliana
tttgcctcagacagaagaagtcatgggcttgaagtccttccaaccagacttgtagtgcaagtaaagaggattagcattagctgcttgtgcacagaccatcctcgggatcctatcgacaagtcccagttcttgacacatcttaaaccctttgtaaaaggcatagatgtttcctaggttacctccaggaacaatcacccaatcaggaacttgccaatcaaactgctgcaaaatctcaatagctgcagttttctgcccttctaacctcaaactattcaacgaattcgccaaataaatcggcaattccgcagttatctctctaatcagcttcatacacccatcaaaatcagtgtcaatactcaaaacaaacgcaccattagctatcggctgaaccagctgagccatagagatcttgttcgccggtaaaaacacaatcgatgggattccagcggaggcgcagtaagcagatagagcagcagaagtatctccggtggaagcacatccgacaccaaccacaggtcgtttcatctttctcagacgattaacttgactaaccaaaacagtcattccaagatccttgaaacttcctgtatgactaatcccacagtgtttccccacagatcattcatacctagaaactgcttaccaaatctctctgcccagaacagattcgagtttcctcaaaagctgaaacgatgt

SEQ ID NO: 21687 - DNA, 2054 bp, Arabidopsis thaliana
cagggtctcatgttgagagtaaagaagaatcaaagagtttaggcagaaactgattgatgcagaaactcctctatactcgacgtgtcccagctatactaaagtttctgcaatcatggcactctatcgcataaaggttaaaagtggtatgtctgagaactacttcgatcagctcttgtcattagtgcacgacatgctacccgtggataatgttctaccaaaatccacagatgagatgaagaagttcttgaagctatttggttttggttatgaaatgattcacgcatgccagaatgattgcattctgtataggaagcagtatgagcagttagtaagctgtccacgatgtagtgcatcaagatgggaaaaggataagcacacaggagaggaaaagaaagggattccagcgaaggttttacggtattttccaatcaaggatagattcaggaggatgtttagatcaaagagaatttctgaggagttgcgttggcatttcagtaatgcaagtgtagacgggtcaatgagacatccagttgattcattgacttggtttcaggtgagggataaatatccaaagtttccagctgaactaaggaaccttcgtcttgggctttccacagatgggatgaatccattctcaatgcagaatacgaagtacagtacatggccggttatgttggtgaactataacatgtgtccgactaagtgtatgaaagctgagaacatcatgtcaactatgctcattccaggacctactgcgccgagtaacaacatagacgtgtatcttgcacctcttatagatgatctaaatgatctttggaaagaaggaattgaggtttatgattcttatgctaaggagaattttagacttaaagctatattattgtggactatcagtgattatccggctttagggactctagctggctgtaaggttaaagggaaacaggcgtgtaacgtttgtggcaaagatacaccacataggtggctaaagtttagtcggaagcatgtttatttgggaaacaagaagcgactaaggccaggacatccctacagaaggaaaaaggcttggtttgacaacacagttgaggatggaactgtgaatagaattcagacaggatctgacatatttgagacacttaaggactttagaaatgatttcggaagacctttggataagaaaacaaagaggagcagaacagatttgggagatgaggatctggttttagaagaagaatatgaagaaaatacagatcagtggcggtggaagaagaggtcaatactctatgaattagcatactggaaggttagttctttcaaaagaagtctagtgttttctttgtgaactagttttgttgtttgtcctaacttatttttcttatttttcaggatatgccagtccgtcacaacatagatgtgatgcatgtggagaagaactactctgatgcattattgtccactctaatgcaaagttctaaatccaaagatggcctgaaggcaaggaaggatttggaagacataggaattcgatcacacttacacacagaggtaagaggaaagaagacttacttgcatcctgcagcttattggttatctaagacatagaaaaagggtttttgcagtaggctagctaaattcagagggcctgatggttattgcgctaatatctcaaattgtgtttcagtagatcctccaataattggtggcctgaagtaacacgatcatcatgtacttatgcaaaatctcttgcatgtggcgttgcaagggtttctgcctaaaggccccagaattgcagttacccgtctatgcaattacttcagtagactgtgtcagcgtgtccttgatccagagaagcttcttgcattagaagctgaagttgttgagacaatgtgtgaaatggagaggttctttcctccttcacttttcgatattatgttccacttcccatacatttagcaagggaagcacgattgggtggcctgttcattttcgttggatgtaccatttgaaaggtacattttcttgaagctttgtttggtctgctcaattttaaaagt

SEQ ID NO: 21688 - DNA, 538 bp, Arabidopsis thaliana columbia
ccacctaatttaaatcactgagctttacaaaagttagtatcagttaatacttagacttagcaaatctatctgtacaataaacctcaataacagtcgatgcttctctactttgttgagttgagtctgttgattagattcagatgcctcttataatcctgaaaaatgcaacaaaaaccaaaataaataaaataagcaatttaagatcttcaatttgatctctctttgcttcaacaaaaactaaattttttcacttcctcactcaccttccaagccgagatagctcaggttccgccaaaagcatatcttgcaactgttttgcatctgtatacctttcactagaactaaaaacaaaaacaattgtcacaagacagacactgaggggaaaaaaaaaggagataaagaggtttacttactcgcagatgtggttgattgtgagtaatctatgatgaataactaaatcatggccgacataagtcacaaccacggaaccagcgtcaggatgtggccagcttcttgaagtagggaacatgagaatgaa

SEQ ID NO: 21689 - DNA, 711 bp, Arabidopsis thaliana
gctcgtcatttgtactcccctgagtgcgacggccgtcaatgagcagatcaagtacgtttttccgtcttggattgaaacattttagtgattgttatcatggatttgaaaattgttattgtaaatctgttgattgagtcaatttttgcttgaatcctatatagatgagattggcttttattttgagtctctcatgaatctggattttcgtttgatgcagtgttgagtataacgtgtcgtatgtgtatcacgctttgtatgcatatttcgatcgtgacaacgttgccctcaagggtctcgccaagtgagtttttctctggtattgaaatctctgtgctgatattcgttctgtgtgatgatgaattatctgttgtttggtgttttttgctgaatcaggtttttcaaggaatcgagtgtggaagaacgagagcacgctgagctgttgatggagtatcaggtctttgactaatgatttcattttgttatcattcataagccttatgatcatttgagctaagtttgtaacatcttacatttttggttttcttgatctacagaacaaacgtggtgggagggtcaagttacagcccatggtgttgcctcagtctgagtttgatcatcctgagaaaggagatgctctctatggtaagcttcatttccatttctgagattttagataaagaattccagtacaaagtatctgtagtttcttaa

SEQ ID NO: 21690 - DNA, 594 bp, Arabidopsis thaliana
tcataacctctatccttctttccacatatcattagatcatctatagagtgcaagatacacgtctatgtgtactcgggcgtagtaggtcctggaatgcgcatagttaacatgatgttctcagccttcatacacttagtcagacacatgtatagtttcaccaacataaccggccatgtactgtacttcgtattctgcattgaaaatggattcatcccatctgtggaaagcccgagacgaaggttccttggttcagctgaaaactcgggatatttatccctcacttgaaaccaagtcaatgaatcaactggatgtctcattgaaccgtctacacttgcattactgaaatgccaacgcaactcctcaaaaattctctttgctctaaacatcctcctgaatctatccttgattggaaaataccgtaaaacgttccctagaatcccttccttttcctctcatgtgtgcttatccttttcccatcttgatgcactacatcgtggacagcttactaactgctcatactgcttcctatacagaatgcaatcattctggcatgcgtgagaacatctcataaccagaaccagatagcttcaagaa

SEQ ID NO: 21691 - DNA, 453 bp, Arabidopsis thaliana
caactgaaccgaaagcatacacatgaaatcgaaaaaaagagacaaaccaattctgtatcattttcgcatagactacacaatggaccaaatataaccggagttgtagatacattaaaccggttatccttattaaggtttgaatgtttttcttctttggcgggacaggcaggaggaccggtggttgagattccgacagggatgagagacgggagagaatcgatggctgcaaacgtgagaccgaacatcatcgacacagattttactctcgatcaaatgatcgatgccttctcttccaaaggcttgtccattcaagatctcgtcgtcctctcaggtagatatcaacgtgtcctgaaactcgaatcaattttaccaagatgttttgctaacgcaaacagagtatgaaacagagttttttttctttaagtatggtaaagtcaattcttgtagcaaaat

SEQ ID NO: 21692 - DNA, 529 bp, Arabidopsis thaliana
taacggccgccagtgttattacgaaatcaaaagaattcctaaagaccaaaaaaagaagaagctcactgcatgtggtggctatgtacatcaaacctctcaagctattcaataatgagctcaacagtatactacatatatagtttatataaatgataaatttaatttatatttttattattatcctcgaattccatttgattgggcctgataagcccattatagaatggcccatcaagaatagaaaacctccacgcttgaattcttcgtgctaaggcaaagcggacaaattctcacggagccgtcgcattctgtacacataaccaaatgacgacacggcaaagcaacaccgtcgccgatcgccgccggcaaatcctacatcccggtccaaacagatttcgaccggtcgggatccacataagccgattcggcgtcttcagcttcatccacaccgtctacgcttcgcgattgtggctccacgtcgtaataactccgcaccgtgagctactactacggcttggtgtaattgagc

SEQ ID NO: 21693 - DNA, 1753 bp, Arabidopsis thaliana
cagaaaaagacaaatatgaagatatgcgtcctggttcagctgctgattttgtgccaccgtcttatcagccaaggatactcagagcaaggccttggttattcacagtggaatccgtgacccagcacctccaactattgagtctctaagtgagtttttgttgaacttttgtgtagtgatgctttcacaatagttcttacatgtttggttacatatttttgtaggtgatggcagcgatgagtccgatgaagaggataagaagaagaagaagaagaagcagatatcgaagaagaagagaaagcatgttggtcctactctggaatctgggaaaaaacgtggaaggaaaccttccaagtataagggggaagagtttacagctgaggggaagcaaacgaggaagagactttgacttttctttcttgcttatgtgtgtgtgtggactcttaggtgtttggagaaataggactttctttttgtgtatttgggaatgttatgcgtagtttatgtgtagaggacaaacttattttctgtaatggtttatgtgttttaggattttattaaaatcaaaacgtttggctaagttgtcccggttggccggtcaataatacaagagtggctaagttgtcccagttggccggtcaatacacatagcttaaaatacaagagtggctaagttgtcccagttggccggtcaatacacataacttaaaatacaagagtagctaagttgtcccagttggccggtcaatacacataacttaaaataggtaaatacatgtctaattaggttcaaatattacataaaatccagaaacataacataattaggttcaaatgccatacaccatcctcaataacataaaacacatcataatcaccatgtagaaagtaatgccctaagcctatcaatctcgacttctttggcgagtaacctttctttaagggtttcaatttcgccttgcatgagatgaacagtttcccggatggactccaaagcatgattgcatgctagttgtccatgtcttagtgcggaatcaagtttgtgatttaccatctcaagctcctcagttaccgcctgatcccaccactgaataaggtggtttcgggactcgtactcttcagcctgcgaaagagagaagacttcataaatataattcacttgtactttgttgttccaatgaaatgaaaacacaataacttactttaagcattgagcatttgtagactctgtcgccttgcctgtaaccagttttgcacacttcaagttttacaggcttaccacaaaaacatttttctggaaccccccaatttgcatcggcattcgcctttccactattccaactagcttcggacgtggatggttgagagtaactatagggcatctacagaacagagaaagaaagagatatgaatcatgaacgctataaaccctagatttactaattacggcggctagaaacccgtaagaaaccctagatttactaattatggcggctaaaaacccgtaagaaaccttagatctactaattacggcggctagaaaccctttagaagaagagagaagaacgagagagaggaagaactccagtgcatgtaataccttggttgttgttgttgtcgtcggcggcggcgaataatgggaaccctattttcagttgtcgtcgccgatgttgggaaggaagaagagagaagaacgagagagaggaagaagagagaagaacgagagaagtgaaatagaagagagagagagaagaga

SEQ ID NO: 21694 - DNA, 2048 bp, Arabidopsis thaliana
ttgtccatggcagttgactgcacatgtcatacccaattcaaaatgtttcaaagtcacaggttatgattctatccatgtttgcaagatcgggagtcgaaaggattatcgtaaacatgctacttacaaacttttaggcaaggtaatgaagaatagatatagttctaggcaagggggtctaagagcagtagatttacctcaattggtcttaaatgatcttaatgtttggatctcatattctacagcatggagagctagagaggttgtagtaaactctgtaaggggtgatgatatggctagttacaggtttttacctatatatctgtatcttctacgtttagcaaatcccggtacaatctgtcatctccactccactcctgaatctaatggtcgccagcgcttcaagtatggattcgtttctctctcgacgtctataaaaggttggaaatatatgaagaaagttgttattgtagacggaacgcagctagtcggtcgttacaaaggatgcttcctcatagcatgtgcacaagacgagaactttcaaattttcattagcttttggtgttgtcgacggcgagaccgatgcttcatggatttggttctttgacaatttatcaaagattgttccagatactgacgatttgatgattgtctcggacatgcattcttccatatataaaggcgtcagtgtggtgtattcgaaagctcatcatggagtatgtatagtaacctggagcgaaacatatcagtgtcttacgctaggtacggtgtgtcttgtttattctttagcgccgctaaagcatatcgggttagagattttgaaaaatactttgaagagttaggaggtcggagtccgggatgcagaaagtatttagagaatgttggatttgagcattggacaaggacatactacaaaggggagcggtacaatatcatgactagcaacaactcgaaggcaatgaacaatgtcttaaggaaggcaaatgcgtatccaattgtctatatgatacagttcatccgagaggtcattatgcgattgtttgcagcgagggggaaaaaagtgtcgaagtgtaactctttggtgacgtcggaggtagatgaacgtttcctccaagacttgcctaagtcaggaaagttcgcagtcatgatgtttgggccatggagttatcaagttacttcaaagagtggtgagcattatcacgttgtactagacgagtgtatgtgtacttgtcttaggtacacgatgttaagaatcccatgcgagcatgctctagctgctgcaatacattttggcatcaacccgaaggctgtggttggattgtggtatagccttcaagtgttttctgattctttccaagaatccgttttacctatagcggacccaaatgacgttgttattcctcaagatatatcggaattcatgataagtaggtttttaggcctacttatatggtgaagtgaggttctgttcaattccccttaaacactaacatgtcgatgcagctatagggggtgtcaatccagtccactgttattgctagcaatcaagatgtgtacataagcaactaagtcaagccagattatagagatggtgggtttctagtaacaatcataggtcagaattcaaacaggtaaaaatgtgaacttaagagccctactcgatcattgggtcgagtagaaccaacatgtgacaatattaagaactaaaatacaatcaacaggggatacaaataacaggtaaataaaagtgcaatcagggggtgaatacaaataaatctaagaagaatagaagtcctaaggatggattcattgataagggcaactctagggttcatcaggtggctaacaggtgaaaggcagaaaccctagacgatagaatcaaaaccggttcaatccactctcatgacagagacccccataactctaccacttcctaatctcaattctcgttgatgaaacatagcagagcagggtttaagcaacaatctaccaaagctaataaacagactagccaatctcttggtctatagtctataaatctctggatttcg

SEQ ID NO: 21695 - DNA, 640 bp, Arabidopsis thaliana
ccttacgtcacaaaagcaattcaaaattcaagtgggcaaatctttgtttctttttaatcaaacaagattaaagttagtttttagaaccagtgattgtaataactctataagctctaatggatcaatgtaattgcctgtaaccctaaccctgatgtttgttttactcagaaccataccttcaggtccaagcaaaattacataagaattaccgtggaagatcgcagccatgtggttgccatcgccattgtcgaaaaccagaatcttttcttccattattcagacaacgaaaaccaggatccagaaaccgacactcttctccataataagaggtttcgtccacatcacggcgtcgacgaacccatcttccgtatgaatagtcgcatacgtcgtcgtttcctctttccttcgttagggttcggggcgacaataagaatccgaaacagagatgaggctcgaagccggcaagatcaacgacgataacagagaatattaggaaggtgatgagaagagagatcccacaaatatatgttcgttgattttcaacgttgagaagaaaggagacgaagatagagagagaacgccttcagaggattgattcttgatgatgatcatgtatgtcgtatgagagcgtgaaatgtga

SEQ ID NO: 21696 - DNA, 2572 bp, Arabidopsis thaliana
tcacacttagaagcgtaaagaattacccacaaaagagagcccgaaccagaacactgaggacagtgtgatcaagatggggaggatttctgtcaaaatggaaattccgctgaaaaagcaatagaagagcctatactcgaccaacctactcgactactagctcctgcagcatctcctcttgttgaaaaaccagctgctgccaaaaccaaagacaacgtcttcgttcccccaccttacaagcccccactcccatttcctggtcgattcaagaaggtcatgatacagaagtacaaagctctcctggagaaacaattgaaaaatcttgaagtcacgatgcctcttgtcgactgtcttgcacttataccagactctaacaaatatgtgaaagacatgattactgagaggatcaaagaagtccaaggaatggtggtgctaagtcacgaatgcagtgcgatcattcagtagaagatcattccagaaaaactaggagatcctggttccttcaccttaccttgcgctctaggccctttagccttcaacaagtgcctctgtgatctaggtgcatctgtgagtctcatgcctctctctgtggcaaagaaactggccttcaacaagtacaagccctgcaatatatccttgatcctagctgacaaatctgttaggattccccatggtctgctggaggacttaccagtcatgataggcatggtcgaagtaacgacagactttgtggttttagaaatggatgaagaacccaaagaccctttgatattgggaagaccatttttagctacagctggagctatcattgatgttaagaagggaaaaattgatcttaacctcgggagagatctcaagatgaccttcgatatcaccaacaccatgaagaagcctacgatagaaggaaatgttttctggattgaagagatggatatgttagctgacgaaatgctagaagagctgggagaaacagatcatctacagagtgctctaacaaaggatagcaaggaaggagatttacatttggagattttggggtaccaaaagctgttagatgaacacaaagcagttgagaatccaggagagtatgaagatttgggtgaaagagcaagggaggaatatatactcgaccttatcactcgaccaacagcccattctgtgtactcgaccgagctactcgaccgagctactcgaccacaacaacccctctgaagccaacttagtatccgatgactggtctgaactcaaggcacccaaagtagatttgaaaccgctaccaaaagggctaaggtacatttttcttggactaaactctacttatcctgtcatagtgaatgatgagctaactactgatcaagtaaacctgctgataactgagcttaaaaagtataggaaagctataggatactcgttagatgatattaaggggatttcacctaccttgtgcatccatagaatccaccttgaaaatgaatcctactctagcattgaacctcaaaggagattaaacccaaacttgaaagaggttgtgaaaaaggagatacttaaactactagatgctggggttatctaccctatctctgatagcatttgggtatcccagttcactgcgttcctaaaacaggaggtatgacagttgttaaaaattctaaagatgaactgatacccactaggactataactggacataggatgtgtattgactataggaagttaaatgctgcctctagaaaagaccatttcccattacccttcattgatcagatgctagaaagattagcaaaccatcattactattgcttcttggatggttatagcggattttttcaaatccctattcacccaaatgaccaagagaaaaccacttttacttgtccttatggaaccttttcttacaagcgtatgcctttctgtttctgtaatgcaccagctactttttagttgtgtatgacttccattttctcggatttgatagaggagatggtagaggtattcatggatgatttttctgtgtatggctcttccttctcctcgtgtttgttgaacctgtgcaggatacttaaaagatgtgaagagacaaacctggtgctgaactgggagaaatgccatttcatggttagagaaggcatcgttttgggccacaaaatttctgaggagggaatagaggttgataaggctaaggttgacgtgatgatgcagttacagccaccaaagactgtcaaggacatcaagagttttcttggacatgcaggattttatagaagattcatcaaggatttctccaagttggcaagaccgctcactagactgttgtgcaaggaaaccgagtttgcattcgacgaagaatgtttgacagcctttaagttaatcaaggaagctttggtcactgccccaatagtccaagctccaaactaggacttcccattcgagatcatgtgcgatgcttcagattatgtagtaggagcagttttgggccaacggattgataacaagctgcatgtgatctactacacaagtagaacgatggatgatgcacaggtaaggtatgcactatagacaaggaactgctagctgt

SEQ ID NO: 21697 - DNA, 1416 bp, Arabidopsis thaliana
tctcttccgaggtggattgaatgagatggcgagaaccagcagaatggttgaattcaacaacagagactataacctgagtagaagcctccccatcttgaacatcactgtcctcagtgatgaaatcagggacaagtcgtgttggaagctctcggtcctagcagatggtgatggcgtgagcagttgcatactccttgggattctatatcgacttcccaggaagtcctataactttaggtgcagaggtagatgctgattggccttccaagtatctgactttggtattcaatgcctccactttggcattcaggtcattgtagctgcagtccagcttatggtgcaattcagataatttcctagcaatttccattgagctagatgtttgtccctatagcagctgttgtaccatctgtttcatttcagtatcaggagcagcaggaccttggttttgatgagttgcaaacccaggtggtggtagcggctggtagttcccctggaattgctgctttggaacgaaaccttggttatagggaacaaaaggtttgttctgaccttgttgttgctatggtggatacacctgatcctgaggattagcgacgttggtggtgcggtaggagaggttggggttgttggttttgaagttgttgtatcctttgtagccacactggttgttgttgatgtagctgacttcttccaactggttaccctccccatcttggacttgaaactgctcgtcatcaacaaggaagtgcacatgcttttccggctaagaagaatcctgtccagcttgtcattcagcgctttgatctccttcctgtgtttgtcatcagagtcagatgtgcctccgacggtcctatcgcagtcctcgttgtaattaccatctgattgagcaaggttctcaaccaatcccagccttcttcaacatctttgttctggaaatttccattgctggcggtatccagaagcattcttatgcgtggtaggactcctctgtaaagagtgctgagcagagaggctttagtaaagccatgatgagggcattggttggtgtaacccttgaaacgctcccatgcttcatagaagctttcaccagtcttttgtgagaaaccagaaatctcatttcttagtcttgcagttctggcataggacaagaactttgatagaaaagccttcttacaatcatcccaggtagttcaaattcttctcccagatgtgtgcttagtcgcccaaggagaatggaaacaaacggagcttgaatgcgtcttcactgacaccattaatctttgttaggttgcagagctctcgaattcatcaaggtgatcgagtggatctccattggtagacatggaatttgtcccctgaatcatcgagatgagacactcttaactcgaagttgttgttttggatagcaggaggtgc

SEQ ID NO: 21698 - DNA, 2830 bp, Arabidopsis thaliana
  unsure (1)..(2830): unsure at all n locations
taattatgtcacaatctatgaccaaacgcaaaagtcactaaaacagtgacaaattgtgacatgatagttacaaaactctcgtaactatacgtgacataagtttagtcacaattattgtataatttagttaccatatttggtcgcaaatccgtatttatatttatgactatataattcgtaacaaatttaatataattagtgacaaacgttagttactttcaattaagacataatattataacgaaatagtaacgtttttatgactaaataaatacgtcacatttttgtaagaaaatggttacaattttctgacgaaaaaatggtcgcaatttttccgtaagaatattcaaatttttttgtagtgttaggcttgccaaccctcacttcacccaaatgttgtgtcgactcggacaaagtcttatcagtttgaaacccgtatactctaaaataaataccgatttcattattttagagttacgaaaatacaaggaaaaaccacaacataaacatcgtttttgtggccaaggcatgaggtccaaaagtacacgatacgaaaatacatattttaagttttacaaaaggacattgaaaaactactccgggttccctagtgttcaccactccctctaatcccctcaaaggttaccttcaaaacaagtagagtcatgagtaatctagcattactcaatgagctcgggttcccaaagaaacgttagtctaatccccacccataatccccacatgcataacataaataatcatagtacatagagaaggtagtaaaccacacaaacacaacaagaacaaaacgtttcttaaagttttaattagggcccggatgcacttcatgcctccacaaatcgtgaacacccgagttataaccacaaaggcatataaccggaacatcaccttggctacaccgtcgtgtaaacgacaccgacccttgggtagctaacccagtctctccgggtccttcgaaccccttggggtcacttgcatctcgtcaagcacaccccacgaaagaacgaaatcacaaggtaaggtcagatacatcccacatgaccgtagtatgcttatggagttaacttggatactcccaagttccacacactacgaccttccaatcgacaatatgaaacgtgcggttcgttttcaacgcgcatgaacatagagtcctcttactaagtctactgaatactagcgagtagtgtcttgacaacgcaaccatccctctcgaatgaatggtgctaagctaacacaaccactcctataggatatggtgcttcggtctcaactgtcctagctattcgaataaacaacctcaataataacaaccacaaagcaaagaaaagagagaatagagaacatgcaagaagaaacgaaaatcaaacatgcaaaacaaaaaccggaactcacaatcaccgatgaaccttcctaacttgaccgatggtttctactcggaaactctctcagactatgctgaggctcggcgatctctaactctctcttgggttaaaagactcggacgaactctctctcacgggttaaaagactcggacgaactctctctctcacgggttaaaaggctcggacaaactctctttctctcttggtttgggcagagctttggtgcgaaggcttctaagggttaactaagcgagggttgggttctatttatagagtgaggacttgtgtaagggaagggagataaaacttggtcaccaagttggctctaggacgaaacttgctcaccaagttggctcgcctaggtggattcggctctaagttggctcggatggcttgggacgaaacttggtcaccaagttggcttcgccaaatggatttggcttcaagtttcaagacttgggctctactctggcttctgcgggttataaatactcggcccctcttctcattctcgcaccattctctcttctttttctcttgcccttctttcttgcccgggatcaatgcgcggggtactacattgacagccgctccaattctagcagtgcgggaccnaaataaaccatatgctctttataccgacaactcaagtgttggcttgggatgtgtccttatgcaagaaggaaaggtgattgcctatgcatcacggcaattaagacgacatgaggagaactatcctactcacgatttagagatggctgctgtagtattcccattgaagacacggagatcatacctatacgggaaaacaatacacatgtttacgaacaaccaaagtcttaagtacttattcacgcagccagatttgaatctacggcaacggagatggatggaattcatcaccaattatgatatgaagatttagtatcatccggggaaggctaatgtggtggcaaacgccttaagttgccgaaaaacggaagtagatgttgagaaagatctagagtcactaaccgatgagttcaagaaagtaagtatgttaactttaaaaggtgaatctagtaagcccttgggtttgcaagctgtgactcaagcaagcctacttcaccgaattcgagaggaacatgtgcaagatgaaaagttgcaagaaatcgtggagaaattaaagacattaaatggtccgaatgctagtggttatcatctagctgatgacgccactttactactcaatgggaggattacattgcatgcccgtaaaggattacggtaagaaattttgagggcagcacatacttctttattaagcattcatcaaggaagtacaaaaatgtacaaggacataaggaggtatcacattagcatggaatgaagagatcagtggcaaagtgggtaaccaatgtgatcatgcgaagtgtgaagtgga

SEQ ID NO: 21699 - DNA, 875 bp, Arabidopsis thaliana
tcgtcctcgtcgtcgtcttgcttcgatgatttcgtcaagagttacaaaaccacgctgcgatgttaaaaaagcatcttactacgcaactctttcagaagaagaagaagaagaagcttcatttagtccttgacttggaccacacgctactccactctgttctggtttcagacctatctaaacgcgagaagtatctactcgaagaaactgattcaaggcaagatctatggagacgcaacgtagacggttacgagtttatcataaagctacgaccttttcttcatgagtttctcttagaagccaataagctcttcacaatgcacgtttacacaatgggtagttctagttacgcaaagcaggtgttgaagctgattgatcctgataaagtatactttgggaaacgagttataactagagaagcaagtccttttaataagtcacttgatcttcttgcggctgataaacgtagagtggtgattgtggatgatacggttcatgtttggccttttcataagagaaacttgttgcagatcaccaaatacgtttattttaaagtcgatggaaccaagtgggattcgtacgcagaagcaaagaaagatgagagtcaaagcaatggatcattggctaatgttctgaaattccttgaagatgttcacaaaagatttgaagaggatttaggttttaaagatttgaggctattgataccttgtagacaatgctgctactgagttacagtaagtatatttgatccagagtggtgtactcttagagctagttagagattagaatgtttctagctttgtaacaagctcttgaatacatatagttctgaattttattgatcatccttcaagagccacttagcagtacaccagtgt

SEQ ID NO: 21700 - DNA, 1738 bp, Arabidopsis thaliana
actgtgtgaataaacttggaagagagtactcaggacaaatccaatcacagaaacaaaaaatgaagaaacaaatcacaacagacggtataatacaacggtgaagtgaggcgcttacctcagtcgaagaatgaacgtagttgctcgtcaatggctgcctgcgattgctcccaggccatagacgaacctccttgttctgtatcagctccagcagatgggtactcgacctcatcagctctgtggcggccagcaccactctgaggaaactcgacctctctccttctgctgcggccagcaccgcggtcgcgtaaactacgagactgcagaagtcgtccgctcctactgctagatcgagtgagtgtggtcctcctcttcctcccagattcacgaggctcgaatgatgaatgcctcgcagggacatgcgggatctcctgctctctaggctcaggcctgcgccgacttggctcgggcgcgtcatatctcctcgaaggcatgtcctgagggagatgtccttgcggaatagctgtagtggaagaggagcagctgagcttgtccttcagaaacttgatagcccttaagcacttggcgagtaacttgtcctgtttcttgcaccacttctgcagcttgctgttgttcctgtgagcttcactcaaactcttgcttttcctcgcaggaggtatatgctcactgaaatgatacatgctcgtgtcaaactccgcttcatctatatcatccgtctcatcaacatcttctgttgtagctccttcggtgtgactaaactcctcggttggcggactgccctcgaaataaagatcttcaagcgcaggcttgaagtcaatgttcctgccctcaagaatcctagtagcgtcaatgcaggggagaagaatgttggcgattctaatcgatgaatgctcgaacctgtagcggtgaaagtcgccagccatgtcaaactccaagaactcacatctgcgcaaatgatccaagtccatcatcctcggtgctaaacctggttccttgagcgggactccacaagcttccagaattgcgtcacaacgccacccacgcatagtgctcctttcaccttcttcttcccgtttgtcaacgcccacttcctgtatccacacagatgcatcaacagaggcattactggtggtgcgttgttgagatcacctctcaagacattcttccccttcgtccggcggagaatccctgtaagcgcataatctatcatctccatgtccgtgttagacacggtgcctgtagactccctagagtaaaagacgttggcgactgatcgctgaaagtagcggatcacaggacttcggatttggttgctcttagaccgcgctgagtttagcggtagattgttccctatagtggcccacaaatccttaagctcctctctgtcaaatctgggtttggttccctttccactagggaaaccaaacagttcttctaacttcttgatcgaaagctgataccgctgttcattcactgagaacgtcaagaagcctaatcccatggtatccagctcaaagtctgtgagtgcttcatacatctccacttgcagcgtggaaagaaactcgattgtctcctccttataggcagggtaagggtaagacatgagtgtctccagatgacacttctcgaacaaatgctgcacgtcctccagtaaccccagctgggctaacgtctcataacaaggataccttgttccccagaagtcattcatctcgaaggg

SEQ ID NO: 21701 - DNA, 1626 bp, Arabidopsis thaliana
ggttttgcgagaatgggtggttcagacaggtatgctttcaattgtttgaaggcttgctcgcagtcctcattccaatcgaactttttatcctttcggaggagctgatagaaaaagacgcatttatcggtagacctggaggtgcgcgataaataacctgttgaagggcggcgatacggccggtcccgtgccatttttggcgatggcatgtcgatgaaggctgcaatctgcttaggattggcctcgatgcctctttgggttactaggtatccgaggaattctcctgagggaactccgaaagagcatttctctgggtttagcttcatctcgaacttgtttaggattttgaagcattctcttaattgcgggaggtggtctttttcgtgagctgacttgaccagcatgtcgtcgatatagagctccatcgttttacctagctggtcggcgaacattctgttcaccaatctttggtaagtagctccagcgttttttaaaccaaagggtattactttataacagtaggtgcctcgatcagttataaaagctgttttttcttggtcatctgggcgcataagtatttggttgtacccgaagaatgcatccatgaaggacaatagttcgtgtcccgtagtggcctcaattagtcggtcgatatgtgggagtgggaaactgtctttaggacatgccttattcaggtccgtaaagtcaatgcatactctccacttcccgtttttctttttaacgacgaccgggttggcgagctgtcagggtattttacttctcttatcgatccaatcttgagcaatcgatcaatctggggacctagcttgcgacgtttctgctttataggtcagtaggtcggatcgacgttgagttcgtgtgaggttacctcgaggcttattcctcggaggttcgcacttgaccaggcaaaactgtctttgttttctttgagaaaggttatgacatcctctcgtatcgctgggtcgaggtcttgacctatcccaacgcatcgtttgggatctgattcgtctatgcagacctgtgttatcaatgacttttgaggtccgcgttgagaaggatcaaaggatctgactgttttcatttccgcgagtttgtcttctatcataagtactatggggtcagcctttttgataaggtcgtagctgcccatatagcattttcggaagctgcgttggctgccgtgcacgactgctattcccttgtccgaggggaatttaatgcattggtggtaggttgatgggaccgctttcatggcgtgtagccatggtcttcccagtattgcgttgaaaggagctttcttgtcgactacgaggaaactcgtgagtcgcctcactcctcgtgcgacggttgggagctggatggttcctagagaaaaggtcgtatctccggcgaacccggtaagtggcgttttcctgccctgctgctcggaatcgaggtgccccattcttttgaaggcgtcgtaagagagtacgtcaactgagcttcccgtgtcgatcattatacgggagagtttgtagttgcctacatcgattcaaataaagagagcgtcatcgtgaggtttatcgaggtcggtggtttcgctttcccagaatgtgatctggtggtcag

SEQ ID NO: 21702 - DNA, 627 bp, Arabidopsis thaliana
ccactttctaatcttttaaaattgtttataaaccatgtaaccctttttaaaatccctttgtaaaccactttgtatctacaatattttccgcgattgatagtggcctacaacaacaaaacagtcaacaatgatgcttcttccattattaaaaaaaactcactatcttactaataaaactcacttgtttttccttgacttcttccattcaggccaatttctcaagtcttgtggcatcaactttcgcaaatggatgcaaaattggatgcttcttcttctcagttgtgaaaggtgcttgagtatgaatggaaggaaccgtaccccgcttactctttctttgcggagcgggctgaaaatcatcattgtcgccatcattatcagcgttatcaccatcattgccaataattttccttttcttattttgtgcctatcaaaaagaataaaaaaaacagatgtttaaaataccttataaacaaaattttcaaaatcataataaattagatactaacctctttccttgttggaacatcaacatcagcactatcaacttgtttctgcctctttctcggcacctagaatagtaaaaaacaccaattaaaagtacttttaaaatcccttgtaaatatcata

SEQ ID NO: 21703 - DNA, 2396 bp, Arabidopsis thaliana
attaaacccctttttaatagcttttaaaatctctggtaaatcaatccttaccattttctaatccgttaaaaacgattgcaagtcatgtaaatcctttttaaaataccttgaaatcattctttaccactttcaaatctttaaaaattgtttataaaccatgtaaccctttttaaaatcccatttgtaaataacttaatgatgctttaaaaactatatgtaattcatgggttaccaattttacaaggatttttagacataccgttgctgttattgctttccctggcgtctctagggttgtaaaccactttgtatctacaatatttcccgcgattgatagtggcctacaacaacaaaacagtcaacaatgatgcttcttccattattaaaaaaaactcactatcttactaacaaaactcacttgtttttccttgacttcttccattcagccaatttttcaagtcttgtggcatcaactttcgcaaatggatgcaaaattggatgcttcttcttctcagctgtgaaaggtgcttgggtatgaatggaaggaaccgtaccccgcttactctttctttgcggagcgggctgaaaatcatcattgtcgccatcattatcagcgttatcaccatcattgccaataattttccttttcttactctgtgcctatcaaaaagaataaaaaaaaacagatgtttaaaataccttgtaaacaaaattttcaaaatcataataaattagatactaacctatttccttgttggaacatcaacatcagcactatcaacttgtttctgcctctttctcggcacctagaatagtaaaacaccaattaaaagtacttttaaaatcccttgtaaatatcataacaagacaattgacaaattttaaaaacagtactgttgcaaatactaacctgttttcttgttttaagattatcctcagcatgaacacttggtttaactctcttgttctgaagttgcatgaaagataaacttttaaagatttgaaaaaaatattataaacacttggttagataatacaaatttttttaaatgctaacctcatttcttcctctgctaactctcttcttatcctattgaaatttggtgtagaggatcgtggagtatgagacttatccttgaaaagataacagaatgtaaaattataaaaaggatactaatcatttttgtaagacttttagagatataaattactgtacttttgatgattcttcagctacttcatcaccaacatcacgttgggtgttttcatcatcacccggatagctcccatactgtgtgtttggctctcggattgaatcttcaaatgattcgttgtcattctgtaacaaaataaaaacaataagtcaatcaaaacacccaacgtgatggtaaacataattagtagactataaaatagcttgtaaagattgtcaattacctcggcttttctttctggtcctccttcttcttcagcctgcgaaaaaaaagagtacattgtaaaggtttactacgtatttaacctttaaaatatattgtaaaacatttcctttcaaatagcttttaaagaaacatttacaattacctctggttgtctttctactccttcatcttcttgttttctttcttcatcttcctcagatctctgattattcttttcctccattctaatgtccaaaatcctctcaatcagctcgactctcttgttaagatcttcaaggattgtcaaaatcctgtcaagcttctcgctatcagatattttgttattgattttgttttgacctacttcttcaagggcagcacaaacatcaacgcatcttgtattccattcagttttcttcaatctgtagcccatcttaacaagttccaaaaccttttggaattctatgtcgtctgtgtggaaatcaggaactaaagacttgaattcttctgggtttccaataattgtattcacttcaatctgcgaagatacaataacattacaaatcttgagaaagcagaacttcaaatctcaaaaccatttaaagaattctgtaaatagacaaaagcttacctcagaaacatcatttacaaggtttacgatcttgaaaaactctggcgtggtagtgcttttccacttcaatatcaatggatattcagattggcattccttatctctaactccatatgctgcaccaaatgctggaactgcgctcaacacccatatggtccgcacgagtccaattcctctcagatcatatttcatcttttgcccaagttttctcgtccattctcagaattgaatttgatagaacactgaatgcttctttccccatggttgggctgtgtacatctcaaaatccgaagcatgctgcaatcttaacacaggtatcttctctctttcaaatggtgtgaatagaa

SEQ ID NO: 21704 - DNA, 1083 bp, Arabidopsis thaliana
tcactcaagtgacatctttcgatctttactgctaccaaagactcactcataacactctgtaacacttaagataactctccccaagcttacactcttacaagtttctctctacccgattacatctctctctttacattgtgtctctctgtcactcttctttaggccgcttgcttgcgacaaccaaccttgtgtgtcttcaagagtacttatacagagacactccttagacctaatgcttctaccaaacgctccttttcgcaatcacaaatggacaaagtgtccttcttggccagcaatgcacaaggctcctccttgtggtcccaaaagcataactcaaccagagattaatatacatttaactctagttagctttctttatttttccttgtatatttgaacatattgttctcatttcaacagtaacaagttctcgaataaatatagttttgaattttgattaatcatccttgaaagtccacttatccaacaagctttaccaaagaggtttatcaaaatcatatgaacctaaaaacaatattagccgtacactcttgtgtccaaaactcaaaactcattctcattggaccacaaacttataaagatgaacaaacccataacaataatttcattacatccattttatatatgtccttatgctccaccataccatcagatcaacaactatatatgatagctgagacaaacaaatgtagtgaaagaatcagcctcataatgcttttagtcataagaaaaaaccagttaaggccaatccaaataataacattacccaatatgcagcactttgaggaacacgcgccaacgggtggggaaattcattggttggcctgtctacaggaagaggacgttagaaaacaggaccaaaaaacacgtcaaggcaggtgcaccgaccttgagattaaaaagcaaagaagtcaactcacgtccaaggcattgtgaaaaaaatatgaattggtactccaagagcttcagcaacatgcacatgtcctgcaattagaaccaaaaccataccatcagcttcataggagtaatgaaaacaacagaattgtgaagtgggtgatggac

SEQ ID NO: 21705 - DNA, 2062 bp, Arabidopsis thaliana
  unsure (1)..(2062): unsure at all n locations
tgcatgattaggatagctttgcatacttattgcatttctgagttgttttcaggtcatttagagctgtttgcgagcaaattggaagaaacgagccagaaacagaagacatactcgacccccaggtcgagtacttntggagccattcttcccacatactcgacccccaggtcgagtgacttttggagccattcttcccatccactagaccaccaggtcgagtaacctcagctcaggccactcgatgacattactcgaccccctagtcgagtatcacttcgccacaccacctgaccacactcgaccattcactctaccccgttactcgaccccttggtcgagtatcatcactcaccaccatcaccatcactcgaccggacactcgatcacgtcttcatagtctactcaaatccacactcaaccagacaagctgagcacaaggaagagaagaggagaagacaaagtgtttggaagcggcctggacctccatcggatcacgaagcccatcgcggcctattatctttctatgggccgagcgattaggttattggcccgtctactatcattttatttcgtattttataaatagatgtcttagggttctgtccagagacatccagtcgacattgagtttttgcttcagttttattttcttatttactctactgcgccgcttttgcttctgcaacctgtaattcgagattttcccaagttattcagattccgcatttgatttcatctgtcatcttgtttctctactctttatctctctacttatgcaatattatcgtttatctgcgtttatgtttgtgagcatgttgtctgagtagtgacttagaattcttaaggatgggatagagtagttgtggaatccgtagtctgtagaatggttaagttctagaattgattgaatccctttaggactagttgcgtttactgcttatttgtttctgatcaactggaattcgatcccaagcattcccgcacccaaaaggtgttcaatggaatgcttgatccactagttcctgagatatgcgtctctatcccaaaggattagccgtttagagcatttattgactttatcagtctgttcttattgcctgcatagttagatttcgttaatgggaattagtctaggctagctttgcttgaggatttctatcacgggagtgaattgatctgttgttgaacctgttgtctagggatagcttgattgcgcttgttaaccatttgaatatgctaggataccactctacttgattaccccatccttaagaatttctcgtctatattatttctctgttttatcgttatcgcttaatcgttctcattgcctgtttcttagtttttgcaattactcgaccaacttactcaaccacacccagtgtctggcaacagactgtgcagtcaagtacagttgtctcatttcctgtctgttactcgaccagtatactcgaccacacccagtgtctggcaacagactgtgcagtcgagtatatctgtttcacatcctgcctgttactcgaccacatcctacttctggcatcagcctgttgtggtcgagtgattttagtgattctgttattgtttctgttttctgcatgttcgcttaggactgttagaaaccccaaaactgttattgcttggcttgacttagtgacttctgatcacatctcatctgtttgcatcacactcatttggattgacaaccttcagtactacaacgacatgatagtgctttaggttcaattgacttaaaaacatattatcaatttggcgccgttgccaattgggtgtttgtttgctatatttgagatttcaaaatacttaagatcatgttcttttccaatttttcttaaagttactaactttgtgtagcatctgtatgtctgtgttgattcaggtactacgaatcaccagcttcaccagttggtactcgttgtatgcaaacacggtcacgatgaaatcagactctcttgttcaacaataacatctaccgtattgcacgctaactcagaacacagacagaaacagacacaatggctgcagttgtagatgagcaagt

SEQ ID NO: 21706 - DNA, 2344 bp, Arabidopsis thaliana
gtattctgtgtgtggcttgtggaagttgacaaacaatatgacttgggaatttgaattagacattgaattgggagcttctttagtgctcattgatgagcacattacctatcacacattggtggatattcttttagaggattttcaaatagattgttcaaccaattctttgaagcttagttacaagctagtcatcgaaacaaaaaataattaagagagaaaaaaaataaaaattgtgaagcagaaaaaaagaaaaaaagagcggcgataatgctctcaggcacactcttcgaggcaaggtttcttctacagatctaggtcgtctcccgcttcagaagttcgaatttgttgtcgtcaaggttcgttttgcttagcttgggtattgtgatactaatccacaactatggcttcgcgaattccgttttctgagaaaggcaaaggaatcgctcccccaaatctccctcctcgtacggtccgtgttaaagtcccggcgtttgataattcagagcagaagaagaagttgtctctgacaatcattgggcgtatgactaatcccaaagtccagagagtttggtctctcattccagtgcttgcagatctgtggaagacagtgatccgtcctgttggcgcagatttaggaaatgggttattccaatttcaattcgcttctgagcaggatctgcaaaaggttctagacaatcaaccctatcactatgcgcattggatggtgattttgcaacgatgggaaccaactacaatgaagtcatttccatctcaaatcccgttctggatttatgtcaaggggattccaatgcatctctggtccgaagaaactttattcagtatttccaaggaattagggcgttttgagaaagcggaaatcactgatacttatgcaaggatgagagtggttatcaatggcctgcaacctatcataaagaactctatcctggatttcgatgatggtgaggaggtagaagcgactcttaactatgacaagcttatgtctcattgtgctgtgtgtggattgttagaccatgaagaaacaaaatgtgggagtaaagaaggactgggtgagaggaaaagcccaagccagagccggtttagcaaagaatctcaagactccaaagcaagaggagatgagaggacaccacagtctagctcaagacaagagatttcgaagtcttcagagtctaggagcagagggttccatggtttggaaaatgatcattatcgaagacgtgatgaaaggactggtttaactagagataagaggcatgcttcaagctacagagttagacggagtttcgaagagactagcagtcagcgttatggacagcctagatcttcgtttgataatgccaaagaggcacggaggcatcaccaaagggacccaaggctagcgggtctcagcaaatccagagataagtctaggtgggagtatagggaaaggccatctccccggaaatctcgcatcaacgtgagagctctcatgttgagtcggtgagaagagagcctatcatagaggataaagaagctgcagattcttctgttaggccccggagaccaccaattgagaggcggtctttgagtaacacagccccaacacctattcctcaagaagcaatggatgttgcactaggagagcttcgagaggtgatggtgcaatatactgcctgcggtgatccatcagagagcgcggcaagaagagaaagagtcagtttgaagaagcagctgagaatatggtaagagcttcaatggtttctgccccgctggcccctcatgatgaggatgagacagagattgttctaagtcaggagcggatacctgtggccctcaggttaggccccttaaatgcacctgcagctccaaggaaagtgaagaagaggtctactgctaggaaaccctcaggaaagaagaagcaaaatcccagcccacttgcaggtgctgctgcctcatctaaaagaagaaagatgcatcaggctcagattaccccaagaaggaagctaattttggataatctcaggagtgatggagagtctagtgagtttcagctggaaactggggggttggaccttgaatccatggggacaggagcagcgttaggtcctcagcaaggcttcgggagtgtagccagaaatgcagtccaaagggggacggattttcggagtccgtcatctctccttccttagcggtggcgagttagaactgccaagggatggggaaccctatgatagttcatcgcattagggagatccgttcaaagatcgaccatgacatcttcttcctcatggagacaaagaatgatgatgagtatgttactaataagttcaatggtttggggtat

SEQ ID NO: 21707 - DNA, 515 bp, Arabidopsis thaliana columbia
cttcttttgcgtccttttcggaattaaaatttgttctcacgtttttatttgaattaaagattgtatcatttggaatattgaggatatgcgataacgaaggggaagattctggcgttgttgtgcccgtaagaaataattgtgacatggcggtttatagatttttgatttattactgttttctttcttcttaataatggttttggtctagtaacatttttctagttcttaaaaaaaattatattttcattaacagaatatattttattccgaaggttaatgcatttggactgtttaataaaagaaaaagagcatcataatctgaatatgtaacaaattaaactagaagttgaaaggaaaaaagataacaagtgaagtggatttagagttagtgcgaagaagggtggggaatcgggtggacagagaacttcatgttgtggttgcagtcgttgtggtctccctgacgaagtaataagtatgaccttacggagaagcaacttgaagcctcttgatgatga

SEQ ID NO: 21708 - DNA, 1948 bp, Arabidopsis thaliana
gaattcaaatggtaagaaataagtactctgtattcatgcacataccagggggtaaattatatggagttagtagcacaagccacgacgaatgattacgagacatgccaaatggattgaacccatcagtacacaacccgagataaacgttacggggttctccactctgctgcatctgaaggatgattcatttcttcctcctttgattggtgctcaacatgccatcgcattgccgcagctatcttatggctctaatacattctcttcaaccggtccccaataggtagataccacatacgactatatggtactttggtacttcgacggtcgtccttaggcttccatctttgtgcgccacaaaatcgatattgatcttctttttcgtcttctttccaaaatagcatacaattgttctgacaaacatcaatcgtatgatatggaagtcctaaattgcgcatcaacttctcggtctggtaatgtgaagtggtagcctggtttccttctggtaaaaaatctataaatatttcgcaaacggagtccaccaacttttcactcatattatactccgccttgttgtgcatgagtcgagatgctaaggataattgcgactgtcctgcaccacaaccatcgtacaaaggattatttgcaccttctaacaagtcgtagaacttatttgaatggttacggaccggttcttccacattctgataactatcatcatgacgatagttatcatcataccccacgttaaattaaatgcatcgttcaccatatccacatatggatcttctacaatattacccacttcttcatgattctcactaaaatacgtcctattcgtgtaactcgttcctatatccttattcatttcttctccatgactaaacaaatgactactaactcttctacccgagatgatgtgtttttcattcttgcatacactacaaggacaatgaaatttacttcgactactttgtactattcgctgactattagcgaatgtcatgaattactcaactcctgcgacgtattcggctgacaaattccccgtcacttcatcaaatctcttgtacatccaatctcgatagaaaccgccagtactgccataattgtagtttcccgccattatacaataaagtaactaatattttttttttctctttgatgttgttgttgttttgatttgttggtgaaagaagagttgcgtgaacgtttattatataggccaatttttgtaactaatttacgactacaactaaataattaggtgtacctacttaccaatgcaaacacgttttccatctaccttatacgactacggtgcaacgtttctacgactacaggccgactaagacgtctaggcgtcctgtaatcgccaaattagcgactaaataaaatagacggtagaatagtcgttaattagcgactaagcaacgacaacattatcccttcaataatataatcgtcaaatagtcgttacttgccgactctttgccgattgcataagatagtcgtaaaacaacgactatgtaactacaatttttcgtgttgtcgcatgcgagtcgtaaatccgtcgccaaaaagtcatataatgttacgactacgtttgttgtcgctgattgtagtcgtcgtttacctgttttcttgtagtgttactagtcttttcgtatgttatgagtcatttcaggtacacttacacatttgggagctatggagcataataaggaattttggaagcttttggaagcttttcagcaatgaagattatcaaagacgtttttcactcgatggtgtcgatcgacacgacacctatgtcgatcgacacccttatttcggctgagggaatttctgttttctgccaagtctttgagaagccctagatgttttcctgatttgcaatgtagtccttgcacgttttagtcaccgaatatatcgtgatcctctgacctcc

SEQ ID NO: 21709 - DNA, 540 bp, Arabidopsis thaliana columbia
cctttctcagtttctctcttccgcgtctctccttctcgttatcctgcaaataagggtttaagtaagaaaaaaaagctagagaagtatctcgatctcttcttctgttagattctgctttcctttgagatttgctagtgtaatcgtaacctccgaagacccaagatggctcgtaatgaagagaaagcacagtcgatgctcaacagattcatcacccagaaagaatctgagaagaagaagccaaaagagcgtcgaccttacctcgcatcagaatgtagagatctagctgaagcagacaaatggagacagcaaattttgagagagatcggtagcaaagtagctgagattcagaacgaaggattaggagagcacagacttcgagatctaaacgatgagattaacaagcttctcagggagagatatcattgggagcggcgaatcgttgagctaggtggtccaattactcgaaacattcggcgaagatgacggatctagaaggtaacataatcgatgtacctaccctagtggtcgtggtcctggtta

SEQ ID NO: 21710 - DNA, 597 bp, Arabidopsis thaliana columbia
tttttggtcatggacagagagctatcttgttgtggactcttgaacccggtgagcgtgatgctttattggctaatgaagctacaaaaagatggacttcaagcaaccaagttcttatggaagttgcttgcacaaggacatcaacgcagctgcttcacgctaggcaagcttaccatgctcgctacaagaagtctcttgaagaggacgttgctcaccacactaccggtgacttcagaaagcttttggtttctcttgttacctcatacaggtacgaaggagatgaagtgaacatgacattggctaagcaagaagctaagctggtccatgagaaaatcaaggacaagcactacaatgatgaggatgttattagaatcttgtccacaagaagcaaagctcagatcaatgctacttttaaccgttaccaagatgatcatggcgaggaaattctcaagagtcttgaggaaggagatgatgatgacaagttccttgcacttttgaggtcaccattcagtgcttgacaagaccagagctttactttgtcgatgttcttcgtcagcaatcacaaaactggaactgatgaaggacactcactagaattgt

SEQ ID NO: 21711 - DNA, 627 bp, Arabidopsis thaliana columbia
cagtcgccacgaaattctcattttacaattctctattacgctgtctcttattcgtgtccgcagaagaaacgagagaagagagagaagcaaaagaccttaccaagaatatttataacacacaaacatctagagacagagatagacatagagagagagcttgtggttgtggttgtgcgagataatatctagagatggggaagaagaagtgcgagttatgttgtggtgtagcgagaatgtattgtgagtcagatcaagcgagtttatgttgggattgtgacggtaaagttcacggagctaattttctggtggcgaaacacatgcgttgtcttctatgtagcgcgtgtcagtcacacacgccttggaaagcttctgggctgaatcttggcccaactgtttctatctgtgagtcttgtttagctcgtaagaagaataacaacagctccctcgccgggagggatcagaatcttaaccaagaagaagagatcattggttgtaacgacggagctgagtcttatgatgaggaaagcgatgaggatgaagaagaagaagaagtggagaatcaggttgttcggctgcggtggagcaagacttctggtggtgagttcgtcgcttcggttagtagtggtg

SEQ ID NO: 21712 - DNA, 344 bp, Arabidopsis thaliana columbia
gcattcaagacacttccgaaagtgtattgattcggcattgtttctgctgctgcggataagaacatcttgagagcttcatgagagaatccattttgtgcaaatccagatatcatagcattccacgatataatctcccggaaagttatatcctcaaaagcgcttcttggcatctgtcagagcctcaaacttggcatacaatgtgatgaaactgttgcctacagatggttctgaaacaaagcctgtcttgatgcatagcccatgaattttaagcccgtctttgatttgctcattgcacttcacggcattggttagtccaacagaagtgagctcgttagggtagactc

SEQ ID NO: 21713 - DNA, 488 bp, Arabidopsis thaliana columbia
  unsure (1)..(488): unsure at all n locations
ctagtaacctccgccagtgtgctgtaaagacgtatgccttcacgatcaccccgaccaataacatccagaatattcgccccgccaatactctgcccgaacagcaccagacgttgtgggtttacatcactgcgatggcgcaccacattgatggcactttgcgtatcgtccagcaatccggcctgggacggcgtgccttttgatttaccaaacccgcgataatcaaacataaaaacgttgaaattacgctcgggtaaccaactgaccagcggccagtgggcggacatatttccggcattgcgtgagcatgaatgatggttgcgatggcgttgtcagcagggcccgtcgaagaagggataaaccagccttgcagacgagtaccgtccttagccgtaaattcgacggattccgccgaccagggatcgggaccgtaaattttatcgtcgggataatagaagaagttgatggcaacctttagagnnnnnnnnnnn

SEQ ID NO: 21714 - DNA, 548 bp, Arabidopsis thaliana columbia
caaaattgtcggtaatattgttatacacacttctttcttccttctaattatattcgtggattagagatcactcaatcccaaaaacaaaaaacacacatttctctctctctctctcgcgatcaaaattgttaaacaatctcttagaagaaattcaaattctctctgtttcaattgcgattcaaatttcaaaaactgacaatggggaaaccaacggggaagaagaagaataataattataccgagatgccaccgacggaatcttccaccaccggcggaggtaagaccggcaaaagcttcgatcgatcagcaaccaaatcattcgacgacgacatgacgatcttcataaatcgagcattggagctaaaagaagaaggcaacaaattattccagaaacgcgattacgaaggagcaatgtttaggtatgataaagccgttaagctattacctagagatcatggagatgtagcttatttgagaacaagtatggcttcttgttacatgcatatgggattaggagaatatcctaatgcgattaacgaatgtaattt

SEQ ID NO: 21715 - DNA, 648 bp, Arabidopsis thaliana columbia
atgtgtttccgtgcaaagttcaggttaataacaaaaaagtgtttggaaatcattcgtttcgacctaaccagagagaaattatcaatgcaacaatgagtggctctgatgtttttgttttgatgccaactggaggagggaagagtttgacatatcaggtcactagacttaaacctgtacattataatttcactttgattcttcaatctaattcttgtttttcactgagatatttgtataatcctacatcaaaaatgatgaaagtttcaagttattttctcgaaactgttttctaacatctttctttggcagctccccgctctgatctgtggaggaataacattagtaatttctccacttgtgtctcttattcaagaccagataatgaacctattgcaggtgaacactgcagctaccccggcgattctatatatatcttctattcaattataaattattctcagtggattcttttcatctcacacttggatatctgaatcatggttacaggccaatataccagctgcttccctaagtgccgggatggaatgggctgacaactaaagactttcaggagctgaattccgagcatctaagtacaagttgctatatgcacacctgaaaaagtagccaagtgagtgtattttatat

SEQ ID NO: 21716 - DNA, 588 bp, Arabidopsis thaliana columbia
  unsure (1)..(588): unsure at all n locations
gtcctcaaaacacaagatgacttgattggtgtggtaactacgattgcatgggtcacctcaggtcaccatgcagctgtaaactttggacagtacggatatggaggatactttcccaaccgaccaacgacaacaaggataagaatgccaacggaagatccgacagatgaagccttaaaagagttctatgagtcgccagaaaaagtgttgcttaagacatacccatcgcagaaacaggcgaccctagtgatggtcacgttggatcttttatcaacacattcacctgacgaagagtacattggagaacaacaagaagcatcttgggccaatgagcctgttatcaatgctgcatttgaaagattcaaaggcaagctccaatatctagaaggagtgatagatgagagaaacgtgaacattactctaaagaatagagctggagctggtgttgttaagtatgagcttttgaagcctacctctgagcatggtgttacggaatgggtgtccttatagtattctatttgatntatgcattttcttctcaaaaatgctttcattaattttctgtatctctgtcttcttgataaaatgaat

SEQ ID NO: 21717 - DNA, 494 bp, Arabidopsis thaliana columbia
caggtcgatcgactcgagagggttgtgtcgttcagtaggaaggacagaaaatctccatgcctgagacagtacttctgccagttccgaggtcttgccacagcaacttcagcaattgtagaaagcgacttcacaatctttacacttctttcatatgaaacattgttttcaaaaccaccagacttttcaacatgcttgtataggtttttcacttcattggaaaactgccatgaatctctgacactgtagtattgagttttgcttccgcaaagatgcaaaaacagccttctagcatatctcctaacaaaagccgtatgagggttatttatatagctgcatagaacatcctggaaaccgtccagctttaaatctttagaagaagcattcctgtataccttttccttttcccccattttctcttgtttttcaggtctaactaaggtatatactaagcgaaacacattctcaagtagcagcctgtgatagtcacaaaaata

SEQ ID NO: 21718 - DNA, 455 bp, Arabidopsis thaliana columbia
gtttggatggtctagtttccgcaagatgttgatttctctagccatgaatctcacgctttccggatccatattaacgaacctgaccttcttcattgctaccattttaccggtctcaagatcccgggctctgtacacgctactgtaagtcccttgtccaatctgttaaaagagacaacacaatagaaacgttatagcaatcaagaaacattaaaaatagtaacaaagagagtataaggaactaactttgtccagcttctcaaaagactctgctcgtcgtggacccaacctttgatggcttcacctgcaacagaagttaaccaagaaggccatccagctgcaataagctcggcctcagggctatgtggaacacttgtgggaatattactcggtggaaaaatattgaatcctcctcctcctgttccaatatctgcagttggccatctcctgtgacacct

SEQ ID NO: 21719 - DNA, 481 bp, Arabidopsis thaliana columbia
tgttttggttttgctttacatagaatccgatctttggataaagcgttccatcctttgcaagtggatctcactgctcctagggaagttatcggaaccctagacaatatctctttcaccaaatcctgcgtaagatcgaacatcatcgtcattattttcttagtatgtagaaattagggttttcaactctttagctagcccactcttttctacgattattaatataggtttctacaagttattattttattttttttggtagtaattaacgtaaacaagtgtcgggccctttttaataactttcactaagataaataatatgcggtttctaatcttcgggaaatgttaaatatacaaaaaaataaaaaggacatgtttcctcactaatggaaattccgtatgtgaaagtattctctttctgtatttagttttttattttggatcaaaacctgctctatatttctattattaactttctacgaca

SEQ ID NO: 21720 - DNA, 494 bp, Arabidopsis thaliana columbia
atgactcgcagcaaattgctggtttgattgctctgagttccatagatcaggatgatgcgagacacacttttggacattctggaggtaatgctatataaattggtaccatacaataaactcttagctttttttctgcatatggaaggccttatatgtcttgtggttgaaattctttttgaataggttacatgtgcccgtttgttcccctcctacctatcatctgcattctcatcaacatgtaccttttggttaaccttgggttagtatctctttcacttacttgcgactttcatttaccgtttattttctctagtttccacagctatttttataacggaatctaacttcaagacgctgtttaaccttaaccatttaggtttaaagactgagtttgtaaagcttgtataggattatgatgaacaaatttgttggtgtagataggagaagagagcacaagtttatgtggatctgtgtcagttggtgatagttggtgt

SEQ ID NO: 21721 - DNA, 569 bp, Arabidopsis thaliana columbia
  unsure (1)..(569): unsure at all n locations
aaataaacaaagagtgggtcattatagtctctctctacgaccccaaaacggttagtcacgtcatgattaagaccagcactattaaaccacattttaaattaaagaaaaccataaactcggtgctgactcagtgaggtaataaacttaaacccttgagattgaagaagatgagagagcttaccgtgaatgagattgaataagctgccattaggatgataatcgtagatgataagtctctctccgttggactgaaaataagatctaatcggaacaagattggtatgtctaagtccaccaacaatctccatatgattctcaaacgcttcttcactcgtcactgccgttttagcagcgtctagtctcttcaccgtcacaataagctgattatcaagaaccgctttatacgtaatccctactgatcctcttcctaataactccgctgaagctctcattagctgctccattgtgtacattccttgacttctagattctccacagaaaacaagattccactatttggtatcgctgctctgtttcttgaaattgaactctntttctcgcttttgaga

SEQ ID NO: 21722 - DNA, 644 bp, Arabidopsis thaliana columbia
tgaaaacccaaccattgcctgaaagacatgagggaaacccatctgcaagtaatttagagtcatggctctagtcacactcactgacttctcatgcttacttttctcttcttctgcttttccttttagcatctcaacctttactctcttctctatcaccgggttctttttcctactctcaggtaccgagtatggactatacttgctctcaagcgctctcagcgaacgcgatttcttctcgaaatcttttaacatggattctgttctcttcttttgcttatgctcgtcggcttgttgagccacaattccatggactgctgtcagaaagcttttgatcccttcagatgctactttatcagggatcctgtcaatagctaaatgccattcctcgcagaagctgtagatctttgactcgtagctactcctaacaagtggattcttgctgaactggaacagacttaacctgagccagcccgtgagagattgtatgtagtcacgttgggccttgaccaagttgcagaaagagtgatgcattgttggactcgagctcaagctgaagagttgattgtcggtgagctcagatgttggtcagtggaggggatggtgttaaggtacttagctgctgacaatatgggtttgaactggtg

SEQ ID NO: 21723 - DNA, 580 bp, Arabidopsis thaliana columbia
ctccaacttttgtttggaatcagaaagggagcggaggtcagcctcaagggaagaaaacttgcccttccaggtgcagatgtcttgctccctactaagcagcagtccttcatagtgctcaaccatgtcgttgagttcgctgtttgcttggcatcgagtataaaatccggaaaagcaagttagtacataaaggaatatcacgattagaaaaatagaaatgaaactaacctgagatgaatggtaggcatgaagtaaaaagcgtttgtggattgtaggacgccatctatcaaagttcggcaagatcgcgtccttttgggtcttgaaacatcggaaaacgttaccctctgtttccatagctgacaaagagagaagggatcaagggttattcaggccgcgaacaacgcagaagttagaccaggaaacttgtttaccaaacatgaaagcgacttggcttgagacacaagaacgattctttgactttggaggagtatctcgtgacttagaaccttcctgtcgaggagtcaacgtcggtcagtcttctcgcactaagtcgaggagggggagatgtgccacaggaagggga

SEQ ID NO: 21724 - DNA, 546 bp, Arabidopsis thaliana columbia
gggatgttgtgatgatccaatgcgtgacaacaggcactcacaaaagaagcccgttccgaatcttcaagttgagtagcattacagagacgaaggagtcttctcacgaggtggtagggtgggagacagtgcattctttcgaggacgaggagtcgttggtttgggatttgagcgtcactttaccaaccaaaggcgtatccggaatcaagaaagattccatatattactgtcacacttctctatcatcatctattcgggaaacatgtgcttatgagattcctacgcacaagatcactgcatatgacattcctaagcaggatatcaaacctattcgacaccgcggcatcttgattggagaggctcgttggttcgttccattgtttcggtgctggtgaataatcctctgcactataattaggacaaggcttttcaccaatcaaccatgttttgttagttttggatccattttggctttttgttttcgatgtgttagtagactttagataaatctgatttccatatataataaatgtattcttcgttgaggaa

SEQ ID NO: 21725 - DNA, 585 bp, Arabidopsis thaliana columbia
ctccaagctctctcctcagaaatattacgatctctgtagattccatcgccaaagaactttgaatctctcgattcatgcttgtgttgaccagtttctaattatttttccttctaatttagatatgagagctttcgatcaattgaggcagctggagattttctttaaggatgagagtaggcatggattacctgttgttgatttgtatgaacttgttcaacatgccggcaacatattgcccagaatgtaagctgattcatcattgagctagtttctattcctcttgatctgataaagatctaatactctcaatcctctagctatatagcctagattagactagaaaatggcaatctcctcctatattaatgtttctcttgggctgcattgattaccaggtatctgctatgtacggtcgggtctgtttatatcaaaagtaagcaggctctttcgaaggatgtacttaaggatcttgtggaaatgtgtcgaggtgtcaacatcctattcgtggcctctttttgaggagttactcgctcaagtgagcagggataagttacctgagattggctcagactacgaagggtgggt

SEQ ID NO: 21726 - DNA, 579 bp, Arabidopsis thaliana columbia
agtgtgctttaaagcagcttgctgtgcggaaccgcataccagtttcgcatcttcaccggcttcgtcggtcattttcagaacgccaaccggacggcaacggatcacagaacccggctgcagcgggtacggagttgggaccagtacgtcaaccgggtcaccgtccagagacagggtgtggttgatgtaaccgtagttgcatggatagaacatcgcggtggacatgaagcggtcaacgaacagtgcgccgctctctttgtcgatttcgtatttgatcggatctgcgttacgcgggatctcaataacaacgtagatgtcttccggcagatctttacccgcacgtacgttgagtaagctcatgtctgtttcctttaaaaatatgtggcaaacaagtgccgagtattatagccaactcgcgccgaatgtcttcgcttgttttcgtcttcattttcctttttcaccagttttaagacggtatacagagcaggaaaatccataaccgtagccgcatttttcatagtgagatgatagcgattacacacttgtgattaacgttttatttacttttctgaagtgtgatgt

SEQ ID NO: 21727 - DNA, 446 bp, Arabidopsis thaliana columbia
gccagtgtgctctaaatagaaagtgatgattcattcacgcagtttcattttcatgttgcagtttgtccaactaccttgaaaagaatatgcagacaacacgggataacacgatggccttcccggaagatcaagaaagtggggcattcattaaagaaactccaacttgttatagactctgttcaaggtgttcaaggttctattcaacttgattcattctatacaagtttcccagaattaagctccccacatatgtctggtactggcacttccttcaagaatccgaatgctcaaacggagaacggtgtttcagcacagggaactgctgcagctccaaagtcagcatcatcatcttcttgtagccacagctctggttcaagcacctgttgttcaactggagctaatcaaagtaccaatactgggactacctcaaatactgtaaccactct

SEQ ID NO: 21728 - DNA, 543 bp, Arabidopsis thaliana columbia
taagctttctccggagagaaatcctccgtcaaactcgtctttatgagtgtgtaggccacgtcggtttgagctactttctcgatgaggtcagagatagtcaatggctgagattttgcgaaaagattgccgaaaaacgaagtaatcccgtcgagcacgttgtatgtggacccgctgatggtgccgtcgtagactatcgccacgtggcttacgccggctagctcagctgcttggaccacgagcaatgcgtctgaggtcgaaacttgggcgtccggaccattctctgttgccccgaccgtaacaacaactttggttgcgtttcaatcgcttttgctattgattcagcgtcttggaagggggattgaactgcgtttagcctcttgacttcatcatttgataaaatctgttgaaaagctgatcgtcaaaccataaatcaaagctctaaacgccaccaaattctgtaatcacacgttaatgtgaattattacgagtgacacactgacatacagtacttacataacattacatgcgaagttagagcaatta

SEQ ID NO: 21729 - DNA, 617 bp, Arabidopsis thaliana columbia
  unsure (1)..(617): unsure at all n locations
nnnnnnnnnnnnnnnnnnnnnnnnnnnnctaaagagcattggcgacatcaacgtagcaaatgacctgccgttcgtactgtttggcggtatgaacgtgttggaatctcgcgatctggcgatgcgcatttgcgagcactacgtaactgtgacccagaaactgggtatcccttacgtgttcaaagcctcttttgacaaagccaaccgctcctccatccactcttatcgtggaccgggcctggaagaagggatgaaaatcttccaggagttgaagcagacttttggcgtgaaaattatcaccgacgttcacgaaccaagtcaggcacagcccgttgctgatgtcgtggatgtgattcagttgccggcgtttcttgctcgccagactgacctggttgaagccatggcgaaaaccggtgcggtaattaacgtcaagaaaccacagtttgtcagcccgggacagatgggtaatatcgttgataaattcaaagaaggcggcaacgaaaaagtgattctttgcgatcgcggtgctaacttcggctatgacaacctggttgtcgatatgctgggcttcagcattatgaagaaagtgtctggtactcgccggtgatttcgacgtgacc

SEQ ID NO: 21730 - DNA, 566 bp, Arabidopsis thaliana
gtccaatgaaaaccgtggttatgtactgcgtcgtatcattcgtcgcgcagtgcgtcacggtaatatgctcggcgcgaaagaaaccttcttctacaaactggttggtccgctgatcgacgttatgggctctgcgggtgaagacctgaaacgccagcaggcgcaggttgagcaggtgctgaagactgaagaagagcagtttgctcgtactctggagcgcggtctggcgttgctggatgaagagctggcaaaactttctggtgatacgctggatggtgaaactgctttccgtctgtacgacacctatggcttcccggttgacctgacggctgatgtttgtcgtgagcgcaacatcaaagttgacgaagctggttttgaagctgcaatggaagagcagcgtcgtcgcgcgcgcgaagccagcggctttggtgccgattacaacgcaatgatccgtgttgacagtgcatctgaatttaaaggctatgaccatctggaactgaacggcaaagtgactgcgctgtttgttgatggtaaagcggttgatgccacaatgcaggccaggaagctgt

SEQ ID NO: 21731 - DNA, 560 bp, Arabidopsis thaliana
ctaatcctaaccttattgatcggaaagcaaacataggttctttaaaggatggatcaacaatggaaagaaaaaaaacctaaccatcgcccttcttagatagttacacaatgaaatagaggtagaagtgtgattacctgaaatcgtctatcacggccctgtttcgcactgccaccagcagaatctccttcaactataaaaatttctgcagagattgcaaagggatgtcactacttgaccgaattagcatggctaatggcttaccggttgtaatcgttgtagccacataattaaagcctagatttccatttttaacttctcacttggaatatacaataagaagatcagatacttctgtcatgtttagctttaatcaattaaacaaacgacattttcatgatggccaatacataccagatacttcaggatctgttgatgagcaatcagccagtttcccaggaagtgatgatgacttcaaaacgcttttcagcctgaccaactcccttgccctcttggcagccaaagcagcatagagagagaaagcgtggtgaggcagatgaaag

SEQ ID NO: 21732 - DNA, 473 bp, Arabidopsis thaliana columbia
gtaggatccccttaaatctataggaataataagaaaagggaacaaataaaaccaattatccagtctccaaataagcgtgcaaggctaaacaattgtaagaaaaaataaaaagaagccaaaaaccaattactaagtaacaatttcacgaaggcaagctttgcagcaagcataccaatgcaaggggcttcttccatcattatcaggcacgtcaggatcagcattccactttgagacaacgtgacaaagaaaagcagtctggccatactgtgcggcaacatgtgttgcctacaagcagttcaaaattaagtattaacatacacccattgagaactaaacaagaaaagaagggaaatttgatagaagtcagcagagaacatggacgcgtagttaaagaagagatatgaacctgatagccatacatatccgttgcatctactcttgcaccctcttgtaataacagttctgcaacttgt

SEQ ID NO: 21733 - DNA, 507 bp, Arabidopsis thaliana
gaagagttggattcgccaaagctgcttaaacaatatctcttctttaataccctcgttttttatatgatgtttgtgaatgtgtttgtaataacttaaaacatattgctatcctagaatggtatcatcttaatacagatttttatttggtttcagagctgtttgatttgctttaacttacagagtactaagtgatcataatgagtcccaaggcttgagttctctgtcacgatccatgtgtttcctaatcacttagcctttgccaaagctagtgtcattgacctcgctcgcagggttaggaaaattcccctgaaaaaacaaaagaagaagaatgtggagattacaaacaagtttcagttgagtaacaacaacaagaactagctgcagcaaatgattcattgtcttaccaaaagaatgcgaccaggctgtgcaagatgacccggaagtgcagtggcacatacttgtagttaatccatcccaccaccgggaaaaactgtgattgatatatag

SEQ ID NO: 21734 - DNA, 2327 bp, Arabidopsis thaliana
cttcggaaaactggggatgtaactcttggaaatatctccactctgctgcatctgaaggatgattcatttctccctcctttgattggtgctcagcatgccaatcgcattgccgcagctgtcttatggctctgaaacattctcttcaaccggtccccaataggtagataccacatacgactatatggtactttggttcttcgacggtcgtcctcaggcttccatcttttcgcgccacaaaatcgacattgatcttctttttcgtcttctttccaaaatagcatacaattgttctgacaaacatcaatcgtatgatatggaagtcactaaattgcgcattaacttctcggtctggtaatgtgaagtggtagcctggttttcttctggtaaaaaatctgtaaacatttcgcaaacggagtccaccaacttttcactcatattatactccgctttgttgtgcatgagtcgagatgctaatgataactgcgactgcccttcacgacaaccattgtacaatggattatttgcaccttctaacaagtcgtagaacttatttgaatggttacggaccggctcttgcacattctgataactaccatcatgatgatagttatcatcatgacccacgttatcatcataccccacgttaaaattaaatgcatcgttcaccatatccacatatggatcttctacaacattacccacttcttcatgattctcactaaaatacgtcctatccgtgtaactagttccgatatccatattcaattcttctccatgcttataccaaacataataatcaggcataaatccttgactaaacaaatgactactaactcttctatccgagatgatgtgtttttcattcttgcatacactacaaggacaatgaaatttacctcgacaactctgtactataggctgactattagcgaatgtcatgaattcctcaactcctgcgacgtattcggctgacaaattccccgtcacttcattgaatctcttgtacatccaatctcgatagaaaccgccactaccgccataattgtagtttcccgccattatagaataaactaaatttccattgttttcttttttttttcttttgattgttgttttgatttgtttgtgaaagaagagtgtcgtgaattttgattatatagacgaatttttatgactaatttacgactacaacaaacaaattaggtgtacctacttcgcaatgcggaaaacgttttccaacaacttaatgcgactattctgcgactcagttgcgacaattgtacgatttcagacatgtgtcgtattttagtcgccgattgggcgactaacttccgcagtcggaaactgtagtcgtccatttgcgactatgtaacaacaaacgtttttcttatataatataatcgttaaatagttgttactatacgagtatttgccgactaacatatttagtcgtaaaataacgactaattgactactaatgttcatgttgtcgtatatgcgtcgtaaaacggtcgtgacgtagtcgtcaaaaacgacgactacatttgttgtcgctttctgtagtcgttgtttatctgttttcttgtagtgataataatacatggattaacaatttcttttatgtacatggatttcaactctatagttttatgattgttttcaaattcaaaatcggtaataataatacttggtaccatcttcattaagttttatgattgttttcaaactcaaaatcaataggtaataagtggattagcttatgttatttatactttattatccaccacaattttgaagtgagatttataacaaaccgtttcaagatgataactctaacattgaacttaatcacactctagaactagcaataaacgacacttgaaacattttatttgggttaacaaaaccaaactgtaattataccatattaaattctataagtttttaaatcaaaatcgaataagaattattggctaatatcatttatatattattctatatcttatttcgtgaattctatcattatataaaaagatacatttttcagtaacgttaaattcaatgaaaacgattgtacatgttttatctcaaacgtttgtgttagttatggaaagactacatgattgtaacgtaaagttgctttctttctttttttttgtcttgcaaatgccaaaataccaccgaatggtagagccactggacaagagagactcggcaatgttcattgatctaatttatgagtttacatagttttaaacttaattgttaatgtttatatatatattgaacataattactttttcatttgatacagacttgcgtcacaa

SEQ ID NO: 21735 - DNA, 608 bp, Arabidopsis thaliana
tctagtaacggccgccagtggccagtgtgctctaaagtcccgaaaaatgtagcatcaaactttgatatatcttctcgaatgaagtgtcctcctgtggcatttgtctgaaaagaaatgaatcaatttagcacatactcttcttgaaccatcaagcgccgcttactgttccagacctggtccctgtcgggtcttggaaggccttcatgttgaaccgtgtcccaggccctggtgtccatcccgagcgaccagatttcagcatatcccaaagcccagaaacgtctgttgcgcttcctgatagtcgacatcctataccaataactgcgattggctccagtgagccggggccagcccttgtgctgcgctcatcagatgtattgctatcattgtcgctgagtatagaccacggcgaggaagaaagcctctcactgtctgactcgctatcagcgatctcaacacgggacctggatgcaggactcatggctgtagaaattaggaggtacggctaatcgttgaccgtctgaatagcatggggtatcgtgatcaagatacgggatgtttgaagaaagatacaaggccagcgttaagtacagcacgcaataccagggacg

SEQ ID NO: 21736 - DNA, 456 bp, Arabidopsis thaliana columbia
cttctctctttcctcagtcttcgttctctgtattctaatcagaagtgctctgcttacaaggtcacgggttcgaagctccaacatttataaagtgtacataattaaatgtttctcataaagtgtttcttatttaacaaagaagcaaatttcatttatcaacatttgacaaaatcttcttaaaggttttgatttttcggtgcaaaacggtaaactacaactccgattctagcaccttcttgaggatcatcacaatgtataacatcaacatcgaagaatctccgagctttcatgacaaaaatcgattctatcttccatctcttgaggtgagccataagaaacactctctcggatgatccttctaagagcagaatacgcagcgttttgaggagaggttcataacgatgaacgtgataaaccacgtcagacgctagaatcaagtcaacgttttgaccaaac

SEQ ID NO: 21737 - DNA, 525 bp, Arabidopsis thaliana
ggatccccatgtgtggaattgtttttgggaaatgagttgagttggggattctctaacatttgattctgtctgtgagaacattgctgaatatctgtgttggtattttcattgtgtttcaggatcttaacggacgtctactaactgtaaacaaggcagctccaagaggatcacgtccagaacgtgcgcctcgggtatatgaacctgcattcagagtatatgtagggaatctaccatgggatgtggacaatggccgtctagaacaggttttcagtgagcatggtaaagttgtggaagctagggtggtttacgaccgtgagacaggtcgttcacgtggattcgggtttgtcacaatgtctgacgtggatgaactcaacgaagccatctctgccctcgatggacaggtacctactcttcctcatatatggttatgctaatgcagtcaacatgattttgtgatgtactcttaatcgcctttcattgtctcttgattacagaacttggagggtagacaatcagagtgaatgt

SEQ ID NO: 21738 - DNA, 1773 bp, Arabidopsis thaliana
cctaacgaccatggatgtagatgccgacgcaaccgacacgccatatatcgaagtagacttggaaccttcagcaaaccgacacgtctacatcgccgactttgtaatctagctcccgttagcaaacctggatggaaccaactctaataagaaatggctcctccacgtcgacggctcctccaaccgacaatgacaaaagtaggaatacaactcacctcccccactggggaagtcatcgaacaatcgttccgactcagattcaacgcatcaaacaacgagtttgagtacgaagccctcattgctggcattaagctagcccaaggaatggggatccgcgatatacacgcccatagcgactcccaactcatcaccagccagttccacggggaatatgaagctaaagacaagcgcatggaagcgtacctcgaactggtcaaaaccttgacccaacagttcgaatcatttgaattaactaggatccccagaggagaaaacacctctacagacgccttggcagctctcgcttctacgtcagatcctttcgtcaatagaattatcccgctcgaaggaatagaacacacgagcatcgacctaacggtcaaacatgctgggagggaaaccttggcaacttacaacttcacgcgagtaacccgaagcaccactgccgcagccagagctctcgcagcagctgcggaggcaagtgcaacggaggaggagccagagcttgaaacccccgaacaacctgccccgtacaaacctgaaccctagaacgactggagaatcccaatcatcgattacatcgaaagagggatcacacctcccgacaagtgggagaccagaaaactcaaagcccagagtgcaaggtattgcatcatggaagggagacttatgaaacgtagtgtcgcaggtccctatatggtgtgtacctacgggcaacaaataaaagacctcatgaaaagcatgcacgaaggacaacgtagcgtcgcaggtccctatatggtgtggacgtaccctcgccctcagattcaaaaagcaaggctacttctggccaacaatgctagcagattgcatagctcactcactcatgtgcgataagtgccaacgacacgcacctattctgcatcaacctcccgaggaaatatcctcgatatcttctccttacccgttcatgaagtggtccatggacgtcttaggtcccatggaagcttccggtgggaagtagagactaaaaaacctgctggtcctcaccgactactctaccaaatggattgaggctaaagccttccaacaggtaaccaagaaacaagttgaggacttcttgttggaaaatatcgtatgccgtcatggcataccatatgagatcgttaccgataatgggactaaccttactccggaaaaatcaaagcattctgtgacaagtggaagatccgtcttaccacgtctacccccaatacccacaaggtaacggacaggcagaagccgccaacaaagcgatacttaacaacatcaagaaaagacttgattccaaaaaatcaatgtggtcagacgtacttcacggagttctctgggcctaccgaactacacctcgcaaatcaacgcaagaaacaccgttctctctcgcctatggtttagaagaagtaatcctcgtcgaaaccatagtaccaagcgtgagaaggaccgccagtcctgctaactcagacctgtacacgcaaatgttacagtacaacatggacttcatcgatgaacgcagagatcatgcagtgatccgagttcaaa

SEQ ID NO: 21739 - DNA, 3020 bp, Arabidopsis thaliana
tgtaagcgagctgtttcatacttggccagatgaagtaaaagacccaacacttgatcacttgatcgaagacatacatgaggattagtttgttagaggttattgggatgtgaagaagaatgagaagaagaagaaaagcgtaaaagataaagcagcggctgtaacgcccccgaatcgctctatggccgaacaagataagggcaacctagaaacactacattgatagctcacacagacaacccaatttaggttccaaatagatttagacccttagcaggattacccacatgaaccatctctcacgaacgcggtttaggcttttcaacccttgccatgatcgtgagttgtgttagcccggacaagactaatatcgaatgaaacactctttatacaaaaataatcttttaaaacatataaattctcgtacaaccaagtatccaaaacttttttacaatggcgcctcgagcctatacgctcaaatccaacaagaaccaaaatcattaagttttgcaaaagcaacaaactctatacggcctttcctacgtcatgagcatccctctaatggttcccacgagggttttctacaaaacaaaaatggtgtgataagttatctaagattacttagtgagctcagtctacctacaatagatattagttccccatcccgaaacacgcaacagagaataacaacaaaatgtagattgccaaagcacctaccaaatacatgcacatgcaattaagactccagttttattaagttttatagggtctgatatgctgccttcaaacacccccacaccaaaaacacaaactcccgggatctcccgctttacaaccacaaaggcatgtagacaactcggccagggtagctagccccgtctctccgagcccttcgcactacatggcgatcaagtaacatcattacaagaccccacgatagcacggttcattaacgaagtcagacataccatgatcttgatacgcttatggtttctgtctcctaccacgagcaccacacatcaagacccaatatttcaagatattatgagacatatggttactcaaacacatagaatcatcaatatccttacttaccacaacctcccaaccataagccttaagcataagaaactaaaagatctcatatgcggcttactaccatcattcacaccattaagcaatactcatataattcatgaaataaatcaatgaatacaagagtatatatgatcatgcaacaaacaagtaatcaatcacccaaataaacactcaaacctatcatgtgccatatcacacgcttcgagactcatagagattcggctgaaggtttaaggttagcttcaacgattcttggtcgcggacagggatttctcatttacaaacaggttctcttgatcacaaacatgaattccttagttgggggcaaaggatcttcatcacgggcaaagtttctcaatcgcgggaagttttttctcggttataggtgatcacttaacaacttggcagccttttgtttccctctctttttcctctcaaaattatttgggtcgagttgtgtttatataggggcgacaagggtgagtcagcatatacacgtgtcattcgcaagggcgagtcagcagtccacgtgtcatccgcctatgatgacacgctcgccgccttaacggttgggcgacacgtggcagcaaaactttggctccacgcaactcaaattcggctccaagcaactttgcttgagccccaagttagccggtccatgcgtccatggcgtggtcaaagggcggttaacgcccggcagcgagacttcgcctacgacacgcccgtgttgccgaatcttgcccattcttgcccacctttgcccattcttgctcaaatagttatttgttttgccctttgattgtttatcagcttttgggcacatatggtcaatcaaccatgtattcgaggcaactttctcccgttttggctttgccccggatgatcctatttcgaactagactcggcatgttcattttttccttgcccatctctttggcttttgtcccttaactattcttttctcttctggttcttcctcgatcattcctagatgtttccacgtggccgcttacccctctacgagggtcactacaacggatgtgtttgaatctccctctaagaagcagaaagtctctcacagtgaggtgttcaatctggtggaggaaatgcacaaaagaagaagaagaagaagaagaagatagtagatggttaatctgatgaggacgaggacgaggaggatgttcgggaagacgtgtcgttcgtggatgtggtgtctaaattaatctctcccttaaactcaaggtttgacactgttgatacaagcatcaaagaaatttcctcctgtctggaggtgattggagatcaagtagaaccgaggatggatgcaaagtttgaaaagcaggtttggatctattgagaatgaggtcaaacagatgaaatagcatcttaaggccattgggggaggccttagtggccaaactggcaaagcggacttagaattattctctagagtcaaaattagagatatgtttttaacagctgaggagcaagaaatgattcgacccaaaaaaaaaaaaaaaaaaaaaggtccacggaaatctccaaataactactctgttactaatcctcttccggtaagctaactgctgagttatcaatacgctatttacttacaattgagttataatcatgttatggttgagttatcgttatgttattaagttacgactgagttacatttatgtttttcggttgggttgtctttacctactttacttttgggtaagttataactttttatttagttacggctgagttatcgttatgttatacggctgagttgtctttatcttacttacttttggctgagttaacattatcttatttagttacgacagagttatcgttatacatatgactgagttatctaatatatccctatttttaccggttttaactatgttttaggtatatgttttagagtc

SEQ ID NO: 21740 - DNA, 2124 bp, Arabidopsis thaliana
catgacgaatgttaactatagtgcatggcctgttttgctactcaactacaacatgccacctgacaagtgtatgaaagaggagaatatcatgttgaaattgctgattcttggtccaaaccaacctgaaaacaatatagatgtgtatctagaaccgctaatagatgatctcaaccatctctgggaaaagggagagttaacttatgatgcattcagtcacacaacattcacgttaaaagcaatgcttctctggaccatacaggattttcctacatatggaaatctagcaggctgcaaagtcaaaggcaaaatgggttgtccagtatgcgggaagcaaacagatagtttgtggttgagtaactgcagaaagcacgtgtatatgtctcatcggaagtctctgtcacccacacatgtttataggccaaagaaagcgtggtttgatagtaaagctgagcatggaagaagaggtaggattctgactggtcataacatatatcaactgataataagttttaagtcaattatcctaaaacaccaatcatgtcgttgtagtattttaggttgtcaatccaaatgggtgtgatgctaacaatcaagatgtgatcagaagtcactaagtcaagccaagcaataacaggttttggtgcgttcaaacagtcctaagtgaacatgcagaaaacagaaaatcaagcagaaacaaataaacactcgaccaacacagctctttgcagagcactgggtgtggtcgagtgataggtcgagtaacagacagataatgtaacagcgatactcgactgcatagtctgttgccagacaactgggtggtcgagtatgaggtcgagtaacagtaaagaattggagaaactaagcaacagatgacaggatgtagtacacaacagtagagtaaacaataaaatcaatcagataaagaattcctaaggatggggtaattgagtagttttgtttcctcaatttacaggtgattgacatgctcaataaattatccctagacaacaagttcgataaccaaatctaagtgccaccgcaacagagactctcaagttaaaccaatctcatactcaatcaccattgacgagagctaacctaataggcattacgaatcaacaagttaaagccaaaacgctccctgcaaccaataccttggtacagagccacaaatctctgtaattagtggttcaaacatttcatcgaacaccttttgggcgcggaaatgtctgggctcaaattccagttgatcagaaagcaataggcattaagaacaactaacccagaagggatctaatactcaaaacgatgcagtattgggacgaattaagaatggtactcgacctaggtggtcgagtgatgagctggaggtgatgtaggtactcgaccatgtggtcgagtagtgtgatcgagtgaagttgatgtggtggacgtcatgatactcgaccagggggtcgagtgatgtgatcgagtggttgtcttggtggtactcgaccagggggtcgagtggtgatgtgaagtgatgaggccatctactcgaccagggggtcgagtggtttgttgaagtcgtggaaccatctactctaccagggggtcgagtgttttgcagtgatcaggtccgcttcttccaattagctcgccaacagctccaaatcacctaaaaacaacacaaatatgcatcatacatgcaaaactatcctaaacatgcaaagtgatgacaaatgatgagaaatggtataaatcagtggtgatatgatgcaatagtgataacaaatggatgttcacaatatgtaaaatgcacacttatcaactcgcccaaacttagtctttgcttgccctcaggcaaacaattaagaacaagctggaggtgaggtttgaaagcggggactcagagccaaagcaccagataaactcagatgaaatcattgtgcaagttgatagatctaagctgcgacattatcgaattctactcgcgaaacgttagccatgcattattatcaagcaatccgactcttatgctcgacctacacatgttctcaaatctaccaatccttgtaacatgaattagttctggaatgtgaatcaagcaatgcatcgtcaatgaactcagttggataaggt

SEQ ID NO: 21741 - DNA, 754 bp, Arabidopsis thaliana
ctaaagagccattatgctttcccccaatctttacgtggatcaaaagacgactgggcgtctgccagttgctgccacagcgcggcagtgttttcatccggtttcggcggcatcacgattttcagtaccgcatacagatcgccggtctgttttttgctcaccagacctttgcctttaacgcgcaatcgttgcccggcctggctgcctggcgggatagtcagcaaaatgctttctttcagtgttggaacggtgactttagcacccagcgccgcttcccacgggctaaccggcaccacaatttccagatcctggccgacaatatcaaacagcggatgtggcgcaatatgaatcaccagccacaaatcgccatttggaccgccgttttcgcccggcgtcccctggcctttcagacggatgcgttgaccattgccgacgcccgccgggatcttcacattcagcgttttcggaatttcctgttcgatcatgccaaaggcgttataaaccggcaggttatagctgatggtacgcttatgctcagtaagcgtttcttcgaggaataccgccacttcgatttcaatatcgtggccgcgtgtggcggggcgttgacgggtctggcgggcatgctgaccggagattgacgagaagatatcgtgaagatgttcggcggggagagtctgagcgtcgccatggtgggactgacgggggaattgcggagcgttgcgatgttgcctgtagggcagactggcggccgttacta

SEQ ID NO: 21742 - DNA, 625 bp, Arabidopsis thaliana
taacggccgccagtgtgctctaaaggggtcagtctcgctcccgcgaacgccctctcttcctgacgacggatggttctgggaccgttgagtcctacatccacctgaaagccctccccaagggccggcggatttacgccctcgagtcccccttcctcgagcagccggagctcttcgacctctccattgaggagatggccaccattttcctgcgcacaatccggcgcatccagcctcatggaccctacctcatcggcggttggtccgcgggctctatgtatgcctacgaggttgcccaccgtctgacacgcgagggtgaaacatccaggcccttatcatcctcgacatgcgcgcaccctcgctcattccgacctctatcgtaacgaccgattttgtcgacaagctcggtacctttgagggcattaaccgcgcacgcgacctccctgaagacctctcagtcaaggagcgtgccatctcatggcaacttgccgggccctctcccgctacgatgcaccggcgttcccatcggaccgccagccaaagcaagtcgccgttgtctgggccttactgggtctcgataatcggccggatgcccaattgcatccatgggtcgacctggcttggatat

SEQ ID NO: 21743 - DNA, 1397 bp, Arabidopsis thaliana
gagctttttgtgattcttagctcgtcacgaatcaattcaacggagaatacacggctcgggacgaaaagatggaagcctacctaattcatgttcaaaatctagcgaagaatttcgacgaattcgagttgacaagaattccacgaggagaaaatacatcggctgacgccttagctgctctagcctcgacatctgacccgagcctaagaagagtcatcccagtggaattcattgagaagccaagaattgagctcggcgaagaagaacacgtcctcccaatacaagtcagcgcggatcaagacgacccaggtgactgcagctcagtatggatggaacccatcataagctatatatccgaagggaaattgccctcggacaaatggaaagctcggaaactcaaagctcaggctgcacgtttcctctaatagatgaaaaactttacaagtggcgattatccagacccttgatgacatgcgtggaaggagaagtgacttgcaagatcatgaaggaaattcacggtggctcgtgcggaaatcattccgggggaagggccttagccattaaaataaaacgccacggattcttctggccgacaatgatcaaagactgcgaaattttttcaaaacgatgcaaaaaatgtcaaaggcatgcgccaacaattcatcagccggccgagctcttgtcatcaatcgcctcgccgtatcctttcatgtgatggtcaatggatataattggacttatgtatccctcgaagcaaaaaaaattagttctcgtcctgaccgactatttctctaagtggatagaagccgaatcttacgccagcataaaggacgctcaagtcgacaacttcgtgtggaaacatatcctatgtcgccacgggataccttatgagattgtcacggataacggctcgcagtttatatcaacccgcttccaaggcttctgtgataaatggggaattcaacttagcaagtcaacaccacgatatccccaaagaaacggccaagccgaagccgctaacaaaataatcctcgacggattgaagaaatggctcgatgctaaaaagggctcgtggtccgacgaactcgaaggtgtactttggtcgcatcggaaaactcctcgccgagccacgggagaaacccctttcgccttagtctacggaacggaatgcgtaattccagccgagatgatagtgtcgagcctacgtcggagtgtatcccccgagaacacccctgataacgctcaaaggctcctcgacgaactcgatctgatcgatgaacgaagagttcagccctggttcgcatacaaaattatcagaatgaaacggctcgtcattacaactcaaatgttcggcaacgaagattccatgaaggagatcgggtcctccgaaaatttttcca

SEQ ID NO: 21744 - DNA, 889 bp, Arabidopsis thaliana columbia
cctccacgctctttcaggataatcagatatccgattcttcaacgcagattgaactgaatccgacgcacgagattcgttaccacgctcgattagaaaccgtagagacgcaaccaaagaaggatcaggcaaacggcttctgggaactatgtggaggtcaccaccgcgaatgaagacacgattgagactagtctccggattaagccaacgcgggagatgaaaagcagcttcgattaggagaaactcgccgtcagtgtcccaaacacgaatcgaattagacggaaacgcggcggagattcgaaaaagtaaaaacacagcgaaccattcgtcttcgagattgtcaccgtacttgagcttcccgtggagatgaggtatagcagtattggtacaagcacaagaggaagagagagcgattgagagagagaaaggctcgtgctgccatatgtaaggagaagtaaacggagaaacgaaatcgatgatttctaagtgaagtgactgaagagcggcggaggagagggatgagtcagggaataaggagaagaaaactgtttcgtcttggagacgagaagtggtttcagagaagaaaggtgaagaagaaggcttcgacattgttcttgcttcattcaccggcgccggtgactgatttatataacagataaaaccctctgacttaataagaagagtttgacttttgaccattaatgaaatgaccaaaacacccttcattatgttcttcttcctttagagagaaacccaaaaaggccaaaaccgaagaattgatttttgtgtttatctttccttttacgatgtgttacggtcacaatcaatcgttgtcgtcgcgacgagtctccgtcgccgatcgcatgacggagaagatgattcagtggtagac

SEQ ID NO: 21745 - DNA, 2564 bp, Arabidopsis thaliana
acttgtgagtgtttgtcaggtcttatcccgattgagcatggtaaaaagtgttaggttcgtaacgatagagatagtgtctcatgtagttctagttcgcgttttcaggattggatagaactaggtgggcgcttatatcatgggttgggatgtgtttaaaagaaagaaaagggtgaattcattgttgataagaaaagggaaagaattctaggggaagtaagctaaagaagttgacaatggaattccataacgagctttgtttggctctccagaatctgctcaagcatcgattccattcttgtctcttctgtgggtggaggggaggcttggtaagctgaattaccataggtcctctgaaagtttctctaaggaaaggtcttctggaaagcaggctttggagtgtagttggaggaactctggttctctgtaaacctgttgccactgaagttgccatgtggctgtccaaacttcatgtagcctagaccatctatgtagtagactccctcttctgactcaatctcaggctcaatagtatcatcctcagctgcaaagttgacatgcttcttccttgtaagcaagttgtgaaccgaatccaacttagcattcacctctgccatctgattgcccgaaacagctccaacaatcttcttcctctcaaagtcagcattcttggtgctgtgttaccataggtcctctggaagttgctctaaggaaatgtcttctggaaggcaggcttttgagtgtagttcgaggaactctggttccctgtaaacctgttgccactgaagttgccatgtggctgtctaaacttcatgtagcctagaccatcgatgtagaagactccctcttcagactcagtctcaggctcaatagtctcatcttcagctgcaaagtggacatgcttcttccttgtaagcaagttatgaaccaaatctagcttagcattcacctctgccatctgattgcctgaaacagctccaacaatcttcttcctctcgaagtctgtgttcttagtgatgttgctacaagcaagattctctatcagagctgtagcatcaattaggtaacgtgtgttgaagttaccattgctcgctgcatctagagccatctggtatctctaatcgactcctccgaagaaggtaccaagaagttgtacctcactgaaaccatgatgttggcagtcccgttgatactccttgaaacgaacccaagcaaccttgaaaacttcagctggaccttgtgtgaaggtagacagcatgtttctcaactcctaagacttagcatcatcgtagaaattgttcaagaaggctatcttgatgcttctccaagtcttgagggaacctgctttaagttgtttcagccaagaagctgcttccccagcaagtgaataagggaagagcttgcagagtagatagtcctctgagactccattagctttgatgctcagaacaaggtcctcaaatcgctcgatatgattcattggctgctcatgagataagccatggaaaggatgctggccaactaaagcaaagtagccaggcttcagctcatagtcggtcctctggaatggtgggggtacaatcgtttatcgattagcatagaacaggtcaggtctgttgaaatccccaagagtacgacgtggttgcagttggaggaatagccgcaggaatctggtgttggtgtcaattgacacctctgttgtctcgttcgacaccgattgcatctgcgtgctgctcctgagggtgtcgatcgacacttagttggtgtcgctcgacaccgagccctgctgcatctctagcagctaactacacattgaggcgcgcttgatcctcattggcgtcctcaggtaggatgagtccatgatcatccaatctctaaccagcctcattgtaggcttacccatcctcatctctcaaaactccttctgcatcagctctggtgactctgtcagccattgctaattgctgagttttttggttggtgcgttcaagttttcctaagttcagaacagacaagttgataaactccttctgttttgtgctctttgtttgcctaggcatacacctgaaacacataaaagaagaaaacaagaaacgcgtgagtaacaaaatagaagtaaaaactagacgatatctctaaacaaaactcaatgatgattcccaataacttcggcaacggcgccaaatttgatatgattcaaattacctagaactactctctcaagtaagagatcaattgcagtattttaggatcgaattacggagttatttttttaaacagtgtgttaaatgtcgagattaagctagtagggtatgagtgaaatagtaagtaaacaaagtaagaaaacagcaggatgatcgaattacaatttgaaatggttttataaatatatttggttgggtttggactatttttttaagcccaaaaggattttgttaggcccaaaaacaatttcgaataatagtcgtttgttaagaaatatattgttgaaaaaaaacaattattaaatgcagtggcagccactgtaaataagtcccaacttcaggatttatttcacaaagtggttg

SEQ ID NO: 21746 - DNA, 2197 bp, Arabidopsis thaliana
tcgttgtccatccgaacgcgtttacccgccgctttatcgctcaaaggctatagtcttcttcttcttcttcaaccaatcgcacttccgagccgataacgcgtgaaaagccgaaatgaaatcatctggaatcagctcgaggaacttgagggtgcattctacaacaaaggaaaactatagttagaaaaagaaactataaaaccgcgtcgggcacaaataaattgttagctacacctacccaaaattctccatctcgtcagaaccgacccaaggaggtcttcgtgaacagcatcttcgagggctacaaagaagaagtgatcggtatacggttcatccttgctcgggaacccatcaataactttcctacccttagcaggagagatgtaataccgatccacctcggatttgggaacccgccggttctcaagaagatttctaagatgagcaagcgtaatgtcagtttcagattcataactccgaatcaaaatcttgagcagatgtctcaaggaccgcatcgtgatctgcgagagggcgatctggtacgatgtcacgtactccaaaaccagccttgggactggcaaccacaaaaaacaaccgtaaaagaatccctcatacagagtatagaagcccgcggggggattgtcggctcgctcaacagggctcggcacatgcaaggtgacctcaccaagaccgaatcaggccctcatatcctaaagggaccgctcggtgcataatgttgagccaaggggatccggcactatcgccctcttactcttgttcttcttcttcttctcggctttcttaaaagccctatgctcgttgagacgcagaatatcttctgtctcgttcgggccgaaataaagaaagtcctcaatctttatcgtcggcattaagggctcgagcacgtctcgccagttggatgtcccggcttcgtcagccatcagggcaaggggcctccggacgagagtcggctcgggatcatcgggcaaatccagttcccgagcaatatcggcattggtatcttcccgagccgtgaaagaggtcatctgctcgggggcactcgaacaagacagaacatcatcttcagaggacgtccaaactgctctccgtttgtagatggggggaaggtcatctggatgattcgagtcgctggaatcggcgagagaggtgctcgggatcgaaaaagactggctagaactcatactcggctcggagatgctcgacgagatgagaaacgaccagaaaacaaggaatttctaaaccggaaaaatcaaaaataacaaagaaacggcggacgtcaccggaaaaagagagaacaatagaaatatcaagatcagagagaagaagcaaccttgtttcttttcttcgaaaaccttgttgtctagggataatttattgagcatgtcaatcacctataaactgaggaaacgaaactactcaattaccccatcctcgggaattttgcatccaattgatttctttgttaactctgctattgtttactgcatcttgttacttgttgcttagtttttgtatttttctccttttactcgaccttatactcgaccacccagttgtttggcaacagactgtgaagtcgagtatctctgttacattttctgtctattactcgacctgtcactcgaccacacccagtgcttggcaacaagctgtgttggtcgagtgtttttactgttctgcttgaaattatgtttcctgcatgttcacttaggactgctaaaacacctcaaaacctgttattgcttggcttgactctgtgaactctgatagcatcttgattgctagcatcacacccatttggattgacaacctgaaatactacaacgacatgatagtgctttaggattaattgaccttaaaaacctattattagtaggcagatctgtccttttgtttgctcaaatccatctttaaaagagactatttggtctggattcaagcgggtttcgaaaggggttaaaagccatacatgtcttgcgaatctgcaggtgaagaaaagaagaagagtactttcattttcaccacagaaaggacattgggcagctgcgttgatgttcctgaagatcaagttttctcccactggtaaagcccctctcattgctttccaaaggaagaatttcagtttgggagagcattgaatgttccagatgtgtttcatccaacttgaagtctctgagat

SEQ ID NO: 21747 - DNA, 3007 bp, Arabidopsis thaliana
ttttcaagatggatcctatggttgcataaactaggtgaaattcccttaatgtcggataatgaataaccaatcgctctcctatactttctaagctcagataatagcaggttcacttcatcactatttaactcagcattaatgatcatagggtaagtagagtttagaccaagcaatgcgtaccttagaccttttggaagtggtttgagatcaaccttcggtgccttaagttcagaacagtcatctgaagttggaatgatcggctccccagattcgttggtagacaaggtcgagtggctggtcgagtacgtcctcgagagtgcaggttgaactcgagttgacccttcttcgctcattaccattacctccgttgctggtccattcaattcctcaaagggttctaattcttccatcgctttatgggagtctaacagcttctggtatcccaatgtttccaaatgcagaaacccatcttcaccacttttggttaaagcactgttaagatgatcttcttctgccagctcttccagtaactcatcagctaactgatccatttcttcgatccaaaagagttgcccttctatggtaggcttcttcatcgcgtctttgacatcaaaggtcatcctatagtctttgctaaggtttagatcaatcttccctttcttgacatcaatcatagctcctgcagtggctaagaaaggtctccctagaatcaacgggtccttgggctcttcatccatctccagaactacgaagtcagttggtatctccacagcaccgatcctgattgggaggttttcgagcaaaccatgaggaatcctcactgatctgtcagctaggatgagggatatattgcaggacttgtattgagtgaaccccaatcttttggcgacagaaagcggcatgagaccgactgatgctcctaaatcgcataggcatctattgaaagccaatggacctaaagagcacggtagagtgaacgaaccaggatcactaagcttcttaggaatgatcttcttctgtatgatagcgctgcattcatgactcaataccaccatcccttgcacttcttgaattctctccacaatcaagtctttcagaaacttgtgagagtctgggattagcgctagagcgtcaacaagaggtatccgcaactcaacctccttaatgttcttggcaaacatagctctatatttgtctgccaccgctttcttgtgactctaggaaatggaagctgcggtttgtagggaggagggacaaagaccttttccttgtttttgacagcaactggttttggagcagttggtgatgctgctgggatgacaggtcgagtggtaggtcgagtaaagctgtcgagtggcggatcgagtgattgctggagtgacaggtcgagtggttgctcgagtgacaggtcgagtggtttgtcagcttgatctttcttgagacttaaatcctccccatcttgatcttcactgtcctcagtgaccgtctttggttccttcctagttggaagtgcttttccactacgcagggtgatagcatgagcatattcttttggattctgaactggtttgcctggtagttggcttgtctattttggagctgaagaagatacagaatgtccctctaagtaacggactttggtattcagtgtttccatcttgacattgagatcattgtagctacagtccagcttgttctgtaactcaaatatcttctttgccatctccatggagtcagaggcttgcccgtgaagcagctgttgtagcatttgtttcatttcagcaacaggagcagcaggacatggggcagattcttctcccagatgtgtgctttgtctcccaaggagaatggaaacaaacggagcttgaattcgtcttcactgacaccattgatctttgttaggttgcagaacctatcgaattcatcaaggtggtcgagtggatcctccattggcagaccatggaatttgttcccctgaatcatcaagatgagaccactcttaatctcgaagttgttgttctggatagcaggaggtgcaatttccttcctctgacggtgatcacgtggtgcatctctagcaccaatgttggtagggccattttgttgattctgttcttcagccataacgagtggttgctgaggtacagggttgactgtggttctcttttttctgatttcgcgggctgtgcggttgatgttgtcggtgaaaaggaggttctggttgcctgttgatcgagttcgcatacagaagaggtgtacctggatcaagaagacaacaagaagaacacacagttagtaactaaaaagaaaattgaaaaagaacttgatctaagcaagtctgaaatcttaaatgtaacaaacaaacacccaattggcaacggcgccaaatttataataggtttttaagatcaattaaacctaaagcactatcatgtcgttgtagtattttaggttgtcaatccaaataggtgtgatgctaacaatcaagatgtgatcagaagtcactaagtcaagccaagcataacatgttttggtgtgttctagcagtccgaagtgaacatgcagaaaacagaaaatcaaacagaaacagtaaaacactcgaccaacacaggtctttgcagagcactgggtgaggtcgagtgacaggtcgagtaacagacagaaaatgaaacagggatactcgactgcacagtctgttgccagacaactgggtggtcgagtacgaggtcgagtaatagtaaagaattgcagaaactaagcaacagatgacaggatgcagtaaacagcagtaaagtaaacaataaaatcaatcagacaaagaattcctaaggatggggtaattgagtagtttcgtttcctcagtttacaggtgattgacatgctcaataaattaaccatagacaacaagttcattaaccaaatctaagtgccaccgcaacagagaatctcaagctaacctagtcccagactcaatcaccattgaagagagctaacctaacaagcatta

SEQ ID NO: 21748 - DNA, 543 bp, Arabidopsis thaliana columbia
tttctttcttggattaaatccgtttagagatattccctgcaaaagagatcttgtaatcttatggtacttgccatacaagcaagattgagatgatacttcagctcttgaaagagaaatacttacagatgcggtgagtccatttccaagtttgacaacagtttcaaacttccggtcgagtgagttagccgcgactgtcattacccacggcgcgaggttcgaaaccgtaaagagaccaggaccgttattacctgcggaacacgttgtcaagatccctcttttcatcgcgtgaaacgtccaatagctattggatcttcgaaaaacggaagcgaggctcctccaattgaaatcgatattatatcgaccccatcagaaatcgcctcgtcgaatgctgccaacatgtccatgtctgtacatcctgagtcccagcacaccttaatttgaaacagaggataatgtgtctcagatattccttatgttccaagaaaacagagtaatgatataacgaagaaaacaaaccttatatgcagctattctagcagaagg

SEQ ID NO: 21749 - DNA, 246 bp, Arabidopsis thaliana columbia
tagtaacgtccgcaagtgtgctattgtgctctaaagaccagagaactcatgcggatagcggttaatcaggttaggcaataacccgactttcagcatcatcgccttcacgcgctcggaacttcctggcgtgacattttcggatggtaggtatgcagtggttcagcgatgatctcgccgttggtcatactcgtgtttatcgatgccaacggatcctggtaaatcatcggaatatcactgcgaacggca

SEQ ID NO: 21750 - DNA, 569 bp, Arabidopsis thaliana columbia
atgcctcgcgtgatattaatctcctttaatttgagttaggtacatatatatagagtttattacgagatggccaccttagttcttgtttctttattttttacccataactctttaaagtctaattttgggaatttttgtagtttttgtaaatctcttttcctcttattacccaagcttacgagcaatttcttctcagtagtcttaatttatttgctttactaatgaaaaacgagaaaatacgtaataaagattgtagcagtgagtattattctcttattacagactccattattccttcctttgagcaacatctatttgagggagttcttgatgtcaatcacgaaacggtacttgatgtccttcttcaccactctttcgagagcttcgtttatcttttgaatgggaatcacctctatgtttggataaatcttatgagctgcacagaaatctaacatttgctgtgttattttggccccccggttacacttccagcgagcattctcatacctgtccagacatctttggtttcagtatgacagtatcttaaagagtatgtatgtaaaattgga

SEQ ID NO: 21751 - DNA, 533 bp, Arabidopsis thaliana columbia
tcccctgccaaatatataactttataatatcaagattgaaaaccttgttattatgcaattttaaatatgacacgtacgtacctatagtatcatatctaatataataacgactactttccttcctctcctccggcattaccttcggtgtcaaccatacagtcacgacggcgacgatctctcatagttccccactcatgcatcgaaagatgaagctttttcccagcgagcaagaaatccgctccttgtaccggagatagaatcccgaggatcttcgctaaagtatcaacccttagattatcggcctcgaccaataaacgagccatagcttcttcttgcttgtcgagagcttgatccaccactacgttaggctctccgacattctccatctcgtaagccacagtggcgatgggaatatccgctgcgtcttcttgtaggcttgagactttcttggtcatcttctcttcttcgtctataatttttacatgcaacacattgattttagctagctgctccgccttaagtcgctaagtgat

SEQ ID NO: 21752 - DNA, 498 bp, Arabidopsis thaliana columbia
tgtatcccttgttaatcgttataaacttgtttctcaataaaacttgagtttttaaaaatccagtcttgcaaattcatcgacgatgttagatccttcttctgctaaatccttcaatacccatttgtgttttccgagtattcccaatgatgatcactcagattccggtgtctgttcgcctactttgtggagaaccagtcccccgaagagtcctcctccttttcaccggccggaagattactggagtctttcgccggattctaaagcacaggctattgctcgtggtcaacgggagcttatggaaatggttagtaagatgcctgagtcgtgttacgagctttcattgaaggatcttgttgaagttaaggtgaatcaagagaatgaacggaaggtgttcgatgaattgcctaagaaagcaaataggcagagtaaagttgtgaggaagacgaagagtgatgaatgggttgaatcgaataggagtggaggaggaataatagtggg

SEQ ID NO: 21753 - DNA, 780 bp, Arabidopsis thaliana
tgtacattctccgatcgttacttacgcatcgatgttatcgcttctcgccttctgtccacctttcgtcattctcctgtaagctcatcaatttctgattcgcaagtctttattctagttctcagatcagactcgcacacttttctggctccttaattcatagcgagaagtgcatagccgatatctttaaatcctttcccattaagtaggacttgataagagtctttaattgaaaaagcgattcaatgattctttctctggccaatgtgagtttccagatttttaggaaacaagggtagatttaaagctacaaaatcatatttagtgagttttaagtaatgctcacaagtttcatttctttatgatgcagatggtacacaatggttcatcaggatggttctgttactcagacctttggcttcttttgggagaatggagttcaaggacttatcaacatatggccaagacccactttgattgcttggaaaattatattttgctatggagcatttgaagctattcttcagctgcttctgcctggtaaaagagttgagggtccaatatctccagccggaaaccgaccagtttacaaggtatgttcatttagtcttgtgtggtggaagttgatgcagatgacaactgtacggttcttttcttgcaggccaatggtctggctgcttactttgtgacactagcaacctatcttggtctttggtggtaagaaatgtttccgatgactttggtttggtttaagttattgtttacgtatcttaagcttggatt

SEQ ID NO: 21754 - DNA, 511 bp, Arabidopsis thaliana columbia
ataactctgcaattctcgctctttgagtgctaaaaatcttacccagcatcgatgaatcccaaactcagaacagcgatcgcagatcgagcgacgattgtgttggggactttgattcgcaagatgggtcgttcttcgtttgatttctctgaaaagtctctccttttcgacattatcgtgacgccattagcaaagcttcggagtttgttgtcgttaggacagaatgagacgaagctactgtgttgtaaggtcagcattttcacttttcccggaatgagagattatcagactttacatgttgataagggtaatgttttttttttctaatacagctaaagactgagggtgcttaggtaatttaacttgaaattctgaagcttctaattttcccaccattgttctcgtttagctcggctaaaaccctagaaaacctctggagctatggagatgatgcaggattcgttccaagtccataggattccacaatcgaagtatgtcgatggagttagatggc

SEQ ID NO: 21755 - DNA, 498 bp, Arabidopsis thaliana
gatggaaagagaatctagagagcgagcaggattttcgagcaaaccagcaagaagaacaagaatctgcgaataccacatttccagacaaatcataacagctgagccagcagagagtttaaagaagctccaaagaccttggagcgatctccagctaagaccagtccacgtgtgtctaaacttgggactaaccgcaatgtaaaaacactgggatccaacaatgacccaccaagaaattgtaagaacataagctatgcccataaagcccatgtccattacataaacggtgatccacgtcgaacaatatctggaggatgagggcggcggctgagatgaaggcgctcggggcaaccacgctttgggcctggaggaacttttgggccgtgaagttgacggcgtaacggaagatttgagggatgagcccggcgatgtatttggatcccatgtacgacaccgttttgggttccctagtaggattagaatagggtacgagaaggtgta

SEQ ID NO: 21756 - DNA, 504 bp, Arabidopsis thaliana columbia
tgacataagaattgatcatctcttcttcagtaggtttaggatcagtgaactccatgacgatgagccagtgctcataatcgcacccatcaagaagaatcgtctccttcggcggacggttgctccaattcggcgaaggatcattcagcggcgagtatccggacccggatgtcttgggtcgggtcgagatgtaacacgggcccaggctggttcgggaagaggaaaccttttcaattagaggcatggcgaatcgagaacgagaagagagcgtaggaaatgaagaagaatatgaagtagaggaagagagggttttgtttaggagtgtcgataatgttcgccgtgtgctgataagagccatcgccggtgagggtttcggcttctgttcttcttcggtccttctctttgcagaagctttgagaaactatatgggcttagtgggcctttgatttatactttttagatgggctattaaaaaatttctctacattaaattccttagtttagtag

SEQ ID NO: 21757 - DNA, 527 bp, Arabidopsis thaliana columbia
ttgaaccacaatttacacttttttatacattcgtttgattctgtttttgtttctctttcaggttggagattttggtttagcaagatggcagcctgatggagagctaggtgtagacacgcgtgtgataggaactttcgggtaacaaaatttataactaaatcatcattctcactctagagtaatttctcaactactttctgtgtttcttgttttagctatttagctccagagtatgctcaaagtggacaaatcacagagaaagccgatgtttactcgttcggggttgtattgatcgaactaatcacgggtcgtaaagcaatggatatctacagaccaaagggacaacaatgtttaactgaatgggtaaatccataagtttcttctttttaaggtttcttagctcattttcagtctcttcttgtaaatgaaatctaaaagtttctttattgaagctcattttgttattttatcttctttgtgagcaggcaagatctttattagaagagtatgcggttgaggaattagtt

SEQ ID NO: 21758 - DNA, 554 bp, Arabidopsis thaliana columbia
taatatgaatatttttaagatgcacatactttttttttttttttggtaaggtttaagatgcacatactttctctaggtatctagtaatttattccttcaacgtctgaatcggcctcaaattttctgatttgggcttagtttggtccaagtgggcttaatcaagcatatcataactgtagtttgggctcataacgttttttttttttttttttttttgcgctgcgcagtttagcttttgatggtacggcttattttaacaacgaactcggaataaaaaagcttttgacagagagaacgaccataattcaattagggaagtactttcacaaaccggagaagattatcggagatcgcaaactatggccggacgagatcgttatattccatcatcagcagtttcaacttcatcatcttcaagattattagaatctcaattaatcgaatccgatcgaaatcgagctcgatctgtaatcctcgaggatcgaatcgcaatccaacaccgtgaaatccaatctcttctcaacgacaatcaacgattagctgtagacacatcg

SEQ ID NO: 21759 - DNA, 1076 bp, Arabidopsis thaliana
gaagtgaaagaggtcttaggcaaggctgtgcactatctccgtatttgttcgtgatttgtatgaatgtgctctctcacatgctcaataaggctgcctgggacaggaggatagggtatcacccgcaatgtcaacatctcaagctcacacacttgtgttttgcagatgatttgttagttttcaccgatggcaagaaaagttctatagaaggaattcttcagatctttggtaaatttgcagatttctccggtttacagattagtctcgagaagtcgaccatttacatggctggagtgaaagacaatgacaaagcagacattcttcacagtttcccttttgcctcaggcgcactacctgttcgttacctagggctaccattgctgacaaaaaagatgacgacaagcgactacggccctctcgttgaaaaaatcagagtacgaataggtaaatggacggcgagacacctctcctttgcgggtcgtctacaactcattagttcggtaatccatagtctaaccaacttttggatgtctgcgtttcgtcttccaagtgcctgcatcaaagaaatcgatagcatttgctcttcttttctctggtctggccccgaactgaatacaaaaaaggctaaagtagcatggagtgatgtttgcacacccaaagatgaaggagggttaggcatcagatctttaaaggaagcgaacaaggtcagtttgttaaaactcatttggaggatgctctcgtctacttctttgtgggttcaatggctgcgattatatctgctgcgaaagggttccttttggtctatcagtgggaacacaactctaggatcatggatgtggaagaagattcttaaacacagagctttagcttcaggttttgtgaagcacgacattcacaatggcagcaatacatcgttttggtttgataactggtcaaagataggaaggctgattgatgtaacaggtcatcggggttgcattgacatgggaatcactcttcacgcctctgtagctgaagcggttgtgaacatagaccaagacgccaccgacatgatactctgcttcgaatagaagacgtca

SEQ ID NO: 21760 - DNA, 526 bp, Arabidopsis thaliana columbia
tctagaggatctcaaagacaggcctagtagcaggatctgcagccaattttagcaatctctgatgtgtgagaacatcttccgctctctcgactttaacatcaagagcatatctgcaacaacatgcaagaataatgccaaatgcaaaactcagaaatcaacaacacatcaaagaaaacttgattcaatgaaatcgtttccggatcaagacacgtgttgagaaacgcaaaagatcagtcactgtcgatgaacatatacaaaacttcgaaacaaaattgaataatctaagcgaaagagatgaaatttcaagatacaactacgccctaaagcaaaacccttatccacaagatcgaacttgatcaagcccacaagagagaaacgaaagaagaaagacaaaaaccctaatgagtgtagaagattataccgagcaggaagacgattgatatggagccaaagttgatcctcggaatcaggaagagtggcttcttcgtgattagattcttgaagtcgctgtgaacctcactataga

SEQ ID NO: 21761 - DNA, 544 bp, Arabidopsis thaliana columbia
tcgtttttatcttcggcgtgaaattggggaagggacagaatacgacaatccaagtaattaatgttggggttgtgactgatgttgggacaactgcctccaacttgagcttgctcgccattaacatgtctctctcagacttttactcttctcgtccagaatctcggaccaggcttcttcttaactttgccgactctagagacgatgttgttggcgctgcagcggctggtatgttctgtctttaatgattcgattgtttctataagtaaacgtgaaacgcaaatgaaagcaaaaaatttcgtttgtgattattttttccgtttccacgttatactaactatatatagtatagctcaagacatgtgaattgtccttgtgggttctgttttctcgttcatgcaaccgctaatattgttttttggaacaactgatcatatatgcgtatcatatgtggccttattcacactaattatgcgcatcatatatgcacacgtgtaacatgttcctggctggaaggataaatttgagaatatgaaatatagggttg

SEQ ID NO: 21762 - DNA, 164 bp, Arabidopsis thaliana columbia
aacgtctcaatttatccatgcgaagattttgactgggttggagagtgtgcatttggtggtagtttatgctgctccatcagttagtcgccgcagtggtttgtggaatgaattacgggaagctgtgagtgggttagatgggccattgatcattggtggttacttta

SEQ ID NO: 21763 - DNA, 562 bp, Arabidopsis thaliana columbia
tgaatgacaaagcgctagtgccgaatcttgctgcttgtgagacaatgggatctgcaacaactatttgtagtgacaaaactggaactcttacaacaaatcacatgacagttgtaaaagcctgcatctgtgaacaagccaaagaggttaatggtcctgatgctgctatgaaatttgcctctggtatccctgagtctgctgttaaacttctactgcaatctatatttactaacactggtggtgagattgttgtgggcaaaggaaacaaaaccgagatactgggaactcctacagaaactgctctgttagaatttgggttgtcactcggaggggacttccaagaagtaaggcaagcctcaaatgttgtgaaagttgagccctttaactctacaaagaaaagaatgggagttgtcattgagctgcctgaaagacatttccgggcacattgtaagggtgcttcagagatagttttagattcttgtgataagtacatcaacaaagatggtgaagttgtcctctcgatgaaaaatcgccagtcacctgaagaacataattgaggaatttg

SEQ ID NO: 21764 - DNA, 153 bp, Arabidopsis thaliana columbia
caaagggatgatgccttgtggagcagatgcttccattccattcctcctgttgcctgcgcctcccatgaatctgcttgcattttgctgcagcatctgacagttccaagataagatctagccccaacaaattcatattcgtgtgattgtgttaaa

SEQ ID NO: 21765 - DNA, 559 bp, Arabidopsis thaliana
cagaatcaaagaaacaagcttcggaggaacaagagaatgcgtcccaccaccgaaaaacaccgtttctagattcgggttcgtatcaaaatccgtccttgtcgcttttatctctctaacaagcaaattcacatagttcgtgattctcgggtcatcttcgtttccttcctcgtagacattagacggtctggctgaagaagaagacatgcctagagctaggataggaaagcacaatagtgacagcgtttgcgacaaaacggaagatgaacgtaggctgaggttggtggacctttgtgtaacgtagtaagattggttgacgcatttcgtcgagcacttggtggagtatcttgtagaacaaccttactaaaagctcgaaaaaacaacttcgatgagcacttgggtttacctgtaaacgatgagaaaattggagaaatggttgttttcagcataattaccaaataaaacgagagacaaagacagagagccagagagacgaagagagaaagctttcagagatcaaagttcactgggctcggttttatatgctctacgtcgtcgtttt

SEQ ID NO: 21766 - DNA, 1442 bp, Arabidopsis thaliana
atactttatgctaatatattaacattaagatgcatatgatgtgcccacaaaaccagcatgttggaccacttcggatcaagttttatattacaaaaatgatagttgaaattaaggtgatataaaatgtatataaatagaaagtggtgatataaaatgtatattaatagaaagcaagtacctgaattgatttgttctggcaagaagatatacttgattagaatttgttgactccaacttgtgctcatcctcctcctcgtagcagaggccgtagtggtggcgcgtggagctcaatcgccattttttcagagcagccaccatgacctgagcaaccctcgtgaagggacttcccaccggaacttgttttcgatattttggaattcctatcagaaatatcactatagctatcaccacacttcctgctattatgctgaatcctagtgaccaactcactcgttcctgtgaaaaaagaaaaaaaaatagtaatggtttgatttgagatataattaaaaagcgataattttttcacaatgtgagggaaaaaaatgaaaaataaaactgaaaaataatatcatcaaataaattttgtattcctgccaaccatgttagttattatgccaaccaatttttaaatatgaaaaagtttacgtttatatatttctacattatttaggttatctaacgtgaataattactgaaaccagcatatgaatatcttactaaagctaatattcttacaaaaccaaaaatagagttaatgttaagacaattgaaaagtaaaagacctgaatgaagatgagtgcaagaacagctatggaagaagcgaggactatggccatataccaataattgaagaaagatgtctttgctgctttctcttccgcattggcctctccaaactggtcagctgcaaaggtcatgacgcatggtttatgccctccttctccaaccgccatcacatacaatgccataaagaacactttttctctcatccgccgcgccaccaccgtcaccgacaatggcaacatgacaatcccctgaaattcattgatgaacgtgttcatattagtccgagtttgagtttgagatcttgaaaaatgagtcaagggttaggtttggtaacgatatgtagaccaagagatagatgaaagaggtcaagagaacggttttgaagcggcctaggatggagtcagctagaaacgccccgagaatggggaacatgcaagaaacaccgatccatgtgttgatgtttttggctgcggtggccgtggactggccaagttcgtttgttagaaacgttattaggttgcttgcaagaccgtagaacgcaaatctctctgctatctccacaactgcaaaagattaatgaattaccatctcgacaatatgaaattagagagaacatataccaaatccgtgagtgtatcagtatactgatgatgaaa

SEQ ID NO: 21767 - DNA, 765 bp, Arabidopsis thaliana
tgctgagaaaccccctctgacccactctctgagatcgtgctctggcatttctgtgcaacctgaagcaattggttcacctgcatgaccaataaataagattttagtacacttcttagcaccgttgcagcatctgtaaacatctgttctgaagtaaaataacagactttgtgctctattcataggaaaccagaagataagctacacagaaaccgggtattagctatcctcaatttcataacaagggtttaaggaaacaaagtcatacagttgaccacaaacattttatgtaaagtcttaagttccaattaataaacgcaagggtcgtgccattagaatacctgtggagcaataagtctgcgaagaagaagctcttcatgacgccgagcgcaaaactcccaagaaagtatctagatagaagcaaagtcaagattaactaagcattagcatactggtgcctgattttttcatcgctttacacaatttggaaccagagaattgttctagataccttcaaatcttgagaaaatatgatgcgaagatggcctcacggacaacacgaaactgctcgtgtacagtttcctgaactgctttttctatattctaacatcatcagtccattgggaaatctgttttctcgagggtgatccagatataacagctcatcaataataccacttgcaaatttgatttcaattagtctggcaagcacatcaaacgttgcctctgcggattaacacgagaagtgacagttagctactattttga

SEQ ID NO: 21768 - DNA, 927 bp, Arabidopsis thaliana
cacatgctaattgctctctctttattgtttaaaactttgataatcgtattaaaaagtcttccgtcaaaatagtagctaaagtgtcatcttttcgttccgcagaggctacttttgatgtgctagccagacttattgaaataaaatttgcaagtggcatcattgatgagctcttatatcttgaccacccacgagaaaacagatttcccaatggactgatgatgctagaatatagaaaagcagttcaggaaactgtacacgagcagtttcgtgttgttcgtgagggccatcttcgtatcatattctctccagatctgaaggtatctagaaaaattccctggttaaaaatgtgtgactttcttccaattttcttttgccctgcctatttaccgaaaatatctagcaatcaccagtgtgctaatgcttacctaatcttgactgtgtttctttctagatactgtcttgggagttttgtgctcggcgtcatgaagagcttcttcttcgcaggcttattgctccgcaggtcctattctaattgcgtacccttgcgttaactattaggagcataagattttacaaaaaccgtttgtggtcaactgtataaatctgtttccttaaacccttatgaaatgaggatatctcagaatttatgaaaccgtttgtgactatttccctaaacagtctgtatgaattagagcaaatagtttgtaaatctacttcagaacagacatatgctgcaatggttttgggaagtgtattgaaaacttattattggttatgcaggtgaaccagttgcttcaggttgctcagaaatgccagagcacgatttctgagagtggttccagggagttctcagcaggatatacagtcaacagtaacatgtaagttaatcctaacactaaatttacctttgtcatccaatttggtgga

SEQ ID NO: 21769 - DNA, 1981 bp, Arabidopsis thaliana
aaacctaaaaaaattttaatcatcgttttactcgaccaacagaagctacagagtcttccaggaagtttatcaagagacaagaagcagccattgtcttcctggaggttttctagtgaacagagaagagacaagaagacactatgggatccgccgctgacgcccatgtctcccatgcacaccaccaaaagacaagaaatctaacttctcttcgcttagctactcgacctcttcaccttatcctatcttcaccttctactcgacctcgacgccatcaccatccccacacctattaaactcgaccccattccccccttattcatcacaaccaacaaacccatcctcatcaaagccacatacactcgacctcttcgccacttgaccgagctccccgttcgcataaacactcgacttcttctccatcatcatccgtccaaagcagcactcgacctcaccatctttcttaaccacgcactcgaccgcttctctctcgcctcttcaccaccgtctcgagctaccactcgaccgctcctcgccatcaccacctctcaatcgtctcaacttcacttgaccgcttcacgccatctctttcaagctcgtctctcatcaccaaacactcgattcacatcaccttctcttccgtccaagcctcatcattcgccctgaaggaatcaccgccgcagctcatccccaatccacttgctactcgaccgccactcatcaccattgtcatcctcacaaccttcactcgacctctccactaccacaaccactcgaccgcttcacaccgccgtcttctcttcttccgcgagctccactttactcgatccccaatcaccatcttcttcatcgcttaatcactcgacttccccaagttcactcgattcaactccaatcctcgtcgttttcaccactcaagctccacagcttcactcggctgtcaataaccactcgaccaagcaaaatcactcgatcaaccgaaaaaaaaaaattaaaaaccgacgatttactctattaaatcactcgaccggttcacttggttggtttgtgtttttggtttgttgttactaacgtattaacatttatttttgagttttgtccattttaaggtttcatcatgagtaactacatcggagaatcctctatggaccctgattacaatgtagatgaagctgagtcctggtccgctagaccgagagagcaacatgtttaccagagcttcagggatgaattcgaacgctctacagcccgacgtaatcagagaagagctgaaatcgccagaggaaagagggcgatgtcaagtagatatgagctgattgatgaggatatcgagactgagtatgagccagagtcatggcgcagggagacgaagctgctgaacaaatccgacgaggttacagtggaggagtatatcagattcttcgagatgaatgatttctggggaacgaggtatccgtgttatgagactttagcccagctagggttactagaggacgtgcagcatttgttcgagaagtgtcatttggagacactcatgtcttacccttaccctgcctataaggaggagacaatcgagtttctttccacgctgcaagtggaggtgtatgaagcactcacagactttgagctggataccatgggattaggcttcttgacgttctcagtgaatgaacagcggtatcagcttttgatcaagaagttagaagaactgtttggtttccctagtggaaagggaaccaaacccagatttgacagaggagcttaaggatttgtgggccactatagggaacaatctaccgctaaactcggcgcggtctaagagcaaccaaatccgaagtcctgtgatccgctactttcagcgatcagtcaccaacgtcttttactccatggagtctacaggcaccgtgtctaacacggacatggagatgatagattatgcacttacagggattctcgccggacgaaggggaagaatgtcttgaga

SEQ ID NO: 21770 - DNA, 577 bp, Arabidopsis thaliana
cctagaccagaacacctttgttcttaaatcccacaccgtcaatagcgccgatccaaagaatagacattacttgtatacaagaaactaggatcccaccggccgaaatatacgagagaaaatcttgtgtttccaaccacattgttggaacaacgatcaaagaagcaataacgataaacaagtgcttcgaatcccggcatgtgggaacatgtgatacatattgtcagcttctaatatcaagattgccgttgcgacaaaatacaactcgatgtatatgaagaaagagactaataaccgacctttcttcccaaacgctttgttcgctagatcagggtaactacgaaccatagggtcgagtttgaggcaacgttggagaagcaaaccggtgtaccaagttgttacaccaattagaaagaaaaacagaatgctaatccatccacttgaggaaagtgcataaggaatagccaatattccaacacctaacacatatataccatcaaaatagcaatctattagtgtttcttactacgaaactaatactaaggctaattacgagtgataatctgctatagttatatat

SEQ ID NO: 21771 - DNA, 526 bp, Arabidopsis thaliana
ttcattgttatgagctcttgagtttgaaaactggtttgttttttctttaggctgatagacttgcagctagagaagaagtggaaaatgtggttctggactttctggtcgagaaagcaactactcacacaccacagttcttaggtttgcctcgtggagcttggctccgtgatggaggctctgaatatgcaggagaaggagttgttataggctttattgatactggaattgatcccactcatcctagtttcagtgacaaaatctcggggcatacatattcggtccctcctcactttactggcgtctgtgaagttaccattggtttcccgcccggttcttgcaataggaaactcattggagcacgccattttgctgagtctgctctcagtagaggagtcttgaattcatctcaggatgatgcttcaccatttgatggtgaagggcatggcacgtaagtgtatattatccactcagatgctgattaactaattgaccacccaagttgttatgtctgatattggttgatttg

SEQ ID NO: 21772 - DNA, 2370 bp, Arabidopsis thaliana
gccagtgtgctctagtaattaactagatcttgaatccagacaatagatatgcccaccataggtatctgtagtgtgatatattatttgatgagcctggtttatagatatgtaataagaatcggcctatctactaaggtgaacaatcgaactcgttaagaatgcatatttaggttaataatttctcggcttctccagttattcttagctatagatatagggagtttcgcggaatgccaccagttattccataattagggtttgagtttaagaatgcttcgataacaacccaactttcattagatctactaaccaatagtctcctgagaataccttgttcctaactctttttctaatcgtttacaacacaatcaacctgctgttttcttactttgttttcttactatttcaatcatcacccgctagcttaatctcgacattcaactcattgtttgaacaaaagaactttgtaaattccatccttaaatactgcaattgatctcttatttgagagagtagatctagggtaatttgaaccttatcaaatttggcgccgttgcaaaagttcttgggaatcatcattgagtttagtttagagatttcgtctagcttttacttttattttgttattcacgcgtttcttgttttcttcttttatgtgtttcaggtgttggcctaggcaaacaaggagcacacaatagaaggagcttatcaacttgtctgttatgggcttaggaacacttgaacgcaccaaccaaaaaacttagaaattagcaatggctatcagagtcatcagagctgatgcagaaggagttttgggagatgaggatgggcaagcctacaatgaggctggtcagagattggatgatcatggactcctcttacctgaggacgccaatgaagatcaggcacgcctcaatgcgcaattagctgccagagacacaatagggctcggtgtcgatcgacaccttcgggagcagaatgcagacacgattggtgtcgagcgacacaacagaggtgtagatcggcaccaaccccagaatcttgcagctattcctccagctgcagaactacgtcgtactcttaggaatttaacaggcctgacctgttctatgctaatcgatcttcgatcgtacccccacccttccaaagaaacgattatgagctaaagcctggctactttgctttagttggccagcatcctttccatggcttatcttatgagcagccaatggaccatatcgagcgttttgaggatcttgttctgagcatcaaggctaatggagtctcggaggactacctactgtgcaagctcttcccttattcacttgctaaggaagcaacttcttgggtgaagcaacttaaagcaggtttcgtcaagacttggagaagcatcaagatagccttcttgaataacttctacgatgatgctaagtttgaggagttgagaatcaagctgtctaccttcacacaaggtccagctgaagctttcaaggctgcttgggttcgtttcaaggagtaccaacgagattgtccacatcatggtttcattgaggtacaacttctaggtaccttcttcagaggagttgattgaagataccagatggctctagatgcagcgagcaatggtaacttcaatacacgttacccagtgatgctacaacccttatagagaaccttgcttgcagcaacagtaccaagaatgctgattttgagaggaagaagattgctggagctatttcaggaaatcagatggcagaggtgaatgctaagctggattcagttcataacttgctcaccgggaagaagcatgtccactttgcagctgaggaagagactattgagtctgagtgagaggaaggagtcttctacatagatggtcagggatacataaagtttgggcagccacaaggcaacttcagtggcaacaggtttacaggaaaccagggttcctccaactacactcgaaagcctgctttccagaagacctttcctcaaagcaactttcagaggaactatggtaattcaacttaccaagcccccccctccaccctcatcagagacaagaatggaatcgatgcttgagcagattctagagagccaaacaaagcttgttgtggagtttaatggcaagtttgatgctgtctacatagatcttaatgggaagatcgacaatctgagctctcacttgaagaagctagatgtacaggtagctcaaactgcacaatctatcaagagacatgacggttttcttcctggtaatcctgatgctaaccaaaggaagagctgcaatgccatcttgattagagaaggagatgatgtgtgggaagaattggacactgaagacgagttgaatctcgcagttgcagagat

SEQ ID NO: 21773 - DNA, 1310 bp, Arabidopsis thaliana
aggtcgactcatcccccgagtggcacaaccactgcttgtgtatctaatcctgtttttattaggagcctcatctacctttctagtgtgattttacagtttacaaaatatttggtagtgcttattgagggtgttgatttaaaggagtttcagttgaaatggattaggggaaagattggattggttagtcaagaacctgttctgttttcttcaagtataatggagaatatcggatacgggaaagagggggcaacggttgaagagatacaagcagcgtcgaagctagcaaacgcggctaaattcatcgataagttgcctctaggtttagagacattggtaggggagcatgtcactcacatattctttgtctgaatctggtggtagcagagagttttcagtgttctgcgatgcacgagccacagagaacggggacagcgatgtagcaggttcctcaactatgctttctgcaggtgaaagtactctcgggcttggcttctttggaggcacacagagcgaaatatcctcgataaagggtcctttagtagtagacatgctcttcatcaagcaaaccgaatcaggtttgtttttctcgctgatgggcacataaacagttgttattagatccatatcgtcaggctctggaggatgactaactccacggaaggagctagaaccagcttcctcagacatatcattgcttcccttacaagtaacatcatcatcagcagctccaatttcttcaatctccaacaaaggatacttggccttcatcgttctaacagacgatacaacaggctcaaactcctgaaaatcattcatgttaccaccaaactgagtcatcatcatatcttccctatgcacattcagaacttggcttagttctctccccaatgtcgtagttggattcacagatcttcccgtgttgtatcgagcagctcgttccctcaaactctccaaatgcatacccggggcatctctagtttcaaagtctaagtatggtcttcttgataagtgaccagagacaggacctttactaggaagtctcttgagctcagcaactctttccatttccagcattcatgcgatttttaacaccaaacacaaatctctctttccctacaaaagcaaataacgtaaactaaatcaatctccaacctcaattaacacaagctcactagaaagatactaacaaaacccactaacaatttcgggaccatatttagaaatcttgtcggcaaatatatatatatatataaacacaacaacaacaacaacaacagtaacacgtgatttgggaataagccacaggacta

SEQ ID NO: 21774 - DNA, 2894 bp, Arabidopsis thaliana
tttggataaatctgcttacaagaacgttttagtcggtgaggaggaataactctaacgcttcatttattacatttttgaaaatgtttgtttattatctttgtttctccatcatctagatgtcattggagcgttggttgatgttggcgcattgactacagactattacggtctcaaactgagtttcaagttaaaagatagatagtaagtgttcttttcatttgttttatttacaatgtcactctaaacgctaacagtccttatttctaacgtagcaatgaagtcttggagtgcgacgcccgcaatcaacaggcggagtacttggatggttactttcagagtttgggtaagggaaattttgttgtcgcactcagcttttggcgtctaaccgaactgtctaacccgaagcttgagagccatggtgctatttcaaaggtggttgccaatccggacagagcagaagttgcggatatctcgatggtggtgttttagctagagggaatgaaccattattctccgttttaatataatataagactacatttcaattaagttttctttcccagttgttgttgttgtttccataagaaccaaactacatttcaatcgttgttgtttcctgtttccgtttaaatgttaatctaatttgttgttttatgtacgtgccttgttttattgttcaaatcctctcgcaatgtacgtatagtttctggtgtacgctatcgtgtacgtatattaattttggtgccttcaacatcaaaaactattagatttatacttatgttgtgtacgcaatttcccaatgtacgataaaccaagtttaatgtactatatagtgtacgtagacgaagacatctagtaatacttaaagtggtaattcattcaaaagccagaaacataaaaaggacaggcagtttatgtaaagggaaattcataagataaatcaactggaacgattcaaaaaacataattttttcaacgaagcatacacatgtgttacaagatatgtgtgcatccgtcataccgaaagacttgagagtagagccgagtagagtagcttaaaccttagcagctttgcttctagcagaatatagcaatctccttgccctacgcaactcggcgggtggacaaacctccaagacctttcccagcggcgagcattttcagtgtgaagctggctgatgtgatacatcaccatctctgcaaccgcgtgccagcttcaagggtgggtgtcatttcccagaacttttcgctgatcgggaggaaatccaagtgattaccggtacacgtaaggaacaaaccggttgcaaagcaagcaaagggatcagataaagcgaccgttgtcatgactgaaaggccctgagctactgtcacgaagttgctcgcttggcgaacaccttcaaggtaaaccgccgggatggatccacgttctacaagcagctcgaagtatgaccggaaggtagactccggttggagtaacgacggccacgtcatgaattcatcgattgcaagggtgttgatgttacaactgtagactaagttccttagcgtctctatgggagtctggctgacggggaggtagttgacaagtatgcttatggggtttggcaattggattcctaggtacaactcggttggaggggttagcggaggtaggaaaggcattgtttttcaaacgaggaggtttacacggattcgtgtattcaactaagtgtgtttgtcatgagttttaaagaggagaataaccatcaatgtaagtggatgggtgacgtggatgtatatttagtgcatcatattagtaacttctaatttaaacaaattcctgtgtacctctcataatcgcgccgtgtacgtctacaaaatactcattacgttctctgacagaaggttgagttgacgtctgtttgtatggcatataagtggaacaatatggcttcatgtatagtgctatattaggggtcaacgcatttactaacaatcttttcaaataaacattaacttagttattttatctgccaaatcaattgagtacattgctcggtaaccgtgtacgtctaatagagatattaatgagagtgtgatggaggtcacttctagagtgtatttgacagcgagtaattaatttggagcgaaatcttctatatatgggttatacgacgtcaaatcaaatttcctttcgtcttcatttacaaatatcgtcgctcactatgtaatctttatagttggaattaaactatgccacttgtacattatcatatatcgtgtacgtagatattttattattttattattttaatgatgtctcatattagaatactttgagctagtatgtttgaatcaattacaaagtggtaatttaattaaaaacaaacttccattactgataatcaacgtaaaaagctcacatattgttgcatggaaaacttataaatatgacaggatcgtggcgaatgtgagctctacaggatctggctaatctgtttagcacacaaccagatgtaacattggttgcaaagattattgaagagtctcgatctaatgtaacacacctccgcgcattcaggagtgcttacgtcaacacattccgggaacgaaaaactgttagcgtatgtgtattttaaagtattaccatatttctttatatcttctagcacctcctcacaaatgtcacgtgcgtcctccgattccaaagcataatggttgcttccgaagagccggaggtagacaccacccatgtgagcattaccagcacatatgtaaagaattgcgcatgcaagggttgcagtgtacgttgtagtgtatgttttagtgaacgtccacatttacatttctacatttgcccaacaaacagtgtacgttgtagtgtacgtttaagtgtacgtccacatttacattgg

SEQ ID NO: 21775 - DNA, 1834 bp, Arabidopsis thaliana
caatagggacctcgtcttcaatcctcatcctagacagatgatcagctacaccgttttcaattcccttcttatcaactatctccatatcaaactcttggagcaataagatccatctcaacagcctaggtttggtatccttcttcgcgtatatatgcctcagagcagcatgatcagtgtagactgtcactttagaacccactaggtagcttctaaatttttcaaatgcaaataccatagctagcagttccttctctgtagtggcataccttacttgtgcatcatccatcgttctgctcgcgtactagatcacatgcagctttttatcaatccgctggcccaagactgctcctactgcgtaatctgaagcatcgcacatgatctcgaatgggaagtcccagtttggagcttggactattggtgcagtgatcaaagcttccttgattaacttaaaggctgtcaaacattcgtcatcaaatgcaaactcggtttccttgcacagtagtctggtgagcggtcttgccaacttggagaaatctttgatgaatcttctgtaaaatcctgcatgtccaagaaaactcctgatgtctttgacagttttgggtggctgtaactgcatcatcacgtcaaccttagccttatcaacctctattccctcttcagaaattttgtgccccaaaacgatgccttctctaaccatgaagtggcatttctcccagttcagcactaggtttgtctcttcacatcttttaagtaccctgcacaggttcaacaaacacgaggagaaggaagagccatacacagaaaaatcatccatgaatacctctaccatctcctctatcaaattcgagaaaatagaagtcatacaccgctgaaaagtagctggtgcattacagagaccgaaaggcatacgcttgtaagcaaaggtcccataaggacaagtgaaagtggttttttcttggtcatttgggtgaatagggatttgaaaaaatccgctataaccatccaaaaagcaatagtaaggatggtttgctaatctttctagcatctgatcaatgaagggcaatgggaaatggtcttttctagaggcagcatttaacttcctatagtcaatacacatcctatgtccagttatagtcctagtaggtatcagttcatctttagaatttttaacaactgccatacctccttttttaggaacgcagtgtactgaagatacccaagtgctatcagagatagggtagataaccccagcatctaatagtttaagtatctcctttttgacaacctctttcaagttagggtttaatctcctttgaggttcaatgctagagtaggattcattttcaagatggattctatgggtgcataaggtgggcgaaatccccttaatatcatctaacgaatatcctatagctttcctatacttcttgagctcggttatcagcaggtttacttgatcagcagttagcccatcattcactatgacaggataagtagagtttagtccaagaaaaacgtaccttagcccttttggtagcggtttcaaatctactttgggtgccttgagttcagaccagtcatcggatactaagttggcttcagaggggttgttgtggtcgagtacacagaatgggctgttggtcgagtgatgaggtcgagtatatattcctcccttgctctttcacccaaatcttcatactctcctggattctcaactactttgtgttcatctaacagctttcggtacccaaaatctgcaaatgtaaatctccttccttgctatcctttgttagagcattctgtagatgatctgtttctcccagctcttctagca

SEQ ID NO: 21776 - DNA, 2392 bp, Arabidopsis thaliana
ccaccaatctctccggctaggaatctagttgccaactattcccctaagctacgacatctggaagtatgatggcagtaactcttatgcaactcacagtattcgtactcgtttcctgcgggttgatccttcgtctaggtgtaggattctcgtccgcgccctcgaccgcggcctcgtccttgaccacggggtgtatcagcttggcaattatgggctccggagaaatttcgtccttcatggtgaacgaatgtcccgccttgagcgccctttttgtggttcggagcgctgagttgggatttatcgctgcgaggcgtctgcttaggcggctcgtgactttttgatagtagttccattttttcctcatcggaaacgtaatccgaggctcggtgcaaggcatctcggattgtctgtggtttggacaagtttaactcctttcgaaattcggacttgtaccacagtgctttcttcagagcagagagagccgctacatcgttgattccttcgattttggctagggtagatcggatttttgcgaggaagtctcgaagtggctcatttggctgctgagacaatgaccacagatcggcgtctgacgtgcaaggatcgattaacaccgaatattgctctaggaagagcgtcgataggttctgaaaagtgtccacagaatttccctcgagtcttgagaacgaatccagggctagtcctttcaagtgttcgacgaacagatgacagagaccggtgtctctttcgtcgggtctaaatttggctcgggccacagagattatgaatgacttcaaatgtcctttcgggtcggaggatccattgaagtattcgaacctttgcttccctggatctgagattattgcgttggagatcctgcgtgtgaaaggagtgttgtgggactcctccagaatgaggtcgatgtttggggccaaggggactgtattatgcatttgggatcttacaagcttcatctcgttttctgctttggctagggagagcttgatagtgcttatttcttgttctctggcgcattcctcagcccatcgaacgttctcttctgaatcttcatcgtttgagacctcgatctgatcggcctcggcaaatctgctcagggaagagggagctgcggattctgttcggctcgtcgtgattcaaattcccaaagttgtcggctctgctcggtctcttccaatttccggcgcggttctgcggatgggcctcgtcgtgttgccaggtgtgtggaacacgagccgtgttgggttgagatctgctgctgttcgtcgatcccaaagatgccttgcaccaaaacgagtagtcctgatctgtccttgggaggtagttgcttcgagttgttgcgccaaagaccgattcgcctgttcttgatcttttaccttcttctgaagttgagccatcatacttcttaattctgctaggaccgcgggagatggcttcaggaacgtctgtctggtttggagggatcgggtttccctctacgtcaactgtgttatcggggatctgattgttgaccattgtggattggttggttggttctgtgttctgggagtaagagaaatctcgatagttcccctccttctagcgccaaattgtgagagtcaaaactcgcacaatagaaattgtactaagggttccttcaaagaacggatctttgtgagattctcaaagaacaacagaattgctgattaccgcggacggtgttcttggttatattattgaaataatgaggatttgatcatataagtgtttagaaatatggaaaataagtgttttgccttcaaaatcagagcggtttttatagcctgaggttgagagcgtttttgtgcgtgtcccctttgtttgtcctcagaggtgctttatatagggctttggcagatcgcttctcgcgatattctcggaagatttctctttatcttagagttggcgaaggagattgtctttatcttttgaagattttgggaacttttatattcggtgacatcctcggagattctctaatatctcttccggggttttcggaaatggtatgtttgatcttttattggttaagtcttttcttgaaggttttcttacccgatccgaagttcttctgagccgggttgagctgaccctcaggtcgtggctgagcgactcggaccgcgctagtcgaatgatgcacttcgagaccgggtcggggaacccttttgtggtgatgctccgaggcgttctcgatgtcgcctcgggatggttcctcgatgtgatctccgaggtgttttgaggcccggttcgggatggttcttcgacatgatctccgaggcattgatcatggttggctcggttacctgggtggaatctgaccccaacaggatttattgtgtagagtttatgtttagtgttt

SEQ ID NO: 21777 - DNA, 812 bp, Arabidopsis thaliana
  unsure (1)..(812): unsure at all n locations
atcctcaatctgactgtgatcactacatctacaactccaaagctatcaaagaatgaatgtgtttcatgatggaccgaggtggtgacaggatctgttatattcagtttccacaacggttcgaaggaatcgacccatcagatcgatatgcaaatcacaatactgtcttcttcgatggtgagttgttacattgatttgcaacacagcaaaattgtaatgcttatgttacaagccaccataacttaaacattattccggttctgaaacaggtaacatgagagcattagatgggttacaaggtcctgtctatgttggaacagggtgtatgttccgaaggtatgctctctatggattcaacccacctcgagccaatgagtactcaggcgtgtttggtcaggaaaaggctccagctatgcatgtccggactcagtcccaagcatcccaaacgtcccaagcgtctgatttagagtctgatacacagcctcttaatgatgatccagatcttggtctgcccaaaaagtttggtaattcgaccatgttcacagacactattccagttgcagagtaccaaggacggcctctagcagatcacatgtcggttaaaaacggaagaccacctggtgctttgctcctgccacgtacctccccttgatngctccaacagtggctgaagccatcgctgtcatttcttgctggtaacgttttgaaaaaagagatatgctctgttagtataaatggatatgtagttaaaatgttgnagtttattggcctttcagggtatgagcaatactgaatggggagatagaacggatgga

SEQ ID NO: 21778 - DNA, 1709 bp, Arabidopsis thaliana
gactatgcaacatacaactagcaacgagggcactgagtttatccggtgaaccaaaatgcttacaaggctatctcatcattgtccctatgcatattcaacaatccaaaaatgaaacactatagactcgatcctaaatgtaatccaactacatgaacactcttttttttttgaaatcattttctgaaatttttcaattttttttttttcgtctcaaggtttttctatgccatagactcaaaaatatacacaattcaacacacacttcctgagccctcctccaaacttaaatcacacagtccactgtgtgaataaacttagaagagagtactcaggacaaatccaatcacagaaacaaaatgaagaacaaatcacaacagatgatataatacaatggtgaagtgaggcgcttacctcagtcgaagaatgaacgtagttggtcgtcaagggctgcctgtgattgctcccaggccatagacgaaccgccctgttccgtatcagctccagcaggtgggtactcgacctcatcagctctgtggcggccaacaccgctctgaggatactcgacctctctccttctgttgaggccagcaccgcggtcgagtgatctcctcgagtgaattaggcgtgatctgctgctagatcgagtgagtgtagccttccttcttctcttgtgctcccgggactcgaatgacgaatgcctagccgggacatgtgagactctctgctgactaagctcaggcctgtgctgaggctcatccaatctcctcgatggcatctctaaaggaggttgtcctgtggaatagcagtagtggagcaggaacaactcagcttatctgtcagaaacttgatagtcttgaaacacttggcgagcagcttgtcctgcttcttgcaccacttctgcagtttacttttgttcctatgagcgttcactcaagctcttgctctcctttgctggaggcacatgttcaccaaagtgatacatgctagtgtcgaactccactgctctgtcttcatccatcccatcctcagcagcctcttctagaagatcatcttcatccaatggcggagcgttctcatagtagaggcgtccaatctctggccgaaaatcaatgttatatccctctattatccgtgtaacctcagggctagggagaaggatgctagctctcttatctgtagagtgctcaaacctgaactggtgcaagtcgccaaccattgcgaactccaggagtttgtagtgacgtagatgctcgatatccattgctcgtggctcgagtccatcagatgtgattgggactccagaagcgatcagaatcggtgtcacaacgccacctatgcacagagcgcctcgtgctctcttgtggttattgctgacagcccagctcttgtatccacacagatggatcagaagaagtacagagagaggtgtgtcatcgatttcaccttggagagacatgccgttcttagtttggcgaagagttcccttgaaagccatagcgatcatctccatatcagaattagtagcagtccctatgatcactcgggagtagagtacattggctatagaacgctggaagtacctgatgatagggctacgtatctgattgctctttgacctggaagaattcagcggtacagagctgccaatggtgatccacaagtctttcaactcttctctgtcatacttgggcttagttccccttccacta

SEQ ID NO: 21779 - DNA, 2386 bp, Arabidopsis thaliana
cccgttcttcaagaggcctcctctatggttcaatgctagaataggattcgttttcaaggtggatcctatggttgcataaactaggtgaaattcctttaatgtcggataatgaataaccaattgctctcctatactttctaagctcagataatagtaggttcacttcatcatcatttaactcagcattaatgatcacagggtaagtagattttgaaccaaggaatgcgtaccttagacctttaggaagtggttctagatcaacttaggccccttgagttcagaccagtcatctgaagttgggatgatcggctccctaaattcattggcagacaaggtcgagtggctggtcgagtatgtcctcgagtgtgcaggttgaactcgtgttgacccttcttcgctcattaccattacctctgttgctggtccattcaattcctcaaagggttctgattcttccattgctttatgggagtctaacagcttctggtatcctaatgtttccaaatgcagaaacccatcttcaccacttttagttaaagcactattaagatgatcttcttctgccagctcttccagtaactcatcagctaactgatccatttcttcgatccaaaagagttgcccttctatggtaggcttcttcatcgcgtctttgacatcaaaggtcatccgaaagtctttgccaaggtttagataaatcttccctttcttgacatcaatcatagctcctgcagttgctaagaaaggtctccctagaatcaacgggtccttgcgctcttcatccatctccaggactacaaagtcagttggtatctccacagctctgatcctgattggaaggttttcgagcaaaccatgagggatccttactgatctgtcagctaggatgagggatatattgcaggatttgtattgagtgaaccccaatcttttggcaacagagagcggcatgagactgactgatgctcctaaatcgcataggcatctattgaaagccaatggatctaaagagcatggtagagtgaatgaaccaggatcactaagcttcttaggaatgatcttcttttgtatgatagcactgcattcatgactcaataccaccataccttgcacttcttgaattctctccacgatcaagtctttcagaaacttgtgagagtctgggattagcgctagagcgtcaacaagaggtatccgcaactcaacctccttaatattcttggcaaacatagctctatatttatctgccaacgctttcttgtgacggccaggaaatggaagctgtggtttgtagggaggagggacaaagaccttttctttgtttttaacagcaactggttttggagcagttggtgatgctgctgggaagataggtcgagttgttggtcgagtaacgttgtcaagtggcagatcgagtggttgctcgagtgactggtcgagtgactggtcgagtggttgctcgagtgactggttgagtggttgctcgagtgactggtcgagtgatccgcgctttgatctccttcctgtgtttgtcatcagagtcagctgtgcctctgacggtcctatcacagtcctcgttgtaattgccatctgattgagcaaggttctctaccaaatcctagccttcttcaacatccttgttctggaaattttcattgctggcggtatccagaagcattctgatgcgtggtaggactcctctataaagagtgctgagcagagaggctttagtaaagccatgatgagggcattggttggtgtaatccttgaaacgctcccatgcttcacagaagctttcagcagtcttctgtgagaaaccagagatctcatttctgagtcttgcagttctggcattggagaagaactttgacagaaaagccttcttacaatcatcccaggtggtgattgagtcatggggcagattcttctcccagatgtgtgctttgtctcccaaggagaatggaaacaaacggagcttgaatccgtcttcactgacaccattgatctttgttaggttgcagagcctatcgaattcatcaaggtggtcgagtggatcctccattggcaaaccatggaatttgttcccctgaatcatcgagatgagcccactcttaatctcaaaattgttgttctggatagcaggaggtgcaattcccttcctctgacggggatcacgtggtgcatctccagcaccaatgttggcagggccattttgttgattctggtcgccagccatttcgagtggttgctgaggtacagggttgactgtggttctcctttttctgagttcgcgagctgtgcggggtatgttgtcgttgaaaaggagcttctggttgcctgttgatcgagttcgcatacagcagagctgtaccaatcaagaagacgg

SEQ ID NO: 21780 - DNA, 2381 bp, Arabidopsis thaliana
atgctcataacccctccaacaatttaatcttatgattatgcttctcacgaaatggaggtaaagcagtcggttcaatgaatatatcaggatactcattgagtacttcttccactacagactcctcaccaagctcactggttaaagcattaatagtacaaagttccccttctgtactctccgaaacttcttgtacacataacatggccagctgaacttgatcttcctgtagtttctgcagtttctgcgccttcacttccctgacagaacctgatgtaagtccatgtaaaagtactttctgattattgaatttaaatcgcatttccagtttcttgaattcccaagagatacgacccaaagtctccaaccattgcacccctagtaccatatcaatcccttgtaagggaatcaataagatatcagactgaaaagttgtagtctgcaacttccaagagaaatcagtaactttaccctcaacacgcaatttcctgccatcagctacagatacacgagttaacccagctgtgtccaccttacacccaagtttagctgctgtatttggatccagaaagttgtgtgtcgaccctgagtctatcaggatgaagataatctttttgtcatatgttcccttaactctcatagtcttgtaaccagctattcctgaaaccgcattgacagagatttgtggcatatgttcatcatcgtcatttaccaactcttctctagcatcttcaaactcttcatcaacatccattcgaaacagttgtgttttcttgtgaaccaaataatgttctggagtgtacttctcatcacaaaaatagcatagccctttagacctcctatcactcatttcttgttgagacattttcttaggttgctgactaaccggtttaaaatttcccttgttcccataatgatctgtcttagactcgccttccttctgatatttgttataaccgccagtaggtgcagaacgatttgtggaccaagtagtattagctggtttcttagggtgtgctttctcatatgtcttgcccaagaacaagcaatgtctcacagtttgaggctgaaacatccggacgtgcatttgagtgtctgtcctgagtcctgccaagtacacactcaccaaatattcttcagagagattaactcttgttttaatcagctcaaatttctgatgataatcaatgatgccatcagtttcctgcaaatgttttagctccgccatagggtcatcacaatcatcctcaaatcgttccttcaacagcttcacatatcccttccaatcatacaacacctcaagaccaacacccgactgaataaaggactgatgccaagtagaggcatggctatcaaagtggatcgctgccattttaaccttcatatcttctggagttgaatccacaccaaaaaactcctcgactttaaacaaccactctttcaaccgtgtaccatcaaaccgaggaaaatcaattttccctaaccgtgtaagattattataagcattaaaatggtctgatcgcacctgctgatgacgagcatcacgatatggatcagggtaaccggatctgttctccatcgactgagacgacctcggcgcactccgatctaacgtcgattgctcatccaccatcttaccagctgtagatcggctaagcactgcatacaaatcagcaaactgcttcatcatctccttatgttgctcagcgaccgtcgtttctaaccgcgtaactcgggaatccagcggaacctccaactccacctctttcccctttccgtcaccctcctgcgaccttgtagtcaccatgttttccgaggaactacagagctctgatacctttgttacagggaaacctgcgattcacaagaacaatccaaatctccaattatcattcgaaaccaacaatcaatcgatgttcataaaacaccaaatgattcagctagctctcgatgtgagagaaatctagcacttacaaaggttctagagaattctgaagattacagattattcgataatgaaagcatgagcataacatgttgctcttatacaaaaaggtaaagaaagtaaacgttaaccacgttaataacgatcgccgttaacgtccatttgcattgccagctccaccagctcgccagctcacaagtactttgcctaacatccgacttcatattgccagctcgccagctcgtttatatgcgtttgagctttaatgctcctggtggacccaatggttatatgtgaccagatcaatgggcctttaatgggtcaaaattattatcactcaaagcttctaatcaaacaaaggcccaaatacgtgaagagctctccgccgtaaatcagtggcttttcactcgacttcgccattcgtaatcgccgtcgagct

SEQ ID NO: 21781 - DNA, 2043 bp, Arabidopsis thaliana columbia
gtaatgtgaagtcaaacataagtagctatgtgtgttctattttgattgcatgtaaacgtaaatcttactgagttacaatattataaatgaaaaaataaagaataatatatgttactaatgtaccaagattctaaaaacaatatgatgatgcaacgttattgaaaacttcattaattaattatatatagaactggaaaatagagtaattcacattagtgaaaccaaagcatgataaactgaagaaaacattacaaaatcaatagatgtgtcattttttttatcgtagtcaaatcgagaacttgaatcgtgtgaataattatcttaaactcgacttataagagatgacaaatcttaataaatcgtgtagatgttatggtagaaacaaaagtaaactaatattagattttaacccgcggtacaccgcggagaataatttattttttaaagttagtatatataaaattttgcaaattatatctatctataaaatatttttattttatagtttacaattgttattaagtaacgtcccgccaacccgctccgtaaaaaaaccatttatattattaatgttgatcttatttatgatatgtttatgaattattgtctaaatattttgtaattttgtagtaattaaatgctatcaaatatctctgcggtttgatgattataatcgaattattatagtcatggagaaaagcaatatcaaaaatgataattttgtagtaattaaatgatattaaatattttgaaagttttattttagtaattaatcgtgtagttaatgtggagagatttagggaagattgttaaatgtcaaatatttaattcgaagattttttttctaattatcaaaaacaaacattaaaatctagtggcagtcgtctgagaaaagctataagaaaatgagaaaaaaaaaccgtgaactctcccaagcacgaaaatcgaagacatcctcatgaatctattttccgacgctggtggagcttttgctcgccggcgtcgggatgtacctaagctcctccaattctcttgtctcagttccgcatctcgcaaactctttgtccccttttgtcactctcccgaccaccacagcgcttcctttttgctttcggttttggtggtcagagatccacttttcaggctgcccagaacctcttctcccatttggtcctctaatctgctggatactcttgatgaaacctatcccgttgtgctattgacgagatgcttgaaagctaaatctgcaaaaatggttgatctcgagcttaacctgtcacctgcgcctagatccatgaagcctagctgctccgctaccctcatcgaccaacgttctcattgggttttagaatcgttggtcccagtgacgaagttgtcgacgaatggatcaaccctaatccatcaaaccaattggtaccgctgtctctcgcctttatctcctccagtgccacatccctcggcggtaactctttcaactccgatcttctgctcgccgtcgtctagccgccacactcaaagtctcatcgcccatgccaaaagaaaactagggttttcggttttgggcctattccagttcggcccatcaagttccttgtcttggcaaattcatttatttgggcctttaaggtgtttgaagcccaactccaataggtgtgatcctaatcaatttctgcaaaaatctaggtttaatcgaaaatcttatttgtccattattagccaacgttggtgtcgatatttgaaaccagtttttcatggacaacaattggaacatattcggtcaatgttgctttgttggtacaattatatctcgagaaccctgcctttcgaagcacctagagagatttttcataaaaccaaaagagtgaagaagaacggcactatgatcccgtctccacagagcggtgattaccgtagctttttcaactcttcatccccgcttcctttgattatcgagctcgttcatgtgcaaatcatcaagttcaaggatagttctcaaatttttaaaagcttgaagaagaacggcattataaccgcatttccatg

SEQ ID NO: 21782 - DNA, 539 bp, Arabidopsis thaliana columbia
aatatcacagtccgccctatttgccctactgctacggaaccagtcgcttcctccaaatgctgcaccgcatcctctagctcatcgggcgatgtcttgcgtattttcacctgttcctcatataagaatcaacaagagactcgctcaagtaagccttgaatgttttccacagtttcaatccattctcatagatcaatcaaacaacaacattcctttcacaaaacataagaccaaaacaaaaatcatgattccacataatcttaaaccctagtcgagtagaagaatcatcccacttttaacacatgagtcaaataaaccacaaagttacacttcctcaactctaaatccctaattttgggggagattacttcacttccatctcattagacctaaagattgaacacaaaacattaataaagttgatacctttaagagctcgttcttctcgagagtctcgaggaatgagaaaacgacagaatcagtaacaccagatttgccgacgagttgacatttcaatttatccccaaactatgcgcgtaaga

SEQ ID NO: 21783 - DNA, 572 bp, Arabidopsis thaliana columbia
ctcgcatttctctagacgcatcaaacgaggttcgagccgttgatgtaggcgtaggcattgtttggtgacttacatcatcattttcttgatcaacatcaagtgtgatctcttcattatttctacctctccattgccgattcacaggctctccagcgaccattttcgttggagattcatcaaccggtagcttcccgtgcacgaaatcgaaactaccgcttaatctatcgccttttcgactaatagcgattggatctttatcacttgttctcaccgccgtgtgatccgttgacgttccagtagtgttgtcttgccagaatttgtaactggcatcacgttctacaggcgcgttacgaccatcgtcgaggctagaacgagtgctgtcgggtttctggtcatcgaccaccatgccggaatgatcaggatggtgatcgtggagaattggcagatgttcagggcttggctcgctttgatctccggggcttcgaatttgtttgtatgagctatgagatttgaaggaatttctgaaatccatttgaaaattaattgttattattaaatctaagaagaaaaat

SEQ ID NO: 21784 - DNA, 1305 bp, Arabidopsis thaliana
cttgattcacctcttttgtgtaagatcattcattcattactctcatacagtattatattgttgcagaatgctatggtattccagatatacgccatattctctcgctcttttgattcctctgttcctctggtagagcctccttcctacagaggcgttgctcttggtggtgttgccaccggtgctgtacagagcctcttgctcacccctgtcgagctcatcaagattcgtctccagcttcagcagactaagtctggtcccatcaccttggccaagagcatccttaggagacagggccttcaggggctttacagaggcctcaccatcaccgtgctccgagatgctcccgctcatggcctctacttctggacctatgagtacgtcagagaaaggcttcaccccggctgcagaaagaccggacaagaaaacctcaggaccatgctcgtggctggtggccttgctggagtggccagctgggtcgcttgttatcctcttgatgtcgtcaagaccagactccaacaaggtcatggggcttacgaggcattgccgattgttttcgcaagagcgtcaaacaggaaggctatacggttctctggcgtggcctcgggactgcagttgccagggcctttgtggtcaacggtgctatctttgctgcttatgaggtagccttgcggtgtctattcaatcaatcgccatccccagatattgtcacaggagattgagtgagtaaagggcaaagaaggttcattagttgcagtctggacctgtgaatgtagttaatattagcacatagtttgagatggatttggattgcatagcattggtcaaacaaatctgactcgctttagggatcaggcagtttactaatcacagttgatcatagagacgttccagaaatgattacaaaccccaaagaaaacagatgaaatgaaaattctgttactatatacttctctctccacttctttgctaatggtttttgtagatactcaaaataagagtgccaaggaagtcctccaacatgttcccatagacacggtcactaatgctgattggtttcggatgaattttcaacatttttatgtttaaagaattggtgcaacagtctgtgaacatctccatagcctttggtggaataaataagacgatctttgatccactttgggagcttgttggatggatgagaatgagatgttcttttggatggatcattagaatatcgagcatctaccagtaaaatggatgcatagtccttttcgtgtctgattgccctacctgaaaaacaagccgggaagaacattctgtttc

SEQ ID NO: 21785 - DNA, 569 bp, Arabidopsis thaliana columbia
tactcctactacggctgcgctgcctattccgacttaaccggcttgtttccgctagtttctccagcctttgtcgctcctgttctcgtttcttagccgtttctgttgcagagtctttcttaactgcgtacaacatgattcatccaccatctcagtttccaacagcaaataggaataaacttaatgatagtaaacataacagtaattaagatcttactttgcttcgttagctgtttgttcatgattctcttcagtcgttcttggggagtttctttcttctctgcttgtgactgcttcgaagaggaggtacctgctacttttgaaagcttcgctagtgctgtggaagtactgcaagaataaaagaggaataatgttccaattcacaacaacaaaagccaagggaagatacaaaaccaaaaaaaaactaaaaatatgtaatctcatccatacctcactgtcgattttgctggtttggaactttgtcttctcaagggatatatcagatgcaggatcaacatgcagcgcctcaagaatacggcctggcgatggtctgcagggaaataaaatattat

SEQ ID NO: 21786 - DNA, 580 bp, Arabidopsis thaliana columbia
  unsure (1)..(580): unsure at all n locations
nnnnnnnnnnnnnnnnnnnnctaaagtttgcgtaactcttcttcttccggcgtcacgactggttgtggcgcatgataccagtgcatggttgccccttctggcgcaggttttaacgccacgtcgcctggtaacacgacaaccgaaacgccacggttaagcaccgctttgcgcatggcaatcgccagtacttgtgggatctgctccgggctggaaaccagctcgcaatagtgactacattcgcggaatagctcttgtgggtgggtttcctggaaatagccgctgccaatttcgctggagggaatatgagcggcaatcgccagtaccggaacgtgattgcggtggcaatcgaacaggccgttgattaagtgcaggttgccggggccgcacgatccggcgcagaccgccagttctccgctaagttgtgcttcacgccacgggcaaaggcccgcacttcttcgtggcgggtggacatccactcgatggtgcccatgcgattaagactgtcactaagaccgttcagagagtcgcctgtgactcccagatgcgtttcaccctgccgattcgagtgttttggcgatat

SEQ ID NO: 21787 - DNA, 478 bp, Arabidopsis thaliana columbia
gattttaggagggttaatgaaatgttggaagagatgcgagagaatgggtgtaatcctaatgttgtgacttatactattgtgatgcattctttgggtaaatctaaacaagtagctgaagctttaggagtgtatgagaagatgaaagaagatggttgtgttcctgatgctaagttttatagctcattgatacatattttgtcgaagacttgtaggtttaaggatgcagctgagatatttgaggacatgacgaatcaaggagttcgtcgtgatgttttagtctacaataccatgatttccgctgcgcttcatcactcacgagatgagatggctctacgtttgcttaaaaggatggaggatgaggagggggaatcatgtagtccaaacgttgagacttatgctccattgttgaagatgtgttgccataagaagaaaatgaagctactgtgaatattattgcatcacatggtgaaaaacgatg

SEQ ID NO: 21788 - DNA, 568 bp, Arabidopsis thaliana columbia
agacgaaacaagaacaggaaccggagccggccgaacaagagctggggcttgggcttgggctggggctggggctggggcagtaggcttctgaggtggttgaggctggggttgaggcggtttgggtggctcaaggatcacgatggacttgatagaaccgtctcctttgtagcaaagtttgttcattagcctctcaggatcgtaacaaactactttgatgatgatcgtgttggacttctcatcaaacaattcgtctgttatttctatttttttttgcaaaacaacacataccacaaaatcgtatccatttatcaagattcagaatcttctcaacccgcaataattcaaatgaacaaagaaactcaaattaaagaaagaaactcacgagggaatttgcggatagctttcttgacctttttgtagcatttggaacagtttagatccactttcaatttcatcatcactacctgtttgtgcatatcatataatttcatgatcattattaccttaattagtaactctattagagggtaattatggatatgatcaataaaagagaagtaatatgaaa

SEQ ID NO: 21789 - DNA, 518 bp, Arabidopsis thaliana columbia
ctataatatgcaataaaaaataaccttcttcaacaaatcaataagccaggcattttagtactctcgcagatacattctgcagtcaattttgtttaggttgagatcaagtgtatacctttaacttatttggaggaatacactccacgtttcctactttcaatgtacaacaaccaacagtatctgcctcatcgtcatcctatacaatacaaataagacaggaaaatgtgagagaattgcttgacattccagaaacatgttctattatgagtaagaagcgggtcttatggagtaatgatctcttataagccaaaaccaatgagaaaatgaatagaacgaaggatctctttaattaaagaagaatctttgttaacttaccttctcatttcccagcctaaggcgtagcttatcgatgagatatgttgccactgctatttgccgctttgttacatccttgttattaaaatctttggtgtatgctgctctaatactcgctatatggttctgaaacagatggtatg

SEQ ID NO: 21790 - DNA, 216 bp, Arabidopsis thaliana columbia
gtcttgttctaaattttgtgagagaacaggtgatgttgtttggggcgagggacgaacacgtgatcgacaagcaaatgcagataccggatgcgtttaaccactaccctaagcgattagtacagagaatgcctccgcatcagataccgaacgatacatgtggtgcactcatgactacacacattgggagatgtatgcaattggtaggaacatgaaccc

SEQ ID NO: 21791 - DNA, 572 bp, Arabidopsis thaliana columbia
cagagctaattttgtcaccatcactgtgctaatggtattgcagataaaggaactgatggagttaccgacaaatgaatccatatttactgtaaagaatattctgaaatatatggtggttgtagtcgttggaacagccatagtttccggaatgtatcttgctaagtaaattaatctcaaggtagagtgagtttctcatgaggaggataaaacttatgctgacataaaatttcagaacctgttaaaaacatatgctgtcatgattttatctacttttggttttaggatgaataatttcatataagaactatacaaaataaattatttcacattccatgtatcaactcagcttctaattcatttttttaaccatctcgaatttttacttaggatcatatttattccgtgactcaaaccttaaatttttgaatttacagctatatatctattattattattttgagttttcattttttttgctgtgaatgctaaactagacaatcgaatatcatgccaaattcagttactatcacgacgagaaccatagtgttatatacagcacacacacaaacaag

SEQ ID NO: 21792 - DNA, 460 bp, Arabidopsis thaliana columbia
ggtgtagcctcaacgatggctcctccacttgtgttggtagtgctgctactattatcggcactagtctcagccggcgagctttcacagtggcgacttctgcagcggcagtccagtacttcccatagagagagtgagagattgcaaattgtgtgcactctcttgaagctcataattattaggagcattagaggcacaagtgacgactgtaggtaacaagctattggtttgaaagtagtagtcggaggcgttggtttgatgaatgtcgttataaggtacgaggttgtgatcggtgtgatgatccccgatttgctcactcctaagaaatcagccacttttggaacctctccaccttcgccgcctccaccatgtggattgatcatattccatccctaatatgaaagattataattaataattttggtggtgaaacacaaccaaaaatttgtaaaaaaaccaggaa

SEQ ID NO: 21793 - DNA, 587 bp, Arabidopsis thaliana columbia
aaagttaatcttgccatcgtaaggttgtttgaagtttgaactgccaattaggtggagcaacatcatgaaagcccaaacatttcctatcacttgtagtgacattataggacaaactctctccggttagcttcaaattagtatcccaatcctgtccccaatgccaatgcatctgaaaccaaccacctctcttcgaaccttccaccttaagctacatcaccaacatgttcaacgttgtaaacaaaaaccatcaagaaataaggatatatcttcctaagcgttttgaatattgggaccgatgaactcgatctcgactcggtttggatcaatctcatcggtcccaatattgaatgagctaatagaggttctttcaaaagagcttttagacaccaattatctaagcttttccaaagatgcaacaatatactaatttctaaatgaaaacttatattttcgaaggattgattaatggaggaatgagatttcgttgaatacacacataatatatgtatataattcttccgactagcaaaagtttatcagatttcataaattgtacaaaagaatatagttataccattttctttgta

SEQ ID NO: 21794 - DNA, 835 bp, Arabidopsis thaliana
gccctatatgcatatggctacatgtttgagttatattcgattatctggtgaaagatgagattgtgagtttgtaagtttttgacagtgtagaggaggatccaaaagaaaagaggaaaaaatggactatatgtatggaccagggagacaccatctgtttgtaccaggaccagtgaacataccggaacccggtaatccgggcgatgaaccggaacaacgaggattaccggtcaccagccattccggcgcttacgaaaacattgttggaggatgttaagaagatattcaagaccacatcagggacaccttttctgtttcccacgaccgggactggtgcttgggagagtgccttgaccaacacgttatctcctggagacaggattgtttcgtttctgattggacaatttagcttgctctggattgaccagcagaagaggcttaatttcaatgttgatgtggttgagagtgattggggacaaggtgctaatctccaagtcttggcctcaaagctctcacaagacgagaatcataccatcaaagccatttgcattgtccacaacgagaccgcgaccggagttaccaatgacatctctgctgtccgcacactcctcggtcattaattcctcacaaataatctgtttttcttttgtgttttctctgttttaaatctcacttacattagggtttacatacagatcactacaagcatccggctttgctgctagtggacggtgtttcgtccatctgcgcgcttgatttccgaatggatgagtggggagtggacgtggccttgactgggtctcagaaagccttatctcttccaacaggacttggtatt

SEQ ID NO: 21795 - DNA, 555 bp, Arabidopsis thaliana columbia
ggatcccctgttttgatttcctcttgttttgctttcatttcgaaacaatgaaacgaatgcaaaagattgattggtaattgtttactgaaagtcagactctttagctctgtttaggtcagaattgcagaaatttaagcaccactaagcttggaacattagatttgtaggttacaggtcactcactctagccaagttagagtacaaatgactgtgtttgcttgttgtgtgaaggaacataatttaggagattttgagactttgcgtgatggatgtgtgcgtcttgtttacttaacgtgtcactttaattgtcaggatgagaagtattggcctttaatgccaccattgccttcatatggttacggtagagagcgtccgggacctcgttatgggagcttaatccatggtcaaaacctcaaagatattgtgataactggttagtggtttcctctttcgagttcatgtttgtgaaattgtggtaaccgtgttagtaactaaggggtataaggaacaggtcataatggaacaataaacgggcaaggacaatcgtggtggaag

SEQ ID NO: 21796 - DNA, 510 bp, Arabidopsis thaliana columbia
cgtagttcaaacgtatttttctaaatttcattttttgtttgaaaagcaagttactgagggaaaacggagccacgtcgaacaatatcttgacacctcacaataaacgacacgacgtgtacactttcgtcaccatgtagatttctctttttgttttccccctcaaattctcactttactcaaaagattcctcggatcatcagaaaatggctatggctacgcgagcgattcgataccagttaccgtcaccgagatttagagctcctagatgcgaatcatcggaaccgattaagcagattcagatccagcaacgaccaagaggtggcgatttagcgagaacgggaagatcgtgctccaaccaaggctttgcacgctgagatcttatggatctgatatggtcatcgctaaaaaggacggcggagatggtggaggaggaggatctgatgttgagttagcgtctccgttttttgagacgcttacggattacatagagagttcgaagaagagtcagga

SEQ ID NO: 21797 - DNA, 379 bp, Arabidopsis thaliana columbia
aagtttctagagacgtgtttttcaaggaaccctaaggagagagcaagtgcttcggatttattgtctcatcagttcttgcgtggtgaagtggtctccggcttctcgcttccgccgttgaagttgaagattaaactagcaccggagaaaccgacgaatgtttccaaagagccctttgaagctaaagattatcccaccaaagcccccacagtttaagaaaggtgggattaaacccatgaagttgaagattatgcctttgaagcctccagcttctagtttcgtttctgttcaatagtctgttgaaaattcgaaactgtttcttagtttagaattgtagatcaagttacataatgttaccaaaatgtagatcgtcaattcacaa

SEQ ID NO: 21798 - DNA, 182 bp, Arabidopsis thaliana columbia
caccgagctgttcttcaacggcaagagcgccgaacagatcgaccagatcgccaggctgggccgctggagcgtctcggcgagccggacgagatcgccgcggcgcgtgtccttcctcgccgggccggacggggcctgggtcaattcccaggtgctgcgggtcaacggcggtttcgctgagccgt

SEQ ID NO: 21799 - DNA, 527 bp, Arabidopsis thaliana columbia
gaaaaacatagtatcatctaccaacatcatatggttggctctagaactgccttttccaactcggatcccaagtaacaacccatcattatgtgcttttctacacaaaccagacaaaacttcactgcataaaatgaaaaagtaaggggaaaggggatccccttgtcttattcctctctagggtattatagcaccttgagcagagccatttaggagaaagaaatatgaaattgtagatatacattgcataatccattgtatccacttatgatgaaaacccatttcctccattactaattagatgaaatcccactcaatacaaacataggctttactcatatcagttttaaccgccataaagcatcttttcttagctccaaaagtctttaagtagtgtagagtattgtgtgtgatcagcacattatcagttattactctttttggtacaaatgctgattgattttttgaagttatctcttgaacgactggctggagtcgttaggaagacaatttggagatgattttttaga

SEQ ID NO: 21800 - DNA, 442 bp, Arabidopsis thaliana
ctctagatataaggagagaacccaaagatcatgctcgatgctcaaaacccatgaaaactttcttctcctcgtcaatgaagaaagtaattggaatatctatattaggtcccaaatccattctcaagaatttgctccacgacaccatttcggcctcaatcttagtcgtaacccatatctcaaattcatatttagatgaaatgtagtgctgaaaaaaagctgcaagcttctcttctttaacacaagataaattcacatatgaatatccacgatctgtagcgccaaacggtaaaggtagaggcggcccgaaactctctcttgtaaagtcaaaatagattatgtgatcgatgttagcttctgagctactttttacaacaggccagtaagcgtttcccttgagaaacacgccacagctagaataacatatccacgagtgtgaagtgac

SEQ ID NO: 21801 - DNA, 890 bp, Arabidopsis thaliana
gttgctacgggtttccacttgcgctccaactgcaagtcctcaactccattcctgccctctgtagtaggattaaagagcctgcggattttaggattttcattcaaaggcctgctgttgacctaggtcgcacaattcttctccgggagtcagatgttattgacgctgaatgcgctggtaatgtaagtaataatcactaaactggttatatgattgacatagagttaagttttagagtaatgcctaaaatcttcaattttggattaatatgtttattgattatacagttgacagtggaatacacactataccagtcagaaacagttaatggagacctctgttggccaaatgaagatgaagattcaggggtggagctgataatcactctgatcaagcaaaaacaccgcttcaactcacatacttggcctgtacacggcctcccatgctctcccaatgagcctcctagtgtcacagttcctgaaccagaagaagctcaatcagcaggcaaggacggagtagagtttgttgaagaaagagaaccaaaagaagctccattaggagaggatgatgacgtggagtttttggggtccagagaaccaaatcaaagtcaaacatatgatgcagggtgtgttggtgataaatctgaagaccccaagtcaaggctgagggctgagaagaaccctatccgtcgcaagccatttacgaggtcagccgggcgtaaagtactattgtcgatccccgcccactgggaagaagaagcccatttctaagacaaaacaccctcaacccaaaacctctgctgctgctggagtcgtgaacacacaactgatggcggagaggcatccagactaaggcaggaaactctacttctcagtttgtgacacatgctgagt

SEQ ID NO: 21802 - DNA, 586 bp, Arabidopsis thaliana
cgggtactaatcacggattttaagttttactatttcacatttactttgtgtttttccggctgatttttctcggtaataacaaaactaacctgatggaatccaacttctttagtgagaggaacaccaagctcagccatacaagcatgaatccgatcatcggatccgtacaaatcggagtatctctcgatacaccgatcttgcatcttctccaaaaccttggctaatggataacttatagcaaaccctcctccaccgtacgccattccataagaaaactgatgaagattctgcaaatgactctcggacggagctccgatgtaataaaactgtttatgatcgtactttctcaaaaccctaacaagattttccgtgaaaaacacggtatcgtcgtcacccatcacaacccacctcacgtttctctccgcttccgttccgtttaacatcctcaccgtctcggacacgattctcgtgatcctgatcgctgatctgtgaccgttacggtaacggtacttgaaactcgacgtgtcggaagagattctgatctgaggcaaagctgatgaagaagaaacggtgtcgttgatgggtt

SEQ ID NO: 21803 - DNA, 482 bp, Arabidopsis thaliana columbia
ttcaacatttttctggtactttgccctgtttgaccagaatgttaaggagcgcagtccaactgatcaaaatatataggcaatcaaatgctgaagttgatgcattgatacagaaaacatcattaccaaatcgtagacgagtcaggagtgataccgaaaaaataaccccctggtttcagtaaacatgctacattagaccggagtcatctcgcactctcctcagtttcaaagcataactacataaagaagattttagaccatcacatccttgctatgctacatttttcggagaaaacaaacgacaaaatctcaaacctggagatggcgccaacaagaaactaaatcagcctgctccaatttcttctgtagctggatttcaaaatcatcctgtgacacaaaatgaagcaaaaactaagacttttgctccagattacttagtttagctgaaacacatggaaaaacaaaaaaaggccttgccttggaag

SEQ ID NO: 21804 - DNA, 330 bp, Arabidopsis thaliana columbia
tggaggtagtaagggaatagtcaaaccacaacaaaggagtacaatttgaagttatgaagaagggagggcttaagtctccatagctagtggaccgtccgaatcgccgttgcttccatttaccgaaccaccttctgtttccggtgttttctcggcaaatctctctagcagctcgcggcaatctgcgacagtggccataacagccaaactagacttccctctccagcaactgatggcaattgatgatgcatccgctttcaacggtacttcacctgaagcaccagtagaaccatatgaatcacatcgtgcatgatgaaattcaaatgtatatct

SEQ ID NO: 21805 - DNA, 524 bp, Arabidopsis thaliana
cacttatcttgcatcatagatatgcttgcgcgcagtggctacttggaagaagcttatgcactgataagaagtaaagagggtattgtaagtcttagctcatcaacatggggagcttttcttgatgcatgcaggcgccatgggaatgtgcagctcagtaaagtagcagccacgcagcttctgagtatggaaccgaggaaaccagtcaattacatcaatttggccagtgtgtatgcagctaatggagcatgggacaatgctttgaatactagaaagcttatgaaagagagtggttcctgcaataaagctccaggatacagccttgtgtattgaactaagagaataagacaaaatctccagaaagggtatacactgtggtacaagggtggacgttaacaaggctacaaagagcatctcaaggtctcagggagtagcaacatgatcagaattacaataaaagaatggatatctcatttcttcgcactcctaattcatcaattcctacaagactcagaccgctacttggt

SEQ ID NO: 21806 - DNA, 550 bp, Arabidopsis thaliana
tgaagatgttgttcaaattgtcaagaaaaaggtacagaagcataaactattttctgatctctgtctcatgatgagaatgctacatcaaatgttgatgcttgtcgaaatttcaggtgagagaagaagggggaaggggacggttcaagtcacactcgaacgcacctgctagaattgcagaccgagagaagaaagctcaactaaagcaataaaacagttactcatcctgagttatcccaagtaatacagatctcatgtgtattagaactatgtaatagttgttgctcaccaattctactgtaaattctgttcttagtctataaaaaggcattggcattcatatcttgatttcatattgacaagagctaggaatagattgtttcagaaatacgagaagtaaacgattaatgatccaagtgccaaacaacgacatttgtagtctcgaaactaattccttaacattcatatgtaaaaaaaagataaacagaagttgcttctgtatctatattccgtgtatgtgtttcatgggaccaacaagctgctgagatgattg

SEQ ID NO: 21807 - DNA, 526 bp, Arabidopsis thaliana
gtctaacggcctgctttctttgttcaaaaggcagctcttcatttcattgatggtaagatatgcagctgcattttttgagagatgtatgaaggcgacttggtttctactttctatggttatgtaaacttttcttttcttatttgtatttttctctagctgctgctaggccggaatacaagctcactgatgaggttaagaaagccggattttctattgaagcagatgaacttgcatctatggttcgcaaaaatgacactaagagcctggcacagaaaggtggagttgaagaacttgctaaaaaagtatctgtatctctctctgaaggcattcgttcgagtgaagtgcccattagggaaaagatatttggagaaaatcgttatactgagaaaccagccagatcattcttaatgtttgtgtgggaagcgctccacgacataacccttatcattcttatggtctgcgctgtagtatcaataggtgtgggtgttgctacagaaggatttcaaggggaatgtatgatgggaca

SEQ ID NO: 21808 - DNA, 1138 bp, Arabidopsis thaliana
tcactctgcgaactccaccgctttctggaattcatacaatcagagctataaataacagagcagagtaaaacctatctccagagtttaatataagcgtagacagagagagagagagcttctttcttcttctcttcgtcgctaagagatgatcttcgaatataaatctctgtaaggtttgcgaagaccggagtagtgaatctcggaattgttgaagaagacggtacaccggaatcaattgcgattttgatttatgggaacggtttgcgaatctgtagcgacggcgaaatcttcgacggcggtgatgagctccattccgccttttctgagcaaaacgtacgatatggttgacgatccattgacggacgacgtggtgtcttggagcagcggaaacaacagcttcgtggtttggaacgtgcctgagttcgccaaacagtttctaccaaagtatttcaagcacaacaatttctccagcttcgtcagacagctcaatacttatgtgagtgaacttcgatcgattcttttttatttgtttttctcttcattgattcgattttcttcaatttcgtagttcgattttagggaatcttactttatgtgcttcatttttattttactctcttgttttttttgtggttgaattaagcattagttattgataaaactcacgaatgatttaaggttgcaagaaggtgctttgagaagtcgactcctatttagtgtatagtatgatgctactgattgatgttcctatatagttgttgacgctggtggttgaactatgcacgtctagtaggttgtgttaatgttgattttagttgcactaactgttaagattggatctttttgggttctgacaaactcgtgcaagataatttcacatatttgtattgttcttcagttgttttttgtacatgtataccctgtgaactgcaggcatatatgtttttgtttttctaagtatctgagcttgcatccgtgtctgtgaggctggaatgaattttcttaggtcaagcaaaactaacaagtgtatactcttgcgtacgttgttctcccctgttcttatttacttaccaaaaggttccacgaactttgcaggcttatttggacatgtgctcatatgtgtctgacgattggttga

SEQ ID NO: 21809 - DNA, 425 bp, Arabidopsis thaliana
tgtcttgtttcttcttgtatagggcttacacggccttctcttgttgatattagctcggagaattgttccatctcatcaagaatctgtttcttcttcagggtgtatgtttcgctttcacttgggtgtccaaacgaattagataccatcaaatgaacaagatagttgcagaactcactatgatcatggattgagggaattttccgttgcacttgttcttcaactgtctcatctcgagttccattcctgtgcatttgttttctacattcctgcaggaccagagatttttatgaaatcaatttgatgtagtcaaacctatgtcgagtaaacttatctgcgttactaacctggaatgcacgatccaacttggtcacttgctgggaattcaataactcagcctgcataagttctcgagataatattacaat

SEQ ID NO: 21810 - DNA, 543 bp, Arabidopsis thaliana
cgattccatgagtgacttcttcagctgtggaacgagcagagaacccagatgctcctttccaccaaaaaggccacatgtttgttttgtttctatcttctgtaccacaaaattaaagtctaatctcaaccaaaccaacgctagctgatgatcaaacacacaccctagtaaagttgaccaattataaaatttctttttccgagagcttttgcaatgtgcccatgctctgttctcaaaacaaggcactgaagaatctcgtataaaagtattaattacagtttcatttgttttcttccttaatccagagataagaataaagatgtttgtatacactatttacatttttgatacaaatgttgttaaatgtgaaatttggtattcgtttattgttcttcataaactaataataagcaattaacaaaaagtttgcttgacagagaagctgatcaatgtcaaaggttttcacagcagaaagttggacatacatcggacaaacaaagacagactccaacgaagaaggaaataacaactctctctgggtgtgta

SEQ ID NO: 21811 - DNA, 2069 bp, Arabidopsis thaliana
catcggtctcgccgtcaacaaccccaaaagctaatggaaaaatttggaagttcctgtcttgtgcacatgctataaggaggcatcctttgtaacgaccgactagctgcgttccgtctacaacaacgactttcctcatatatttccaaccttttatagacgccgagagagaaacaaatacatatttgaagcgctggcgacctttagcttcaggagtggagtggagatgacagattgtaccgggatttgctaattgtagaagatacagatatgtaggtaaaaacctgtaactagccatatcatcaccccttatagagtttactgcaacctctctagctctccatgctgtagaatatgagatccgaacattaagatcatttaagaccaattgaggcaaatctacagctctcggacccccttgcgaagaactatatctattcttcataacctcgcctaaaagcttgtaagttgcatgtttacgataatcctttcgagtcttgatcttgcaaacatggatggaatcataccctgtgattttgaaacatttggaattgggtatgacatgtgcagtcaaatgccatgaacaattgcgatctacgcaaaccatctctaatcttttagggcatgaccgagtttgtttgtagcggaagactttttgattgcaacaagtcgcatagtctgctgtatgacttgcttgtttttgaaaacacttcccacatacaacggatgacctgacgtactcaattcaacttctgtctcatcgactcgaacattggctaaatcatcgaatacaggagccgcatcagtatcgagcaactcattctcagcattaagcaatgtagaaaaccctttatacacttcgtaggcttcacctgttgtcactagaccgtcgtcagattcaatatttaacccacttgcagaaaccccttctaggacgactataccatcatctccagttacgttctcagctatatcatccgtgtgctcaactaattcaccttcgcatcttgtctcctctgcacagactctagtgtacgtacattggtacaaaccatgttgacacgtcggggatggagcagaggttggtgtacagtcaaccaaaacaccagtgggttctacatgaggtacatgtgtacccgtcgacgtacacgatgccaatagacgagtgaattcccctgggggttccacggtatgttgagtgtcattcacgacgccctcctcaacatgaccatttccatattgttccacaatcatgtcaccccatttattgtaatcgtattcttcgctactaccttcactaaagtctactgtaggttcgagtgtacttccacggctttcaccatcggtgtcatcgtcatgtacatccatatcttcgtcctcttcattatcctcgtcctcatgttcatcctcatcaccttcatctatgtcatcctcctcatctacatttatatcttcgtaaccattatgggctgcatcaacatttgtaacctctgtctctgtattgcctccattgccgatagggtaaaaagacacaaacaagttaacagaaggatcgccattacgaatcaacataaatgtatccaggctgatttgattctcaatatatactggagggcgattacttgctatcatatcagacatcttttcaggcatccagtaacttattatagggttccattcactaaacttgaaactaaaaacatcacatattgtacttgccaaatccgtgtacgtcgttgtgtctctaatacgtacacagcgtccgaaacttcctttctcagcttcaaatttccaaccttcttctttgtatatccactcaccaaccataattaatacatgtaactccatacctgcaacataaattcctcaggtcagaacaacattaaatacaaaaaatcagatctttttgaaggctttcacttatatcaacgaagacaaaaagaatctctaacaaaacaatttatgaacttagaaatttaacaaaacagatcaaagggctttcatttatatctacaaagacaaaaagaatctccaacaaaacaatttatgaacttagaaatttttaaaaacgg

SEQ ID NO: 21812 - DNA, 1955 bp, Arabidopsis thaliana
ctgatagtttagtcacaacaaagagtcccaaaatgcaagttttcttgtagttatcatgttaacaaaaacaaaatcaacacatgaatttttcgtaaactgactcataaagtacttaaatcttccttctctcatcaaaataggactcataaacacaacagtagaccctattgataataagtttttagtcaattatcctaaaacaccaatcatgtcgttgtagtattttaggtgtcaatccaaatgagtgtgatgcaaacagatgagatgtgatcagaagtcactaagtcaagccaagcaataacagatttggggtttctagcagtcctaagtgaacatgcagaaaacagaaacaataacagacttactaaaatcactcgaccacaacaggctgatgccagaagtaggatgtggtcgagtattaggcaggatatgaaacagatatactcgactgcacagtctgttgccagacactgggtgtggtcgagtatactggtcgagtaacagacaggaaatgagacaactgtactcgactgcacagtctgttgccacacactgggtttggtcgagtaagttggtcgagtaattgcaaaaactaagaaacatgcaatgagaacgattaagcgataacgataaaacagagaaatcagatagacgaaaaattcctaaggatggggtaatcgaatatagtggtatcctagcctattcaaatagttaacaagcgtaatcaagctatccctagacaacaggttcaacaacagatcaatttactcccgtgatagaaattctccatcaaagctagcccagactaattcccattaacggaatctaactattcaggcaataagaacagactgataaagtcaataaacgctctaaacggtcaatcccttgggatagagacgcatatctcaggaactagtggatcaagcattccatcgaacaccttctgggtgcgggaatgcttgggatcgaattccagttgatcagaaagaaataagcagtaaacgcaactagtcctaaagggattcaatcaattctaaaacttaaccattctacagactacggattccacaactactctatcccatccctaagaattctaagtcactactcagacagcatgctcaaagacataaacgcaggtaaacgataatattgcataagtaaagagataaagagtagagaaacaagatgactaatgaaatcaaacgcggaatctcaataacttggaaaaatcgcgaactacaggttgtagaagcaaaagcggcgtagcagagtaaaactgaaaataaaactgaagcaaaaacgcaatgtcgactagatgtctcaggacagaaccctaaaacatctatttataccaaacgaaataaaatgatagtagacgggccaataacctaatcgcccggcccatagagtgataatgggccgagatgggcttcgtgatccgatggaggtccaagccgcttccaaacactttgtcttctcctcttttcttccttgttctcagcttgtctggttgagtgcggatttgagtagactgtgaagacgtgattgagtgtccggtcgagtgatggtgatggtggtgagtgatgatactcgaccagggggtcgagtaacgtggtagagtgaatggtcgagtgtggtcaggtggtgtggcgaagcggtactcgaccagggggtcgagtaatgtcgtcgagtggcctgagctgaggttactcgacctggtggtcgagtggacgggaagaatggctccaaagtcactcgatctgggggtcgagtatgtgggaagaatggctccaaagtcactcggcctgggggtcgagtatgtcttctggttctggctcgtttcttccaatttgcttgcaaacagctccaaatcacctgaaaataactcagaaatgcaatatgtatgcaaagctatcctaatcatgctgcacaactttcataaagaacaa

SEQ ID NO: 21813 - DNA, 2031 bp, Arabidopsis thaliana columbia
cttgattgggttgtgagtttttctactttcaagacttattatttgtgtattttacgctcttaattgatttgaatatttcttcttaggccggggtgcctatcacactgatcccaaccatcaaatacaactctatccaaccaaaggtgcctttgattgtgaacaacgatccggtgatggtcttgaatgatgagaatgttttagaaaccgctcatgaaccttcagccgaacaaaagctcattaaagatcctttcgtagctgaaagaattcgagatggcaactgattcgtagtggctgtgaccactttaaactggggcatgtcccaaatattttaaaagcctattttaaatttcttgaaaagttagtttttgcctatggaggctcaatttcttgaacaagctgtttgcttgaggaggcttttaaacctttcaatttttattccatagagggtttctcagttgttatgcgggtttgcaaagtccacactcttagaaattgaccttgtggttaggctttgagaatttaggttgattagaccttcctcataaaatgcgagaactgagctcgacttaacacgagttccccacttagtcaattcggtaaatgtaagggcctagaccttgattgttttattcgacattaatgggccattatctttaatgtgacgattgctttttcttttttgtttttcgaaaatagtaaaaactacacgccattaaggcaataattttactttctcgatttctaaaaatggtttaatccattctgacacgccaccattattgagcttctggttccaaggtaaccctaagcccctataaataagaaactctagtcaacttaactccctccaaacattatttctgaaatttccctctatgatacttcaaagatggagagagaaggcgcgtccacaatttgccctctcgagctggtcagccaattgttcctgtcctgcgacggttttgaattgtccggtgttttgttcccacatgttgccttccactttcctctgaaggataagaaagaggcgtaagatttcgtggataaggtcggtaaccgctctctttgaagactcttttactctctccctattttcacatgttttccatgttaggttatcgataaacaccaccgcatgtgcgatgagaggcagcgctcgggtcttaagaggcagatgcttgaggcgcgcatcgcttgtgtggaaaggaatgtgagggctctggaaagcgatccctttcaatgggagtggaggaacttcgattctgtagccaagatcccgaccatgcttcggatgtacctccgcagttgaagtcaagttcaggacctgcgtctgcgtcgggtgaagtgatcccttctgaaagcgaagatgatgatgaaggagaagacagcaacacctggaaacacgtcaaaaccaagcccaagttggatgataagaacgaaacgtccacttcgaatgctgaaccagcgatgaaggagtctgttcctgagcctcttccaaaaatgtccccgaactaatgttttttattttaactcgcttttacttcggttgaactcgtaacgggcttcaacccatttttatttatggaaaacttttactaccttttaatttggtatattctcgattacaaatttaaaggcatgattagctggacaacataaattctccctcgaatcgctccattctaggatggaaaaaaatggattttgagggatacgttgctcctataaattattgctctaaccttgtcttattttccatctttccctcttttgcagatatggatttcaacctttggtgctcggaatctatgccaaatttttctattgtcggtatgatggatggagatatcccaaatgagccagaaagaggaccctctccatctccaggtttctgccgatctcaaatccaaactccatgtgctttgatcaaaggccttccagaacgggaccaagagctcacgatggcgttcgtcatgaagctcacagtttgacaccacgaaattcacactcgagaggaggaagcttcggaaa

SEQ ID NO: 21814 - DNA, 3319 bp, Arabidopsis thaliana
cagctttctgttgaattgttttcacaccgagtcggtgtgaagcaagtcggggggaggttgttacttgtctactaatctagtttgctattttgttttgttttgctttttcttgagtcagtttgttttatcgagtcaaaatcatgtcttttattgagtcaaaatgctgtttgagaacagtgatcttttcatagagaattgcaccatgcttgatttgattgtcttgggaccattttagcactatttgataacttggaaagtcaggaaactctatcactagatcgcttaatattaatccatatctctttgaaatttggatgaattgagctttctcttgaacttaatctggacttaatctatctcacttaggggcttgagaatcatgtaatggatcatacattccgagttttctttgcatcattttaatcactctttgctaactctgaatggctagactcatttttagttcgtcttttgcgtcttttcggttgtgtcttgagtcattttgcaggttttagatatttaagcgagacacggatgctttcggaacttatcaggctcatttggaccaagaacgatagcaggaatcgagaactcatctgccaggtggggatcgatcgatcaaacacttatccgcgaaacaaaaatcatctgccaaaacaggatcgatcgctcccaggtggggatcgatcgatccaccagtcatctgttgaagaaatccatccgccaccgagggattgaccgatccgaggtggggatcgatcgatccaaccctctcgacgaccagaccagtttgtcttaaccggatttatccgtctttttctgtaattgggtataaaaaacccagagacctaattttatttggacattttttcttttacgcttcgtttctacaacttttttagagctttcttaagcacatttgggattagagattcatccactttgacactttggagaagatttctgaaccttcatctcatttattcaatttgcattatgttttctttcatatctctttgtgttgttcattttgctatgactgagtaggaaattacatgcaaaagtttagtaatcaagtagtcaaatttagtgattaatgtcttgagagagaattagtctaaacttgtgttcatgttcgagaacggttctttatgctgaattccttgtttattattttcattaatcatttttctctgaaataccctattgcccaatgctttttatcatctaaatctaatcgtttactttcttgcattttaatttacaatctgaaaaccaaacaaacaacttcttcgctttagctaagaacgagtctcagaaatctttagagtatctttggtccttgtggatcgacctcgaatattctacttaacggttagatatttcgggtaattactcgagcaatcacagagcatagacacaaaggcgcagactttgcagcaccttctttactcgatccccaagatcgagtattcgcccaaaccgcctcaagtcttttgtcttctagtgaatctagggtttcaacattttactataaatagatcactttggggtttgtctaaaagatctatgctttatctttcagtttttctttgtgtttatgaatcttaaaaccttaattactcttaatctatttcatttttgcatttgattgtttaagtaaagttgtttagcttgtttagatctacattttggtatgattttggtaatttctaggtttgtgttcttgagaatgttgcttgagtagtgattagggttcttgaggatggattagattagggtaatctctaggttagttaggtggttagtgtttaggtttatacccttctggattcgcttggcccctatgcggttttcgctggctaatgtggagattcgatcatcgacgtccagcgtccaaaagactttcaaatggatgtctgacctacgaattccagagatatgtagactcgaccaagggattggcttgtctgcctattggctttggtagattgtttgttaaacctgctctactatgtttcatcaacgagggttgagattaggaagtggtagagttatgggggtctctgtcacgagagtggattgacccggtttttgaatctatcgtcatgggtatctacctttcgcctattaaccatttgatgaaccctagagttacccttatcaatgaatccatccttagaacttctattaggtttatttgtatcccttgttgattgcacttttatttacctgttatttgtatcctctatttgcatcccctgttgattgcattttggttcttaattttgtcacctggttgttctactcgacctaatgatcgagtagggctcttaagttcttatttttacttgtttgaattctgacctaggattgttactagaaacccaccatcattataatctggcttgacttagttgtttttgtacacatcttgattgctagcaatacagtggattggatcgacaccctctataactgcatcgacatgtttgtattttaaaggaattgaactgaactcacaaagcattcagcatataagtaggcctaaaaacgtgcttatgaatttggcgccattgccaattcattgttgcattgttacattcaagatattagaaactttgaagatcaagttcttttacatttatcaagttactaactcatcatttcgtctgcttgtatttgtggtataggtactaatctttgtgcatgcaaactcgatccaaaggttctgcacacctattaccattcagagacagaattgataaaatagccggtgagttacaagaaaccaaagcaaaggcagcctgtgaccagcaaataccagctgctatggatcaacagaacagaccagttgatgttcaagacccacctaatgttgatcaaccaagaaacattggtgcaggtgatgccccaaggaatcatcaccaaagacaagggatagtgcctccaccagttcagaacaacaactttgagatcaagagtggtctcatctcaatgatccaaggaaacaagtttcatggtctacccatggaagacccctggaccatcttgacagctttgataggctctgtggccttaccaagatcaatggtgtcacttaagatatgattaagctccggctatttcccttctctttgggagacaaggcacaccactgggagaagactctacccccagactccatcacctcatgggacgattgtaagaaagcttttcttgccaacttcttctctaacgctcgcaccgctagattgaggaacgagatctcaggtttcaaccagaaaaacaatgaaactttctgtgaagcttgggagag

SEQ ID NO: 21815 - DNA, 1782 bp, Arabidopsis thaliana
gtctagaggatcactagacatgtcatacccagttccaaatgtttcaaaatcacagagtatgattctatccatgtttgcaagatcgagagtcgaaaggattatcgtaaacatgctacttacaagcttttaggcgaggttatgaagaatagatatagttctacgcaagggggtccgagagctgtagatttgcttcaattggtcttaaatgatcttaatgttcggatctcatattctacagcatggagagctagagaggttgcagtaaactctataaggggtgatgatatggctagttactggtttttacctacatatctgtatcttctacaattagcaaatcccggtacaatctgtcatctccactccactcctgaatctaatggtcggcagcgcttcaaatatgtattcgtttctctctcggcttctataaaaggttggaaatatatgaggaaagtcgttgttgtagacagaacgcagctagtcggtcgttacaaaggatgcctccttatagcatgtgcacaagacaggaacttacatatctttccattagcttttggggttgttgacggcgagaccgatgcttcattggatttggttcgttgagaaattatcagagattgttccagatactgacgatttgatgattgtctcggacaggcattcttccatatataaaggcgtcagtgtggtgtacccgaaagcccatcatggagcatgtatagtacacctggagcaaaacatatcagtgtcttactctaggtacggtgtgtctggtttattctttagcgccgttaaagcatatcgggttagagattttgaaaaatactttgaagagatgagaggtcggagtcccggatgcgcaaagtatttagaggatgttggatttgagcattggactagggcatactgcaaaggggagcggtacaatatcatgacgagcaacaactccgaggcaatgaacaatgtcttaagcaaggcaaaagcctatccaattgtctatatgctagagttcatccgagaggtcatcatgcgatggtttgcagcaaggcggaaaaaagtgtcgaagtgtaactctttggtcaccccggaggtagatgaacgtttccttcaagacttgcctgcgtcaggaaagttctcagtcatgatgtctgggccttggagttatcaagttacttcaaagactggtgagcattttcacgttgtcctagatgagtgtacgtgtacttgtcttaggtacacaattttaagaatcccatgcgagcatgctctagctgctgcaatacattttggcatcaacccgaaggctgttgttggattgtggtatagccttcaagtgttttctgattctttccaagaacccgttttacctataccggacccaaaagacgttgttattcctcaagagttatcggacatgattctcatacctccacgcagcagacgaccacctgggagaccacccaccaagaggatactatctactggggaaaaccgggtaagattttcccccatcctcacttctatgcaatttttccttccttttaggcgccttaccattttttaactttcagaaaaagaggcagaaaagactcattcctaatcggtgtacaagatgtcggaaaacggggcataacaagaagacatgcaaaaaacctatttaggcctcgcgatggttagagtttacgtctccgtgcttttggaagctgttctacgtacgtttttggaaatcttttgatcagtctatgtagtaatattacatattattttgtctgtacgttacct

SEQ ID NO: 21816 - DNA, 2868 bp, Arabidopsis thaliana
aatttccagatcgcattaacaccgagcggcgggtagaatcctgtatatgcccctataaatactctgttgatcgactattgtttcatcggccctttcgttggagagtgctggatcttctcccttcgttggcaaaaatgttccgactttctcgaatgctgaggcgattgaacgagggatgccgttcttcaataaccttcgagttccctggactctcctattccaggcgagctcggaggaaagacgtgaagccgagggtttcttgtcatgtgtcgagtctaggcataaggaataccgcgagatgctgaggtactatgatgaacgaagatctgacatcgctcgaaaaatggctatgctggagtctcatcctcgccattggcttaagaatggttttcagcttctggctccgatgccggacgttcttttgtcgtattgtgaggactgtgatcgagatgctgctgccgtctcaaaggagaagaatccaacaatcattgctgatgggaacttcattcccaggacgccttctctattctaccttgggccggctgctactgatgctgataccacggagtgtcagaacttcgttaaccaagtaaggattgctttggtttgtgttttcgatatcgggatgtttttttttttttaagaacttcgttgctttgatttctcaggtcggatttctgcatcaggatcaatgccgcgagctgcagtactttcgaaccaagaaacgaatagtggactttcgtctcgaggagctcgaaactctgattgctaagctgaagaagaaaagaagggtcgtcactcgtctggatgaggtcgaacaaacgattagggcattggagattcgttcggaggattgggagaaagctggtctgcaactagtgtggcccatgccagatcgccttcttcaggataatcgcattgtttctgacagggcgatctgacgttttatctggccgatagcagatgatccttggtggctttttggattgtttttttcctttgctttttattttcgaataaacgcccttgtgatggctggcgaccttgttaaactctaatttattctggaataaatgtctttgtaatatcccccgatctcgttcggtcgttgattaatacaatgcaatcttattaaattggcttatttcctccgcgacctctgaggtcggcttttgagttcttttcgaagtaacgcaattttttctgtctaattggactagatgttaggtgcgagactgagcccggcttttgagaaagaatattcagcgtgtgctggatgcgagacgtctctcggcttatgtccagcaggcttatgtatgatttaaagagggagttctgggctctgtttccaaaataagtgaggcggactcagcatattatttggggggcgagatgctgggctcggcttactccccgtagagcatctgttcggcagatcgcgaaacggttcggcttatatttctgtccgaaccagagcttaagtgcgagaaaactggtctcggctttccctattagaaaaattaagtttctaatagggcgtggattatttcaccactgcatccatgtgagacgcgcatcgaacgcctggccagggcgccgagagttgacataatagatcgtaaagcgaattccgtattgagaatgcaaactttaattttattaagtattatagctgcatccttgcgaaggactgcctacgtacccaattaagggatcaagccattcgtagttcgtattacataaaggagatcgacaggcgatctgcgtgcttagaataaatatatgaatatagtttttttttttttttttttttttttttttggcgtagctaatttttaacctagtaatagtaccttttgaggtgggctgcattccacggattttccacctctttcagcttcatggtcatcagcagatagactcctggatgaagtaccttcgagatcaagtaaggtccttcccatcgagctccgagttttccagcgttcttttcttcggtgttactgtaaacttcccgaagcacgaggtcgccaacgttgaaacgacgctctcggacgtttcgattatagtatttcgccgctgcattctggtaattctggatccggatggcggcttgatcgcgaagttcttcggcgaaatcattatggtcgcctaaaagctgatcgttcagtttttggtcgttcgacatcatgcatcttcgtaaagttggaactccggcttcgtttggagccattgcctcgatgccgtaagccagggagaaaggagataatgatgcaggtcgccgaggtgtagttctgtatgaccagagtacgccatccagctcgtttgcctagtttccctttttagggccaagtcttttcttaattccggctatgatcgttttgtttgtagcttcagctagaccgttcccttgtggatatcttggagtcgagttgctcatgcgaatgttccacttggcgaggaagtttctagtaatgagcgagacgaactgcttcccgttatctgtaacgatttcataaggaaggccatgccggcaaataatgttcttccagatgaatgcaaccacatcacgtgatttgaccttgtggtacgcctgtgcctcgacccatttggtgtagtaatcagttaggactaacataaaccttttggatccagaagggggcattggtcccacgatatccatggcccatcgcatgaatggatacggtgccgtgaccgaacgcagtatctcgggaggaacgttcttcatcgggccgtgcctctgacacggttcgcactttgccgcgtaggtcgcagtccgccagcatagttggccagtaatgaccgtcttttttgattttaaggcagagagctcgtccgccggaatga

SEQ ID NO: 21817 - DNA, 1830 bp, Arabidopsis thaliana
cagaaagtaaaccaagcactaggtaaagcactcggtcgagcaaacgagtaagaaggtcgagtacaatactaaaaacaccaattttgcacgaaacgaacagagtactaaaaacacgagttttgcacgaataaactaaacaaagctcttaagaatggggtaattggtcttagtggactcctcaatccattaggtaactaacaaactcaatcaagttatccctagacaatagattcaaaaccaaatcaagccacttccgtgtgaatgattctcataactttagaacttcctaatctcaatttccattgatgaaacataataaagcaggctttaaacaccaatctattaaagtcaataagcagtctaaacatccaatgccttgggctagaatctacaaatctctgaaattagttggttcagacatttcatcaaacaccttttggatggagaaagtctgaaatcaattttcaattgatcagaaagaaaatagcattaagaactcctaaaacagaagggaatcatgcatataaacacttacctagctaaagaagagaggaatccacctaaacctaacccatcctcaagaactctaaagaacactactcaagaacactgaagaacatcatagaacaaaacccagaaaattcataaaaccaagaaatcattataaacttagcaaaagatagatctcaatgagataaacaagtttgcagaagaaatcaaatccaaattctcaacacaacaaccagaaaatgcaaaagaaaatcaaagaaccctaatatccagcggacaaagctcggatattttgggcaaaaacataagaggtctatttataggcaatcctaggttgccctaattgggaataagacaaaatagataagtcggcgcaggagcgctcggccctaggccgagtagaaaagccgagtggcttggttttggtcatacagctcggccctaggccgagtagcttggtcgagtggcttctcttcatccttaagtgcacaactcggcctccagccgagtgccttggtcgagtaggctccttgttcttcacgtgtgctccactcggcctccaaccgagtacataggccgagtatacttcaaatccttccttaggtcccccgaactcgagtctgtccatcccttgtgctagaaacctccaagttgagtccaaaagtacctaattcatctgcaaaacactccaaatgcaagtatgctatgcaatgcaatgcaaaatgtgcaaaagaaggaaaagagactaagaatgcataaaaagagacttgaaactaaactaaatgcatgaaaaacaagggcttaaaaaggttaaaatctagtgttatcagtaatgattttatagactacggtgcagcacgaaacaggtctaaacatagagagttgatctactcctgtaactttaggaatgagagtgattgctgtagcgttgaacctcttgaggagatgaccagttctgaaaaattctttaacagcagcaatagtactatccttgaccacaaaccaagattcccaaaagaattccgcagtgaagctgtcaggacccggagccttgttgcgaggcattgcaaagaccgcagcagttatctccttatcagacgggagagcagagagacgagacgccagtgtatcattgcagcgaaaaggatggatatctttgattctctgaaccgaatcgggagtgagaatgtcgctgtcagagcccaaaaggtgggtataataggctacaatcatttctttgacctgagtaacattctccactcttacatcatcatccatgcgaagaaacttgatcagatttttagcctgatttgcaagaat

SEQ ID NO: 21818 - DNA, 592 bp, Arabidopsis thaliana
tagtaacgtccgccagtgtgctctaaagacgatgtaattttgtaactgctggtcttgttctatgcgggcagagttggcgttgacggcggcagtgtaggttgcggaggttgtgtcggtccagaaggtgactgtagaatctgcggagcggatgcaatggcgtagggggaggtagatttggttgcggaggaattgacgtcgtcacgcgtcccggatggtgtagggctggctagcgcccagactcgatcggtgtggttgtcaagggttgtttccagttcgcctgtgtagggggaccagatcttcaccagcccatctgcggctgcggaacgaacaagaggtcggagctgaatagagttgggctttgatgctgctgcatcctcatcttcctcatcttcggtcttactggacatgtcgggtggtgggagccagagcaccttgagtacgctattcgtgtggccttcgaacgtaagaagacagctatagtcggacaaactccagagcttcacagtcttgtcacctgagcccgttacaatcatgcctctgttagtgctgcttttggcatctgcactaaggatcggtgtgccttgggggaaaa

SEQ ID NO: 21819 - DNA, 2457 bp, Arabidopsis thaliana
gctactctagccatagctcttgctaatgaatgcagccgtgataaatccaaatcgtaaaacccatacgagagactaaatactacagcgctattttctagaataggtcagaatattcactactgatatttctttacgtaatcataaaactgggtacaatttcttccaatgagaattcttacagaaaaagtacaaacatcaaacaacagtagatagataaagtggagaatataacaaactgccatggaaccgttcgattagacaatttaaggtcctacgaatactttggtagaagtactttgtgaataatgtattataacagtcaatttgaaaatgaggcaactatttccatgctcaaaaataaaggccgattcgagattgtaataaatatttggtgtcaggtttgttatatgatgcaaataaagagaataacggagaatttaaactcaaaattgaaggtaccttggttggaggatgttggattaagatttggccagcttgtctccagatccgctgatcttaagatccggatcgagaatatttctgtggtattgagagaatttacgtgaatgaatcgagatcaaaggtagtgtgtacgaagagcgagaagcaagacacacacgcaagaggggagaacccgggcaaaaaaaatcccccgtgcgaactcccctcgacaacacgaaacttttttttttttattaaggattttggtgacctgccatgcaagcgcacctgtcatggcaaaggtcggatgacaaagatgtttacgcagaactatatcgtccctataaacatctcatacatccatcaatcaacttaactcacatcaatatcacatatcagcttcttctctcttcttcaccctctcatctctctagctccatagagaattgacggattcatcattcatcacctcatcaaaagctcagtaacgcagatctgacgaacctcgaggccggttcatgatctaagatcagatctggaatcgaaaacaacgaatatatacataactacaaagaattcaatcgaattaaacgaatcaattatcagatccagctacgagaagccataatttaccagatcttcaaccgatcttcggagctcaaccgcgacgatccgtcttctgacgaggaatcaaccggagcctctggatctcttcgtataagacgccgatctgtagatcggaaggagatcagtgacgatcttcatcggaaaacctccgagaggactatatagaagagagatctagagaaaacgatgaacaaaaattgaatgaatcaatgaataaagcgggtatgagaacttaattaggtcgacgcgttgttatatatagagggttgggagtaatggacggacgagattaattgattaacgtttagatcaacggtctaagatttatattgttggagagattacgtgtttagtggcgtttttaatgtgaggcggttgttttacacaaaagaaattacaaagtaaaggcgttttgggaaagggacagctaatatgggttgttgttggtgttttaccgattcattgcacgttttctcattgacaaatggcatcttcgtagcaagttccttcacgactcttccatattttcttggtcttttctttaattaaaaaacaatatttaaaaggaacaacaaattggcccaccttctagattaaatcttccactttgattttgtcgtagtcgagaaataatgggccaaaacgtaaatgggctaatacaaagcccaagatcagacgcgacagctgctcggaagcatattttgtacatagcccaagatacacacaaagacagagtaaacgaaatgaagattatcatcacgactaatctattagttctctagaagtctccatggggattatcagcattcctgcttccactacctctaatctcagcataacccggaggtagttttgggggatgaataacaggcaagttgctggaagatccggggacaacagatggtcggaatgaccaattgattgtgctgatacctgtagatggagatggatttgaagggaatgggttatggtctcttagatatataggcaatgtttccttatcgcctagctgctgctgctgctgcttatcgagttgttgcttttcatagtccatagcattaggttttgctggctcgcttatcatctccgctgggttcatgacactggcagttccaaacagccaaggctgtctgaattttggctgcttatcttctttgcctttcggttgttggtaggtatgatcgaaagtttcgattggtttcgcagagggcttgtctttttccacgaaactaggttcaggtggatccacggctctaggagttgttgagcgggttgtggagattgtggttgtgggaaatgctttctctggtggcacagctggtgtgtagttagatggaagtagatcgtccacaattctctagcagttctttatagactttgcgtagagtt

SEQ ID NO: 21820 - DNA, 461 bp, Arabidopsis thaliana columbia
agtaagggaggactatttgttccgaggaggaacatggtgtagacttgagtgtgaaggaacgtggggatctagtggcgatatcataaacaccgtagccttcaccgaggaaatagatggaattacggtttagtcccgggaatgagctggccttgacacaaaaaggctcgttgttgccgaggaatatgcagagataaccaaggtctgcagtgtaacacatgttcatgtcttccactacactaaacaccatgaaccgctttgtgccgccacaattgaatactaacgacttgttcgcagggctttcaacgtacctaccaagcagagccaaacagaaagaacatgttagaacatgaaaccgcaatagcaaacagacaaccctaacatgaaacctcgtaccatttgagtaagacacgttgtcctgaaggagagtctacaagctcgtgtgccctgtaacaagaatcgaa

SEQ ID NO: 21821 - DNA, 604 bp, Arabidopsis thaliana columbia
gttcatgaattcaagattcaaagacacacgtatggctacctcttggtaaatccaaagagacacatatatggctgacgctgatccatcgagtggtgaacagatagttatgagagagtgcagaaaagggaattggacagtgagtgagactttggttctcatagaagccaagaagatggacgaccagaggcgtgtacggcgatcggaaaaacaacctgaaggcagaaacaaaccagcagagctccggtggaaatggatagaggagtattgctggagaagaggatgttaccgcaaccagaatcagtgcaacgataagtgggacaatctcatgagggattacaagaagatcagagagtacgagagatcaagggtagaatcgtcttttaacaccgtcacttcttcctcttactggaagatggacaagactgagaggaaagagaagaacttgccgagtaacatgttgcctcagatatacgacgtgttgtctgagcttgttgacagaaaaactcttccttcctcctcctccgccagccgccgccgtagaaacggtaacggtggccagatcctaagagtttgccacaaagtttaggatttgtactccgatgat

SEQ ID NO: 21822 - DNA, 525 bp, Arabidopsis thaliana columbia
ttatgtttgaatactagttttactattagtgattttttttcattccatatatgaacacaaaattatattgtgcattttgttttgttacaatttttctcttctattcaatacgattatcttagaacatatactataaaaaaatacattatgcattttaaaatgataattttagttaattcattataatatatagttctttacattatttatctagtattgttttcctggggcaaattctaaatctgaaacggtgaccatctaccttccaggggtcaataaataccccatgcaatttttccaaaagggatcaatgtaacaatcgttagtttctttctcagcctcaggtaagctgtccccacatatccctcctctttctaattatctgattgtagtttgtataatgttttgttgtattcgtaagagttgatcaacttgcaagcaaaagagatggtgcaaaaggtggaagcaaggggtggtgagataggagatgtatgggatgatggtgcttcgacggtgttagaaaag

SEQ ID NO: 21823 - DNA, 388 bp, Arabidopsis thaliana columbia
ccagtgtgctctaaaggattggcaacgcgatgatgatggcgtcttcgcgaccgtccgtggtggggtagtaattgcggcgaatcgtcgcctcgttaaagcctaaactttcgtacagggcaatggcggcacgtgttgaagcacggacttccagccatagtgtcgccacgccgcgtttttccagttcgtcgatcagatgttccagcagcgcccttcccaatccctgacgctgatagtcaggatcgaccgcaatattgaacaatgtagcttcatccagcaccacttgcgtaatcgcaaacgccgccattttgacgttatgcgttaactgaaagttgagataacgctcgcccgtggttgctggcaagcgttttcacgatcccggaaaggcgtg

SEQ ID NO: 21824 - DNA, 564 bp, Arabidopsis thaliana
aactcttgaccgggagcttgcacgtgcaaaggttacagcaaacagagttgccactgtggtagcaaatgagtggaaagatggtagcgataaagtgatgcctgtgaagcaatggctcgaagaacgaagatttctgcaggtttactttgatatgatggcccctctcctagattcttaggacgcaaattatttgcagtgagcaaggcccatccatatctacattctcacttcttgatcctcaacttttttgcagggagaaatgcagcaacttcgtgataagctcgccataacagaccgggctgcaaaatccgaggcacagttaaaagtaacaaatcttatccattagtcagcttctttcagttgatcttgttacacaggaacaagaagtaatatattttgtttgtgcaatttcaggagaagtttcaactgcggcttaaagtgcttgaggagacacttcgaggaacttcaagcagcgccaccaggaacacacccgaggcaagaagcatgagtaatggaccttctcgcaggcagtcgcttggtggagctgaaaacttacaaaaatttaca

SEQ ID NO: 21825 - DNA, 553 bp, Arabidopsis thaliana columbia
ccaacatctgtgagtaacaggaaaagccaaaaagcaaataaaagcatcaagagttgcacctatgccgttcaaacagagagtaacacacaagaagcacattgaatggtggtggcttcccagcttttgacaaagaattcaattctcttgagtaggctgctctcgcagctccgtggtattgaagtacagtaaacgacggacaccattttctgagctctctctcccagttttccaagacagaggcagggcatacaaccaaatgaggaccagggtcattgtttaagcgacttaggagggttaaatatgtgattgcctaaggtaaatgagaacaaaattagttctttataagataaagaaacaaagaaaacttatccagtaataacagagcaaaatgcacctgaatggtctttccaagacccatctcatcggctaaaatggctacaaacaatagaaagtgagttacaaagtgacattcacgctaaaaaggtttacagatcgaaactagtaaaaacacatacctccttcaattcctttcttatacaccagaagaagaaag

SEQ ID NO: 21826 - DNA, 519 bp, Arabidopsis thaliana
gataacgcattgatatttacttaagaagaactgagacactatatggaactgcttcaagttatgaggccaacctgtcagcacctttacagagtagaagaatctgtcctttttcatcacggacgataacagacattctttttcttttgctagtgaagtccaaaacatttaaaactttatattctctgtaaaatatcctgcaagtagttagatatacgttcactggggccgatagaaacaagggaaagatctacagttacagtctcacctttcaactggttggcctgaatgtcgttcactgataaacacacttgattgagttcttttagtaaactcaaaaccaaactccccagcggcaacaaggaaagcaacttcgtcaggagactctgcttcataagtacactttccagtatcttcatccacctcggggatagcagtgtgacaaaccgcaagtatacgcagaaacatcaaaatgtcatctgaattaggttcatttaaccagtttccacccatgagacgttg

SEQ ID NO: 21827 - DNA, 566 bp, Arabidopsis thaliana columbia
aaacatcaactaaatatttcaaaaacagaaaaatatataaagaattaattaatcatttggaaaacaaatggaaagagttgttagaagaaccggcgcttccatggaacacgattgttctttctcacgcaacagccacacgagtaaagaaaaacgacgagaaggataagaaggagattgacgacaataagtatcctccatctttttcttatcccttttaaaactccaatcttacacgactcgcacgcgtaacataactgtctctgcgtgttactccatgccttacaatcccctataatcgccgtagtcgctgtggcaggaactgtccaccacgtggcattctttgattcgaacccacattctacgggaggtcgacaacaaccaaactaaaagagaagaaacataaaacaaaaaaccacttttattactacattgttagtgaacaatctgaatcctatagatgtatactataaacacatacctgtacattagagagatgtttggagtcaaagtcaatgtcacgtggaccataccttttacaaaccctagaatccagcaaacatttggtg

SEQ ID NO: 21828 - DNA, 513 bp, Arabidopsis thaliana columbia
gaacatggaataccggagagccctgatatggtgacattaatgcaaaaggtaagtctatgatattaaaaatctctgcatgtaaaagatacatagaaaattattatcagtgtttctaattgagatggccccttgtgcttgcaggcgactataaatgtaggaggccactttctcaatgcaatcacgatcgaacacttcatcctccgcttaccgcatcactcaaaatatgtaagctattcgttcgttggtccctttcctttctctagagttgtcatgatcatctatcaatgactttactttacatttttcgcttgatttatcagatttctccaaagggttcaaagaaaaatgaaatggcagtgagaagtaaatttggattggaattgtcagagccacttgtaacatttgctctctcatgtggtagctggtcctcacccgcggtaagtacatgttcatatcatatcaatatacttaggtcttgtttgtgtgttttgcatgtgtgtttaaagttggtgt

SEQ ID NO: 21829 - DNA, 899 bp, Arabidopsis thaliana
ggttttgtgtaacatctgtgaactaatgcaaataaaattctttaccttaactttttcaggctgcacaacttcagtttagaggagagcgtatctggagagccgcaatagatgatttgaaggcgaatggaatgcgatacgccaatcaggttttgacacttaaccttctataagagtctgtatctcttccatagcataatatcaagggcaggaatggatttaactatttatattctgtcaggcacttctctccggatgctctgctggtggtttagcagcaatcttgcgctgcgatgagtttaggaacttattccctggatcaaccaaagtcaagtgcttgagtgatgcaggcttgttcttggacacgttagtttatttctcccaagtcaaagattgtattaaagctagttcattttcccttaccttagtaactactactgactcctttgtttctgtaattatagtgccgatgtttcaggcggccgcacaatcaggaacttatacaatggtgtcgtagaattgcaggttggattcctctttcttcacttgaaagtttcttactttacatttaaagagcacaagaaacttaagaaatcttcttcacaatttacagagtgtgaagaacaatcttccacgtatatgcacaaaccatcttgatccaacctcggtatcttatcttttgttctctcattctgatgctgttgcaaaccggtcattcgaagtcttgtgttttgataactcatatatctgtacagtgtttcttcccacaaaatctgatcagtcaaatgaaaactccactttttatcgtcaacgcagcatatgatacatggcaggttatgttttttctccctttgaaaagtgccacattgctactaaagaacagaaagttgatggttaggctg

SEQ ID NO: 21830 - DNA, 604 bp, Arabidopsis thaliana
ctaaggactaatggtgctcttattgctattgtacctgtacttggtaacaaggaagctaagaataaaatattttataaacgtctaatgattccagtgtatgcatatgatgtcatattgataaaaccagagctgcaagaacatgagctccaacaataacaattcataaacaacctttggtaacaaaacaaaacctaaaactcgtaatgaaacataatgacaggtcttagactcttagtaagagcctaaggttaacactgcctgcagatttctccacattctctttacgcagaaacgcctcgggtaagacttgagccatccattttcagacctctgttgtctgatgctgctgctgcatagtcctgactgttttcccttctccttgaagtcatatcaaggccaacaccaccagttttagactccattgcactttagttgctttctgctagagtcgcgagtttttcggtaatctgaaaagccaaggattgtgctctgttatgtagacttcatggaagacgatgcattgagttggctggtcccatgttgcattaagctccttgttgatcatcatcttgctcacaatactatagacgtgtgactcagagat

SEQ ID NO: 21831 - DNA, 596 bp, Arabidopsis thaliana columbia
gtctttacctcctctagggactgagtagcgacgaaatcggctctcatctgctctaaaatcctcttatgctccgcgtgaaggatagagtctaagcacctaaagagttccaaaaacagctcaagagagactccaataaacaaattcacgttagtttaggagatttataattagcttacgaggaaaggaggaggaagatatcagcgtctcctccgtcttgagaatcgagaagcttcgttacaataccattaacgagatcagacttggagacattgatgtatttctcacgaggaacatgaatactcgaaatcccctcctcctcctccgaatcgtcatcttctactcctccttcacctccatcttccgccgagggaagctcatcttccaccttccagccaccgccgtttttaagctcagttaagctaccaaccgctctttccgattctccagaaactacatcaataggtgaaaaagttgccgcctccgtaagtcgacaacgaactaaccgacgacgcaaagacggcgacgacgacggcttagatcgagatggaagagcgacgaagctagtagtgaggtttgaagagatacataatgaactg

SEQ ID NO: 21832 - DNA, 516 bp, Arabidopsis thaliana
tcaacagcttcatccaatctcctctccatagacaaactacaaatcaaaaccatataacaactcccattcggaaccattcctttgacttgcatctccttataaaaccctaaaccctgtccaactctacctttctcacaaacccctttaactaagtaactataagtataagcattaggctcagagccatataaagccatctctttaaacactcttatagcttcatcaacctcaagacactttgcataagctttgataatcatattcaacacaaacgtatccggaatcacaccattcgatttcatctgcttcgttaacgatctaacggcgtgtagatacacataacacacattcaatttgttgaatctcttaagcaatgaacttagtagcaaagtataagtttcaaggtcaggctttgaatcatctgatcgaagcattttgttataaacatcgaaagctctattgaagagaaacttacgaccacaacagaatctgatgatgcaattgtagagaggacac

SEQ ID NO: 21833 - DNA, 522 bp, Arabidopsis thaliana
ggtatgaaatttctggcaccttcttaacatcttatacagaaattaattaggcctggtgtattataaatgactccatttctactttgtagtctagcggcaggtatgcagcttttgatgatgcttcagcaagtggaactgttgttgtccgtggacagtacgatgactctggatcacctcgaaccccgaaatctagactagggattcaagagagaacttcgagtgcatcagaagatagcaacgcaaatctcgcggaggtttatatatcccctttaatcattttattatctttaagggttatctcgttgaattgccttcattcttcaatatatctttatattgctttagatatcttctgttcatctggatttatcatcggattcttacacttgaatttaattcatctttcaggcaaaggcagcactcgacgcaggtttcagaaggggtaaggctagagaaagacttggaatgggaaataacaataatgatgggaaggttacagaagaagggagcaatggcagatga

SEQ ID NO: 21834 - DNA, 535 bp, Arabidopsis thaliana
cgtaccacttgacgaggaaatgttcaccggaggtaaactccgccaggtggtctgttctgaaacgccagatgtaatcttccaaatccatcttatacaacctcaggagagggtcctccctaaaatataaatatgatgagtagggctcgacatcatcctcatcgaagtgaagatccaagtaccaaagatacgtcccagaaggactaacactgagaaattttttattcttcttcgaatacgttagactcgagaaagggtgtacagagccagaggtattgatgttgatccattcagagctagagtcgctgaagggcttgcacagactcacatcagatccaaagaacttgacagccacaaccaagtcttccttctttatgtcaacagagtttgatattgccacattctggattcgacaattactagacagaggagggagctgatgtttcactgggacaaacgatgtgttactcaccatcatgagacttgtggaactatcctcagatttctccaagtgaactctccaatcatctttatgtga

SEQ ID NO: 21835 - DNA, 535 bp, Arabidopsis thaliana
acacattttttggaatttgacgtttctcctatttatgctatagtgcttgattttttaatgaatattggagcagctttgatgtcaagtttggcaatagaaggcgaagagcagaaactggggacggtgatagggatcgatctagggactacatattcatgtgttggtgtctatcataacaaacatgtggaaatcatagcaaacgatcaaggaaacagaattacaccatcttgggttgcatttactgataccgaacgtctcatcggggaagctgctaagaatcaagcagccaagaacccggagcgaaccatcttcgacccgaaacgtctgattggaagaaagtaagtgtttagtaattagtgtcatagtgtctgtctagtccatatataatatatcttgagctttttgtttatgttttttgggtgttgtgttacagatttgatgatcctgatgtacaaagggatatcaaattcttgccatacaaggttgtgaacaaagatgggaagcttacattcaagtgaaggttaaaggtgaagag

SEQ ID NO: 21836 - DNA, 526 bp, Arabidopsis thaliana
ttagaaaacgaagatttagaaccgttaaaagactgctgttggaatgaaaccggctttggaggcagctacgactaaggtctagctcaagcacttccccggacttgtcattgcacgtgataccgtcccaatagcaacagtcactgttattcgcccatgactccgtcgtcggatgaaggccgtcgaaacaaggcttcttaaatcttaaactccttcttgagctccagtagtgcatctctttgttcgagacgacataagtgtttagtaggaacccaaagacatcttgaaaatcaaaagtgaataagaagaatatgagagaagaaaaagtgaaaggaatgatactcgttgagttccaagagtctttcatcgttcttcaagctaatgaaacaaaaaaaagcagagaaaaatggaaattggtaactctttttttttgtgtgtgtatgtgtgtgtgatggtaatattgggtttcatgctcatctctttatacataataatagactactccacaaagataaattcactggcttga

SEQ ID NO: 21837 - DNA, 529 bp, Arabidopsis thaliana
tcataataacaataaaataagaaatgttttaagaaacttttacctgtgaatcacgcggcttacggcttttgcagagaagaaagatatttacaaatactcgattttcacaaaaataaaatacaaaaggtgatttcttgatataaaacccaaaagtcatctttcttctctattgacttgagaagaaccacaacaatgcctcgcctacaatgcctaacaatggcgacttcactaattctgctgcttcaagctctgagtttagtgagctcaactattctgtcccgggccgatcggatcacccgtttacccggtcaaccccgagtcgggtttcagcagtactcaggttatgtcactattgacgagaagaaacagagagctctgttttactacttggctgaagcagaaaccaaacccatctctaaacctctcgttctctggctcaatggaggttaaatactaaaatctttcatcttcttgattacagattgatacctaaagattacaagaaacaaaacgttttaactttttttga

SEQ ID NO: 21838 - DNA, 562 bp, Arabidopsis thaliana
tggcagtgcatatggaaacgttggtttcactaccgggtacagctgtgaacggcgtgtggacatcagcgatggtggctgcaaagacgcgagttatgggtttgcaggacgatggagtccaatgggaaaattcgtactaataatagtaatgttttatggtaggtttaagcagttcacagccaaatctggccgcgcatggattctttacccctcgtcttcctaacatatttcgatcatatataaatgttatattaaaattagtcacttttagcattccttttctgtgagtgatgtacaataagtttgtatgtagtttgcatcatcgttaatcctcgttaatattatgataatgtatgaagatataatataaggagtattgtgtgtcatcttgtgtttcctgttgtaacttgtaattcgaaaaattaaactttatctgtttgatatgtatcgtacaaatagtaaccaatcagtaatatatatacaggaaagttacttaaaaacaaaaaccaaaaaaaacataatggaattgaataaagaaatatatgtgattgctaatatgggagga

SEQ ID NO: 21839 - DNA, 537 bp, Arabidopsis thaliana
tccctattctcactttcctttcctcccctatttttaccaaattaccctgccacgtcatctacccggagtaaaaactctccgttcaccggaacacaaaggcaagcatttttccggtgagagaaaagaaaggattttccctagaaaatgagggcctcgattctgcttttcttgggggtattacagatcggacaaagaagaagcccttcctcgcaatccatgcagcaacagagatgcctacacggcagaaacagaactctcgttactccgttagacccacaattgcagcaacaactactcatcttcatcttcttcgccggcaaactattcccgtctccttctccgccgcaaaacgacccttcgtcctccacctctgcctcaccagcgtcgtaacacgtggcggctctctcgcgaacctgttcgagcgttgtgttaagcgtttgcacaattgcttcgttctcacgagccattctctgccacgtctgattctccatttccatttttctcaacagatcttcgagttcgatgttcttgttcaat

SEQ ID NO: 21840 - DNA, 468 bp, Arabidopsis thaliana
gggtagtttgacttaaaatgtacatgtaccttactgaatggaacctcaccacctagtttcattcccatcataaccatacgagcaacccaaaaaaagaggatatcatgtccagtttcaagaacagaagttggatacaaggcttagaagtcatcggatagatctgggcatcccagaacagataatgggaatagcccagaagaaaaccatgtatcaagtacatcaggatctcgagtgagttcaaacttcttccccaaaaatttctgagcagcctcttctcgagcatcgtcctcagttctagcaacaagccaatggtcactgtatgcaccaacctccttgagctgatcctcctctagagtggcaaccatgatggtattgtgtgtcccaacaaagctgtcttgaaatacaccagtcacgtatgttctctagccatctgtaaggtaaagattgttaatagatggtgtaatgaca

SEQ ID NO: 21841 - DNA, 503 bp, Arabidopsis thaliana
tgttctagaggtaggctttactttacggacactcgtacaaattgtttcgatctctttccctcatactcacttgcacattttcatgtaaaaactgtcacaaatcagaaattcaaagagctctgcattggaaacttaaaaagcagcccatggtctgaattagatggactccagccagagacaaagatcataaatgagcaactcggaaaaatcaactccaacggtttcctgaccattaatagccaaccatcagtcaatgcagccaaatccgattctccagctattggtaagaaaactcaaacttgtgatcacaaagcataccataacgttccaaaaaaaaaaatcttatttgacttgtgattcatctgtcatttcttaaaaacctatttaaaccctctagagcttctgtcttagcttataacataatgtttaaattgcattgggaatatctacttggcttataacaaaaatgtataattgcaattgatactttgcaggatggggtg

SEQ ID NO: 21842 - DNA, 908 bp, Arabidopsis thaliana
cagcttgttagaggggaaaaagatgattcttgcgaaacaagtaatctacatgtagtgtaaaatcaagcatttttatttacctagagtgtcaccgactctgaaagtctttccagtgagccaaaccgtgtaatcaagattactggtccagccagaaatatcgccgaccttgaaagttgcggcaaagacggcagggactgccgctaggaagaggaggagagcggcggccacggttgatcccattatatataatgtacgaagatagataaagagacagagagagatgaagaagaggagtaaaatggtgaggggagttatatagagatgctatggggtgaggaggacgatgacgactacagactactatgagagagttagtaaagaagaatgtttgaagaagtcgtggctttgatcaattgccaactcatttcatcaattccgtcgtatatttgattcattgttgttatgtttaccaattctttcctcttttcaatttgctttgttgtaaatgacgaactatacatgtgcaattagctctactttttttttttctttttaaattctactatgtgcacacgtaacaaaattagaagatgcatatttcaaccagctgggaaaaatgaaacaattgatcaatcttttttttttttttaacactgttgaattttgaatttgaatgtttggagagataccttatttgtggtaaaaaaaagttaagattttgttttaaaaaaaaggttatttaagataatatatcagggaaatgggccaaatggctaccacgttcactaacctctgttctaataatggaattacagattcggtacggtgattccaaacaaaatagttagcaattttagtctgcctacgaaaaaaggtcaatgacagaacaagaatcccataaaataaaa

SEQ ID NO: 21843 - DNA, 486 bp, Arabidopsis thaliana columbia
caattatcgaaccggactcgaagtacgatattttttttcacgcccaatagcaaccacagtaatcgcaaatgaagataacgttatctatccaatgagccattaggaagctcagaagctgccacgtaagattcatatctcacatctccaatctctgaacatcactaacctcaaatctctcttctcaaataccattcttctcagcaacttcacacatttcgaaagagaatctcagaaagatcaatctagagagaccaaaaagagatcggaagagatggcttctacctccgcgatgtcattggtcacaccacttaaccagacccgttcgtctcctttccttaagccattacctctgaaaccatccaaggctttggttgcaactggaggcagagcacagaggcttcaagttaaggccctcaagatggacaaggctttgaccggtatctccgcggctgctcttactgcttcgatggtgattcggagatagct

SEQ ID NO: 21844 - DNA, 568 bp, Arabidopsis thaliana columbia
ttccagaaagagttgggaaaattctgagctgcatcaatagcaagacaattaatccagaaacaaaagttgggtatgtatcataagagtgactgaggaacaaaatgttttaccaatatttatagctgagttgacagctgccagtagctcctcacgaccatcatttgaaccaactaagaaaggtaacaaatccatgaataaagaaataaatcaggaaaaaaatccaatccaaaaagagcaattcttattacactgaacttgttttaccatgaaaatctagtgttggagcatttgttgccgtagctctctgacgtttgtaggccttacgatcagatagtttcctagtgggtggacgacccaccttactgcacagaactcattaaaaattctatgagataaacaccataacaaattttaatcatacaggaaaaaaaaaataagagtacgtggaaaataagaataatctctacctttcattcttgtcaaaaataggtcttgcactgcgaagatgttttgctgttccaacattcttaagcttatttacccatttgggttaagagactcgtggaag

SEQ ID NO: 21845 - DNA, 524 bp, Arabidopsis thaliana columbia
tggagatattacaaagatacatgaacaaaatgatccaatttttttccaagaaaaagcaatattatgtcccaccaacgaagatgtcaaccaaataaatgagaccatgcttgataacctccaaggttattactaattcagaagcattgatttgtaactttatttacttatataaatagtgtttctatttgctattccttctttaactgtaactaaccaaaattttaattttcaggagaggagtttacattcctaagttcagacagtttagacccagctgacattggtggtaaaaataatccggcattgactcctgactttttgaatagtgttaaagtttcaaggttgcctaaccataagcttcgtctaaagattggttgtcctgtgatgttgctcagaaatattgatcctataggtggtctaatgaatggcacaaggttacgaatcacgcaaatgggtccattcattttgcaagcaatgattctaaccggtgacagagctggtcatttagtattgatccaagattg

SEQ ID NO: 21846 - DNA, 617 bp, Arabidopsis thaliana columbia
tgaagcttctttcatagagttctgtctcatggctgttttgctcagtgtgaccctgtcctgttctgaacgagagctttggctccttggcccagaccggtcccttacattgatcgaagagtattcaaattgtttgtgaagaggtgaagcaagattaactttcctaactgttgaactgtctgaacttaactcgtcttcagacacgctaggagaagtagcatccgtaatctgcatttcttgagctgtgttggagatcaaaaccagagcagttgatacatcggctgatcctctatccattgcatggaattcgtaagcagcattatcatagtcatcagaagagaagttagcagtagtttcccaacgcagcctactatgagtttctggttttcttgctgaagcaggatctgtagagagaatgagcttcttatcaacaaaggaataatctattacacaagagcatgctccgcagcgcattctctgtttctttctcgtagcagaatctattttctctggcaatttcagaagtttgaagcagtttatacagtttataaatggtgcacaccagccacaggttgaattaggcgagaacacctgaagatgatacaggtttagaggggtga

SEQ ID NO: 21847 - DNA, 537 bp, Arabidopsis thaliana columbia
atgcggcatcacttctctgtaatcttcagcaaactcgtccattttcttcttcgatccctcctccttctcctctctttcccccctctctgcaacttctcttttcccaaaaaccacaacattacttgatttggaagcattcctagaaaccactacattacttgattttgcctccaagtctccgtacccgaattcttggctttcctgcttcttaaccgttggttgttttctcaagccatgctggaaaactggtcctggtgaagctacactcgaaaaggcaacagcttttgaaaagactgtgtctgcgtccagatcagcagcatctaacacaagtgcagtcccgctctccacagcttgtttcatcaaaatcagaactctctctatgctttgtttgctgatctcttccgatgtttctggttcgtcttcaggttcttcaaggtctcgaagaaaactatctaccgttggctcagttacatcttttgtagaccagctctgtaaagaattgattgtgcctccatttccgaggaactacagttgaag

SEQ ID NO: 21848 - DNA, 434 bp, Arabidopsis thaliana columbia
  unsure (1)..(434): unsure at all n locations
nnnnnnnnnnnnnnnnnnnnnnctaaagttttttgccagtctggcaggctttgttacggcaggtgtgacgctaccatttgttaattatgtcggcggtggcgatcggggatttggctttcagatgttcactctggtactgatcgccttttttattgtttcaaccatcatcactctgcgcaatgtgcatgaagtcttttcgtcagacaatcaaccgtctgctgaaggaagccatctgacacttaaagccatcgttgcgctaatttataaaaacgatcagctttcatgcctcttgggtatggctcttgcttataaagtagccagcaacattataaccggctttactatctataaaaaatcntgtgtaatcggtgatgcggatttgtcccctataatctgtcgtatgcgggaatgctaacctggtgacgttagtattc

SEQ ID NO: 21849 - DNA, 143 bp, Arabidopsis thaliana columbia
taacggccgccacgtgcaaccctattgatgtgtaggtaccaatggttattataaccgaaataaccgaagaccgttatgtccggacggtgaatggaacctgggcaatcggagctgatggcacatggatattcatagcaaaccac

SEQ ID NO: 21850 - DNA, 614 bp, Arabidopsis thaliana columbia
ccaagagactcgctcatcaagcggttatacttagctgggccattgtcgatgagcttgtcccaggactccataactaaattcaatgcaacaatcaataattaaaaaaaatacatcaccaaacaattcacaaccagctaaatataaaaccatcactgcatgctaagaattgctattgaattatcgcagaaactgaattagatcagctcatctgagaagaaaaaaacaaaaggagagaaataaacaaaccctagatcgtttgttgagaggaccatgctcttcttctaaatcatcttcagcaatctccaatttcaccggtagctcatctcggcacctggccgccgattcagactccggtcttaaacctccagatttcctcatttccaccatcccccgaaaaaacaaacctttccttctcaaaaactcaaattcagacaaaattcggataacccacaaacgaaatcacgaaattattccacaaaaggatttatttatctggaacgcgaaagagaatcaaaagcaaaccctagaaatcagagtataaaacatttacgggatctctctctttgattgtgtaaaaaaaggattctctggcggctatcgacgcgcgtataccg

SEQ ID NO: 21851 - DNA, 564 bp, Arabidopsis thaliana columbia
gttataaagaacgcgaatttcgatcaaattccgtcgtgggtttctctgaagtcgagcacttcttctccgtctgttaaaatctcgcataagcaaggacaagtagagaatcttcatttggtttcgttgtcgaagcataggaagctcaacgaagcatttgagtttttgcaagaaatggataaggctggtgtctccgttagctcgtattcttaccaatgtctctttgaggcttgcagagaattgaggtctttatctcatgggagactcttgcacgatcgcatgcggatgggtatcgagaatccttctgtgcttcttcagaactgtgtgcttcaaatgtactgtgagtgtcggagcttggaagatgcagataagctgttcgatgaaatgtctgagttaaatgcagtttctcgtacaacgatgatatctgcttacgccgaacaaggaattttggataaagctgttggtttgttctcgggaatgctagcgtcaggcgacaagcatccttcttccatgtatacgacactcttgaaatctttggtaaccccagggctttagaacttggtagac

SEQ ID NO: 21852 - DNA, 620 bp, Arabidopsis thaliana
gtttaatcataaaaacaaaacaaagaaattcgtctgccaaattctagaaaacaccataactataatctatacatcatgaccacttcccgtcaaattctaaacgccaaacgctctagtatggaggaggtgggtattgtcctggatatggacctggaaacaagaagaaaaaagatcaaccaccactgactatagttagagacaagcaaatgcgatcaattgcagcatagaacaggaaagaaaggaaggtaccttgtgggtaatatgatggttgcggagggtatggttgaggagggtaagctgaggatggcggaggaggtgggtaagctgaagggatcggagggtagcccgaggttgagggaggtggataggcagatggctgaggaggataccctgaagctggagggtatcctgatggctgagggtattgttgtacttgtgggtatagagatggtccagagtatggtggtgctgttgaatacggagatgcagaaggcggtgctgagtattgaggtacgtgaggtgcatacggtgctgatggcgcagacccgtaattatgtttctgcatacaagagtggattgtgtgtttagccttttgtttataatggaacatgttaccaatg

SEQ ID NO: 21853 - DNA, 610 bp, Arabidopsis thaliana columbia
  unsure (1)..(610): unsure at all n locations
gttgtcttcagtatgaagctcgtgagcgaccaaacataaaatctttggtcactgcactgatatctctccagaaagacacagaggttctgtctcatgttctaatgggtctgcctcaaagtggtacttttgcgtcacctccgtctccttttgctgaggcttgctcgggaaaagacctgacgtctatggttgagatcttggaaaaaattggttacaaagacgatgaagatgtaagtcgtcatgctttacggttaccactttagagttagaatccttatgcttcccatcccatgaaggcttctttatgtgacatgtttaaacgcagctttcgtttatgtggacggaacagatgcaagaagctataaactcgaagaaaaaaggtgatattgcatttagaagaaaagactttagtgaagccattgagttttacacgcaggtatgtctttctttcacacttgaatccgtaacaagaccttcctccatagttgatgatgccctgtctataaaaattgcccagtttcttgatttgggaatgacncatgcaacagtcttggtgcggcgaagcaaagttactaatgagtacatggcganagaagcttagatgatcaatgaa

SEQ ID NO: 21854 - DNA, 328 bp, Arabidopsis thaliana columbia
ataaatccaaactaggcttatgatgatggaatctgctcagtgtaacactggtgcgtttgaaatagataagagtgtcatcataggaatgaggtggcaatcgtatatagcacggagctttccccagtggttgagaagtctgtttgaagcagaaatgactcagctacagggtatttgaggtctacctctgattgagtagcaggtttgtagcaagtagtattaagaggtttgaactgatctaaacatgggagatttcaaataggtggatgaaaagaataatgctgtaggtggaggtaataagattaggatggtcctttagtaggtttgcatt

SEQ ID NO: 21855 - DNA, 581 bp, Arabidopsis thaliana columbia
caatgtaccttctttaagcatcgactctctaaagaacttgccaggctccacccacttatttaccgttttgccaccaccgagactactccggttatatttcgcaaattcgactccggttttcgtgtagtccttgaacgtagagttctgagtatacgttttgaaatcaattttgtttccctcagctcctttaccataaccactaaacgactctgaacccgggttaatagatttgccgtaatttacgaaatcaaccttctcgaagtttgagttcttggcatacgacgagaacgaatcatcaccaacgttagcattgtctctataattcaagaacgtgtcaacggcagcgttcccggaggcaccgtagcttttgaagttattctgaggaacattgccgtcaccaccgtagcctttgaaagtgtcgttggctgcgttaccgttttcaccgtagtttgagaaatcagatccgattacgttagaggagacaccgtaagaagagaactcgtttggagctccgttaccgtttttgccgtaactggtgaaagattgacccggtccggagttggcttcgtgagtataggttt

SEQ ID NO: 21856 - DNA, 1265 bp, Arabidopsis thaliana columbia
tatatggatattattgagcttgagagaacaagtgggctagtggtgttccaccatgtcaggtttcaaacctggtctaggtcctctagaggtttatttagccaaatctactaataatgaaaaaagaaacattgaatattgaccttttttatagtgtgttccaaaagcatgaaattctagctatattacattattatgaaaaaggcctacgttataaacttaaagcccattaaggaccaaaatcaaattgaccttcttttttcaaactaaaatgaaactaggccggcccatcaaaagtcaaatgtcttggttggatagtccggttggtcacacaagtgacatcgtcggaggagaaaaggtagtgccaatattagccggcgattcagatggagacggtggtcgataaagatgttctgaagtcttccggggctgagcttcttcccgacggacgtcgaggtttacgcatccatgactgggagatcgaaaccctccgcggcacgattctcacttctctcgctgtcgaagagtacttaatctctatctctctcacctcataagatacgatcatatatgatgaatttgttggtgtctgtgattacttgtaggtgatatttgtgtttacggttttgtatttgtgctcgtcgttaatttgatgaactgagtagtgtagtttgggtttttgagctcgtgtacaccgtattagtggaacgtatcgaaggaaatcagaattgtgtccttgatttcgagtttttcctagtttttggtggagtgtatgatctattctgtgaaaaaatcaaaatcgtatttgctttggtttagtttttgtggttactgattttagttgttccgatctctgctcatcacatttcctggtatagctctctgtttatctcaaatatgtaaatagcatcttctgagattcacgaatgtgatgtttgattgtaacacaggtgggaaaaaaagcttaagacatctcacttacctgaaatggtttttggcgagaatgcattagtccttaaacacttaggtagcaacactaagattcattttaatgcgtttgacgcactagctggttggaagcaggaagggcttccacctgttgaagttcctgctgcagcacaatggaaattcaggaggtaagtttcaggatttgactgaaaaatatatcacaaaagatattattcttttcaatagggaagctttgcttgatagttgtatctgataccactctgatctacttgcagcaagccgtctcagcaggtgatacg

SEQ ID NO: 21857 - DNA, 1216 bp, Arabidopsis thaliana
tcccaatcacgttattgtggtaaaattctaattttctatagtagtgtatgccaaatattgtttggaaataatcttgttatttgtgcatttgtttttgcagacatgtagtaattgtcaacaaactggacacaacaaacgaaaatgtaagctcgatccagtgcctaagccacccaatctgcctcctggaagaccttcaaagaaacaaaagaccacccaatgaacaagcttgaagtatgaagtcttgctttttttagatttcgatgttgaaacatgtttgaactagtaatgttggctttagaatttttttttgttctattagatttaatacacatggatctctaaaagaatttttggatcggttgaaaatttaatttttttttaacagcaaaaataaagcaatcaatatcatacatcaacaatatccaatgcaatggctgtaccagagtctcctcaatgatagatcgttgatcagaagtggcagcgtttaatttaataaagcaaaggaattttaataaaatgttttattgcagcaaaaaaatacatgtcgtttttcttcaatgtaaaatgcagcgtttaatttaactggatatttaacagtacagtagacggaatgaggttttcactaacaattttagagttcatgtgttttttcattaaatatatcattgaggggttttttcacaatccatatttagttggggggttttattactaaaaaccctaaaaaaatatatatataaaaagtgaaaagtaaaaaaacagtagttaaaaacgacggcgtttcagttcactgtgtcctctcggaaagcaatctgtattttagtccaatttctggagagaaagactaaacccattgctcaagaaaacttttcagacagatttgtttcgagaaaagatcgcttgcttggcttttcaggataatctgagatctatctgtagaagaagcagatacagaattcagaaacgatgaccgacgtcgatgaatccgttagacgccgtacagccgccgtttccgagtaccggaaaaagctcctccaacataaggaactcgaatcccgtgttcgaacaggttcgagtcctctttcaaagattcaattgcatcaatgttgccaatgcctcatctatacttagttcgaacggctttgaatgacttgaatcgtagggcgtcacgttttctcacatgtggatttcgtaaatttagctgatcctgtgtgaa

SEQ ID NO: 21858 - DNA, 489 bp, Arabidopsis thaliana
gcgactctatgaccacatcagctgacatcagatcgatatcagagaagtcataagggtcttcgtcttctgatgaaccaatgtcgatatcatgaatcgagtcattagggtgtctcacaactttgacactctcaaaacaccgcttctgcaaatccccaacaaggttaacattgaaacaccggcgtaaatcaagatgttccaggtttgagcaattgtcaagaatagcgtttaaaccggtgtctgacaacccgttcccactgagctggagatggcgaagtttcggcattgtttcagcgattgctagagcatcatcgtcattctccttttgaggatgcttgttcagcttcaaagtcttcatatttaaacaacactggcctacaactctgagagactctactgaaaatgagcagtatgaccactcgagttcttcaagtggaagtttcacaacgtgcttcgacaaatccatcgtctgtaatttgagaacaccttata

SEQ ID NO: 21859 - DNA, 1897 bp, Arabidopsis thaliana
gaaggagtgtgtgttcaggattgttgcaagtggagaatatatgcatcaataaccagtcgttcagacaaaatggttgttcaatcttacaaaggaattcacagttgttatcctataggtgttgtggatctctatagtgcaccaaagatagctgctgattttataaatgagtttaggactaattcgaacttgtcagctggccaaataatgcagaggttgtatctaaatggtcttcgagtcacaaaaactaaatgtcagagtgcaaggcagattatgaaacacatcattagtgatgagtatgttgagcagtttacgagaatgtatgattatgttgaagagctgagaaagactaatccaggttcaacaattattttaggtacaaaagatagaatttttgagaaattctatacttgcttcgaagctcaaaaaacgggttggaagacagcatgtcgacgtgttattcatttgggtggaacatttctaaagggacgcatgaaaggacaattgttgactgctgtgggaagggatcctaatgatgcaatgtatatcatcgcatgggctattgtaccagtggagaacaaggtctattggcagtggtttatgaagttattaggagaagacttacgtttggagcttggtaatggtcttgcattatcttcggatcagcaaaagggactgatatatgcaataaaaaacgtcctaccttacgcagagcatagaatgtgtgctagacacatttttgcaaacttgcagaaaagatacaagcagatgggacctttgcataaggttttttggaagtgtgcacgcgcatataatgaaacagtcttttggaaacagcttgagaagatgaagaccataaaatttgaagcttatgatgaagtgaagcgaagtgtcggttctaactggtctaggtgtgaaaaaatttcgtctcttatttgtctatggttttggttggtttgactcttgttttgttctctgcaattgtcactctggttttggttgatctaatggatttattattttctccttttgcagagcattttttagtgatatccaaagtcggctgcggtagaaaataatatcagtgaatcatacaatgctgttttgaaagatgctcgagaaaaaccatgtggttgcattgctagaggatataagacgacatattatggctagtaacctagttaagatcaaagagatgcagaatgttacaggcctgatcacacccaaggcgattgctattatggagaaacgaaaaaagagtttgaagtggtgttatccattttcaaatggaagaggcatttatgaagtggatcatggaaaaaataagtatgtggttcatgttcgtgataagacttcttgcacttgtagagagtatgatgtgagtgggattccttgttgtcatattatgtctgcgatgtgggctgaatataaagagacaaagctgccggagactgcaattttagattggtattcagtggagaaatggaagctatgttacaactctcttttgtttcctgtgaatggcatggaactatgggaaacacatagtgatgttgttgttatgcctcctccagacaggataatgccaggaagaccaaaaaaaaatgaccgaatcaaagatccaagtgaagaagcttcttcggagaattctcaaaaagctttagtggtaagctagtcgtggtaatacgtctctctttcttatatatatgtaattatgggttaatattttaattacttttgtagacatgtagcaactgcggacaaacagggcataataaacgcacatgccaaatagagctagtgcctaagccgcctaatccatctctagaattccttcttatcatgcgaaagttattgtggtaaattctaattttctatagtagtgtatgcgcatattgtt

SEQ ID NO: 21860 - DNA, 554 bp, Arabidopsis thaliana
cagtaggaagaaaatgttatgaatatctttacgtaaagaatgatcatcaatctttcaaaagagctacaaaaatgtctagatcaagacgaatgagtcggagttacaataactaagaagaaaaaaagaaacaacaagtattaattaacagtaataacaaatgctaattaacaaaaataacaaatgctttgtttctcttattaataaggaaatctttgatattgtgtttgttgttgtatatttttttacaagagagaactatgcaaatttatggaaagaatacaaagctagtaactcatatgaacttagacacttaatatttatttgcaacataacaaaaaattgtatactatgtaccaagcctaagattaagtcgtcttaaccagatcgaatgaagcatcatatgcatcacatcgtagggtttagctggacgattcaacacgaaatgctgcttcacttctaaaactctcttatacatcttcaagtatcttacgagagagacactttgtagaatggttttgatctcctttatcctagaaacagggatttgtatggag

SEQ ID NO: 21861 - DNA, 572 bp, Arabidopsis thaliana
cggaaacacataaatccatgatttaatggtttagaaggtaaatctaaagatatagtaccaaactcacctacacatgacccacaatcaccagctccaggagagttaacaggactgtcataatgtgcattcatcaatacagatgcatcagtgtcaagagaattcattgacgagatactgcaaaaaaaaaaaaaaaacgatgaaaatgtttagcattaataattggggacacaatcattcaatgttgcagtctattgatgactgaataaaataacacaaagaatggtcaaccccaacgtgaatcataaatacaaacaacaaagtctcctgaacaacacgtaaaaaccataaatctcaatgtaccagtaaaggaacaaactttagtaccgcataagtatattagtatggtttctgtatccaagtgatatgctgtgtcctagaaacatcatgctaaaggaaccatccacttgagtctcttccacttcaaccctataacagcaacaaaaagcattcatttttcagctcagacacaaaaagttcacaagaaaaaaacattcttttcttggagagtgatg

SEQ ID NO: 21862 - DNA, 647 bp, Arabidopsis thaliana
aatgcatcaatcacatacatctcctcctcactcatgttctttctccttatcgaatacccgattttccgtccgttacagtaaatcccccacacgtactcctccaacaccttcttcctcgacgtctttgtctcgctttccaaagcaatcctaacagtttccgaggccatctccttttgcagcgccgaagtcagcatcgggagctcgatgatgaaaattggcaggcaatgaggatcttcttgtatagcaagaaagactcttcctttgcgaaacccgaatattgttcccgttgttgcgtagtctttaagtaagggtcttcgatgccctcgactcaacaagttcaccatcttgcaaccagatgatagcattggtatgagcttgaacattttaagcaccccaccaccgatgcttccagaagatttcttcgagcttttagagtccatggaggtaccagtgtgccgcaagagcgagacgaaggccgagctatccatattgaagaaggggttagatcggatcggcatagtttttacttgtctttccttctactcacttttcttgttgtcttattgtgtgtctgtggatgaattaagagaaagatatatatacacgaatatggaggggaagtgggggctagtactagttagagatgg

SEQ ID NO: 21863 - DNA, 537 bp, Arabidopsis thaliana
actctgaggattgagtgatcatatcaagcccttctgcttcaggtgcttctttgtttctagggataatcccggggtctctcgatgatgttaagaagagaaatgtaaaatcctgtaaggaagaagcatgaatatgatgcagaaagggcaacgaaatctcagaaagaaagaaacatgtttttagggttttaccaggacagtgagcaaaagtgcacccaacaatataagagagtggaacaaaggatagcgttttccgatcaaaaaaaccattcgtatgcagaaagtgagagcaggacctccaatcatagctgttgtcagaaggagagacgatgcatctggaccaaagactagtctccctccacaataaaatctctgaacgaacaaaacaagtcaagctagttcagacattgcagaacataatctcagctttcaattgttcaaatctaattcaggccatgatgcgtggtttgcaaggcaagttattatgtccgcattcaaaaacgctttctttttgtctgtaaattcaaaacaagagaaaac

SEQ ID NO: 21864 - DNA, 552 bp, Arabidopsis thaliana
gactttaccaccggaaagagccgcgagcttagtgagatcgccggagaaatcagatgggtatgtggagaggtcttcagtgggagagaattggcctggattgacgtagattgagacgacggtgacgtcagtgagggctagtgattgacgaacgagagataagtgaccttcgtggaggtaacccattgttggtactaaaccaatggtcttgccttgtgatctcatggctcgagaccattttctcatagagtctttgtctctgattacttctggttccattgtcggaaaattgagattgtcttccgacgaatgtttctcgtggagagagataactggaattatctaaaccaaaaataaaccggtcatagaacaaaatctatgggattttatgattggttaaatattaaccgaatttgaattttttgtatattccggtttgttttcgatagatttcaagaaccacgcttgtaaccggtctaagaacgtggttacaaaagaaaattcgcgaaccagacttaactatccagaaaacgagtgagccataaagtttatact

SEQ ID NO: 21865 - DNA, 522 bp, Arabidopsis thaliana
attcatttcactttgaagagaccagagaaaaaaacttgctcagacatggggatgaccgtcgtaattattctggtgttctcatttttcgtagcgattgtaacggcggagacctctccttacatcatccacatggacttatccgctaaaccgttgccattttccgatcatcggagctggttttccacaactcttacttcagttataaccaatagaaaaccaaagattatctacgcttataccgattcggttcacgggtttagcgcggttctcaccaactctgagctccaacgtcttaaacacaaacccgggtatgtctcgttcaccaaagatttaccggttaagcttcataccactttctctccaaagtttatcggtttaaattcgacatccggtacatggccggtctcgaattatggagctggtatagtaatcggtattatagataccggaatttggcccgatagtccagctttcacgacgatggggttggttcggttccgctaaatggaaaggagcatgtga

SEQ ID NO: 21866 - DNA, 541 bp, Arabidopsis thaliana
gaattctcctgtaaaaccgctttaactcttcagcacgaacaccacgtgaattctccagcacctgtggtcggagcagcttagtggcgaagatcttcttcatgaacttccagtaatctccatagggagcgtaaatgaagctagaagatccaaacaagagggactcatcgatcgcagcagcaccacgagatgagacgttcacatcgtgggccttaaagatctcatatgccactgaagcagatgagacaaggatgatgggaacactaaagatccggagatggaggaaaggtccatacttggaggagagtttttgtaaagacttgtgagttagagaagagaggagatggtgaagatgaccaatgataggaagagacggagggctcggaggcagatcacagccaactcgtgtgccctttggtttcctgaagaagagagagtaacagagaagtgagaagaggcataggaggattatgtacatgaaacagtgctgaaagtcaacgctgataagtgttgccattgttgcccaaagtgaagaagaagtatg

SEQ ID NO: 21867 - DNA, 533 bp, Arabidopsis thaliana
caccaaaaaaattccatattcttcaaaattttctatcgagtggtatcaagaacaacttcgagtatacttgagttcatattcgaggagagtgtaagaatatatattacctctgtgatatacttggagtaactatcttcctccggatacttctcacttgcataaaatagcatatgctctaacaaccaaaaaacaatagtacaacgttataacaaagccactccatattgaaactcgctttaatcaatgaaatatagcacactggttgaatcattccatggcaaattccaaaatcctgaagaattcaacgtaccaaggaaatgagcaaggccttctaatccctgtgggtcagagaaggatccaacactaacgctcattgaagcagcacacttgaagaaaagaatcaaactttacgaatcagtaagcgataatccaaaatcaaaggaatcaatatcagaaaccaaatcgtagcgatctcaaaccttatcggtatcgggatcgctgatcaacaggacctggagcaagttcttaaggac

SEQ ID NO: 21868 - DNA, 261 bp, Arabidopsis thaliana
atggatcgttaccagaactcatggcatagcgacaaaacgtgacatccatgtctactctcgcaacacacgagtatttagcgccggacattatcatgaacgcctgtcaccgtagcgccgtcgattaatcgaccttcgggatcatccgcctcgagcatcttcattgatcaccaccatttgaagggtcaggatacagagccacgcttcataatgtaatcggacaacctcttagatgcgcggaatattctcaggttagctcgacgg

SEQ ID NO: 21869 - DNA, 584 bp, Arabidopsis thaliana
gttcctttggaaatcccttattgagtttgtggatgacgcttttgtttgtagaaaatggtgaaggtcttcaagttcttcactaccaagttgggcagaagtatgagcctcactatgactatttcttagatgagttcaacaccaagaatggaggacaacgaatagctactgtgcttatgtacctgtaagtaactcacaaaactcattattcctttttctcagagcatttctgtgtttaatctttctttttttttcacacgattctttagctctgatgtcgatgatggtggcgagactgtgttccctgcagcaagaggaaacattagtgctgtcccatggtggaacgagctctcaaaatgtggtaaagaaggactatctgttctaccaaagaagcgagatgctttacttttctggaacatgaggcctgatgcatctctagacccttcgagcttgcacggtaataagactaaagaggttgctttctttagaagctaatacaaatatcagtttctaaacttcaatatcctatgcattgattttcaggtggatgccagtggtgaaaggaacaaatggtcatcacgaaatgg

SEQ ID NO: 21870 - DNA, 606 bp, Arabidopsis thaliana
ctgcttcatatttatcctcttatgcctcttctcactccttttctactatctcatcttcaggaaacctaagaactcacggcttgtcgcttatggctgtgatctgcctccgagccctccatctcttccgattataggccatgttcaccttctcctctcttccctagctcataaatctttacagaaactctcatccaagtatggacctcttctctatctccgcgtcttcaacttccctgtagtcctcgtctcctcggcgtctgtggcctacgagatctttaaggctcatgacttgaacatctcatctcgtgacaacccttcaatcgatgattccctcttgattggatcttctgtctttggtagtgctccttatggagattactttaagttcatgaagaagctcctggttactaagctgcttggaccacaggcacttgagcggtcaagaggcatccgtgcagatgagcttgagcggtttcactcaagcctgcttgataaggcggtaaagaaggagatcgttgagattgggaaggaagcaacgaagcttagtaatacagcctctggaggatgagcatgggagaagtttcagagaagatggtgagctgagag

SEQ ID NO: 21871 - DNA, 562 bp, Arabidopsis thaliana
  unsure (1)..(562): unsure at all n locations
cagtttacacaaggtgttgttcatgagcttcatcgcttccttaccgatctcaacgctctcattcttcgtcgccttatcaagaatgctcctgtaaaatctatgtagctcttcaacacgaacacctcgtgaccgctccagcacttgcggtcggagtagcttagtggccatgagcttcttcatgaacttccagtaatctccatagggagcgttcaagatgccagaagccccaaacatgagagactcatcaagagcaataataccgcgagaagagacgttcacgtcatgggccttgaagatctcgtaggccatagaggaagaggagacaagaatgatgggtacatagaagatgcggataaggagaagaggtccgtacttggaggagagtttctgaagagacttgtgagttaggacagagaggagaaggtgaagatggccgatgattggaagagaaggagggcttgaaggcagaacaaagcttcgtgagtcttttggtttcttgaagaagagagagtgacagaggagtgagaagaggcatagaaggatgaagatanagaagttttgg

SEQ ID NO: 21872 - DNA, 329 bp, Arabidopsis thaliana columbia
caagcagattcgcgatcaagggtgaaattgggtgctagtaacaatggcaatgcagaaggagagacaaaggaggaggaagttgaggtatctaaagcacaaggagcgttgattaaggtattcgagcttttagcggcggaacatgatagtgatacggtcctgtgccgattgttgactcagtctagccatgccggtgctgtgataggcaaaggtggtcaaatgcttggaagtattaggagagaaactggctgcaaaattgctatacggattgacaatttgccgatcatcgctgatactgatgacgagatggtggaggtacgaagtctaattga

SEQ ID NO: 21873 - DNA, 534 bp, Arabidopsis thaliana
ctcgtggcgcggcggccgtgctacctcgggcgcggacgagacgaccggcgccgatgtgatgcgccagatgctgcgccgccaggtgttgatattgaccatcgtgggcactgccggcgtggctctgatcgtggcgggcttcgtcgtccgctagctagacgccgatgcggcggtactcgattgccgtgcagcggtccataacgaccggcaatcccgcttcgtgggcaatccgcgccgcttcccagttgaccacgccgagctgcagccacagcgagcccgcgccggtagccactgctgagcgcgcgatgtcgggcgtgtgctcaggacgccggaacacgtcgacgatgtcgaattggccggtcgccgcggttgcctcctccagcgtcgcgtacgtcgcccgcccaagcaccgaatccgtgttcgggttgatcggcaccacgtcgtagccccactcgatgaggttgcgcattacgccgtgcgagggccgcatcgggttcgaggaagcgccacaaccgcgatgcgcgcgccgactcgagg

SEQ ID NO: 21874 - DNA, 646 bp, Arabidopsis thaliana
ggtgtgaactgttaggtgtggttaatctcaaagaaccaaaagtgatcatagaatgatataccactataaacgccttgatctggtttctagtgatcttatactcggctttctcgtcattataagcagccaacaatgcgtccatcatgtctgtatcatgatgctcgtccggtttctcttcatgctccctcagaatcctctctagtagctcgtcgaatccacgggaaacacccattatctccttctggaacaacgagatcccgagcttttccagcaacctgcgcaaagttgctgccaagaaaaatttcttcgacaaagtaaatgactcggcaatcaaacccctgactatttttgcctcaccgttctcttccgaacaactcctccccatgatcatcttgcaaatggtattgttagtgagcttcattgtctccttaccgatctcaacactctccttcttcatcgccttgtcaagcaggtttgtgtataccggtatagtcatctgcacggatttctcgtgactctcgagtgcatgcggtcaagcagctttgtgacattagcttctcatgaacttcagtaatctcatagggaggggactctgatgagctggaagaccgacaagagtgctcctgaatggagggggcgcgagaga

SEQ ID NO: 21875 - DNA, 555 bp, Arabidopsis thaliana
ctctgcattttcatctccataagcttccaacaacaaatccatcatgtcattagctttataatgcttccccattctctcttcgtgttcaacaagaatcttctccagcagctcgtcgaagcgggaaacactttttatatccttttggaacaatgagatcccaagcttcttaagcggtttatcaaagatcatacccaagaagatttgctttgtcaaggccgtagactcaatcaccaagcctctgactctctccgcctcaccgttgtcctcagaacaactcctccccatgatcatcttgcagatgatattgttattaagcttcgctgcttcctcaacgatatcgacactctccttcttcatcgccttgtcaagcagatttctgtaaaaccgatctagctcatctgcacggatttttcttgaacgctcgagtgcctgcggtccaagaagctttgtggctatgagcttcctcataaatttaaagtaatctccatagggagcgaagaagaagctagaagatcaaacaagagagactcccggctggagcgtgactggagagga

SEQ ID NO: 21876 - DNA, 606 bp, Arabidopsis thaliana
ccaaaggtctcacaagatggatttggcttgcctccaagccctctatctctgccaatcattggtcatcttcacctgctggtctctaatctaactcgcaagtccttacagaaactctcctccaagtatggacctctcctctatctccgcatcttcaatgtcccgataatctttgtttcctcggcctcagtggcatatgagatcttcaggggacatgatgtgaacatctcttttcgagggaaccctcctatcgaggagtcccttttggtcggatcttttggatttttcaccgctccttatggagactattggaaattcatgaagaaggtcatggtcacgaaactgctcggaccgcaggcactacaaaggtctcgaggcatccgtgcagatgcgctagaacggttttacatgaacctgcttgataaggcgatgaagaaggaaagtgttgagattggtaaggaaacaatgaagctcatttacgacagcatctgcaagatgattatggggaggaatttttatgaggagaatggtgaggcggagacagtcagaggcttggtgaccgaatcgactgccttgacgaagaagatttttatggcaaacgtgttgcac

SEQ ID NO: 21877 - DNA, 468 bp, Arabidopsis thaliana columbia
ctatcctgatcccctaacctctaagtaaagtttcaccggttgaaggatataagagcggtagtcaaaaacagaaaggctgacaaggtcctttagcaaactaatcctcgaattctcaaccaacaaaatctttgaatcgactagcggaacctgcaagtcaatagataactaactaatttaagacaatttctgttattatgttgttaactaaaactcagaacaggattaaaccttgtaggtgaccacagatttgagaagattaatggacttcaatactatatcatcactgatatgtttatgcccatttataagatttctgcaatctactagatcggtgaaatcaaatgtcggctgcgatgctcctccgagaacatcttgtactgcacacaaagatagttttgtagttagagaatctccagcgtgtctccttatattctcttcacatttatcgcatagaagagatgcatataa

SEQ ID NO: 21878 - DNA, 839 bp, Arabidopsis thaliana
caccttgggtcggtgaacgctaattatttagttattgatattattaatttgttcctcgactctctcacaacgctttcacgttcgttcagtcagataacattttttaatgtaatgaacaaagcatgcttggtcttatactatataacatattcatggattattcagtagttctgtatctgccccctttgtttttgagaaacaatggcaacaatcgtcgttgactttcaaaaaattcattttcatcctcagatcctcttatccatattcacagtcatttgcatctttgtattcttcttcaagaagccaaagggctcacgaggctgtgatctgcctccgagccctccttctcttccgataatcggacatcttcaccttttactctttgatctacctcacaaagcctttcagaaactctcctctaagtatggacctcttctctgtctccgcatcttcaatgtccccatagtcctggtctcctctgcctctgtggcctacgagatcttcaagacgcatgacgtgaacatctcatcccacggccaccctccgattgacgagtgtctcttttttgggtcttcaagctttgtaatggctccttatggagattactggaagttcatgaagaagctcatggtcacaaagctgttcggacctcaggcactcgagcagtcacgaggcgcccgtgcagatgaactagaacggtttcacgcaaacctgcttagtaaggaaatgaaaagcgagactgtcgagattgctaaggaagcaataaagctgactaacaatagcatctgcaagatgattatgggtaggggttgtttagaggagaacggttaagcagagag

SEQ ID NO: 21879 - DNA, 809 bp, Arabidopsis thaliana
ctgtgatatttgatatctaataactcgaaaatatgattcccgttgtttcattataggagcaagaaacgatgcaacgactatgatgatgatcctacgaggctaagtcatcaaataacataatcaaaagatgttctgctgcttacgacaaaggaaacatccgagagacgaagcacattagactcaatcaagtctctcaaacgaccaggcgtaccaatgacaatatcctaacaaataaatcaagaaaaaacattactcaactgatccagaaacataagagaatgtcctaatcaaagaacataataagaaatcttacaactccagatcgaattgcacttatttgaggccctttagagcttccaccatacacacaaatcgatttcaaaccacacggttctccagcttcacgcaaaacatcagaaatctaccaaaccaccaaaaacaaacacaacactaagaaacttgaccatacgttttcattttcacattgtaatcataatgaacaagaaacaatatatatacctgaacagccaattctcgtgtaggagaaagaactaaacaagtaggattaaccttctttgatcctccaccaatcttcttatttttcttcaacacatgcataatcgcaggaatcccaaaagccaatgtcttacctaaatacacacaaaacacaaaaagtttcaatcttttcaaccaaagttcaaaactttcacacttccataaacattactaacctgacccagttttcgcaatcccgataagatcacgcccatctaacaaaaacggccacgtatgtgactgaatcggagacg

SEQ ID NO: 21880 - DNA, 557 bp, Arabidopsis thaliana columbia
gcactaagagtcactatactctttagatacattacataatgcatcttttacgaaaacaatgcattatgtaaacatcaagacctaagtacttcaaggcaagaacaatgctcatttgcaatttacacagcattgttatagttatgagagcattatcaaatacctttaagatagcaccaaatgctcacgagataactacacacaattcccctcatcggaatcacaagtcaaaggagataaaacattgactaagacgtagacaatcacaagcatttgtagtgaaagaaacaagtgatgcctacttagttctgttcttcattcccccaatttcagaaatcgaaaccaataacgagaagagaaactcaggagaaaagaggactggaatgtttagaagagatacgaaccaccattgtcacccttataccgatccgagcgattaaacgaaggccggtcacgagagacttctccgggctcatagtctccggcggcgttgcggccgtcttctctgtcgttgcttccggagggacgtcgacgagactgctgatgtgaggcgggtgatg

SEQ ID NO: 21881 - DNA, 599 bp, Arabidopsis thaliana columbia
tccaccataatccgccatttttccaccacatctggcaaacctggggagtcctttcacacccttgagatccctccagagtcttgccatagtgtcataccatttgaagactcccttatagtaatagtaaagcacgttctcaacaacgcaataagaataccatacccaacctatatccatgtcccatttcatcctttcccacctaccttccttgggtttgtaaatcaaaccatgagagtttgcaatcaagatttctccttccaccactgcgcttttatgtatgctacaacctccaatctctgcgccagggctcgagacagactcccaagtttgggttctaggatcgaaaacctccatccagttggaggaattgctgcagtctttgcagcctcctgttacatatatctttccttcaacaacattagccgccggatatctccgctctactctcatgcctggaccctcgtgccatgtgtgagactgacagtccaggaccgagacgatagacgagtgtgctttgtcgatgggtctccaatgttgtagatattagaccaacggcaacgagacccgacagtacgcaggacgagaatggagacctggga

SEQ ID NO: 21882 - DNA, 513 bp, Arabidopsis thaliana columbia
  unsure (1)..(513): unsure at all n locations
atccttttttttatatgtggtccaaaacaatactaaacaaaaccgtaaaagctacaaacaacgatttcaaaataaagataaaattattatatataagcaaatagaatcataatattttgttctttatcaaatctaaaagaattgaccataacacaaacatatagattgaaggatattaatctgaattttatgtaaatacgcgcaacttttgataaatctatatattttcgataaaagagtgttgaacatatgatgatagaaacatatagaattttgagaaatatatacaaattctttttgaacaggcagaatatacaaatgtgaagaaatttgtgatggccttcttctttgctgttacaacaccatcatgaatcgctcattggtatagccttgtcgagcgtttacagagacaacagtccaacagcattaatcacggtaggactgctcaatgcttgttctgcaggattgctcatttatatggcacttgtagatcttctagcangcagagttatg

SEQ ID NO: 21883 - DNA, 668 bp, Arabidopsis thaliana
attttcgatcaaaagttttcaccagaagttccggattccacgtatccttctttgaaagaaccagaaatgcatgttgccgcaccatgtgtagtaacagatcttcctgctaaaaacatcaaggtaaaagaaggtgaagtacataatgagccctacacagcatctgatgtttctatgaatcagaagagtggtttattggaaccagaatctactgaaagaacatttccctcgagcggtggtactgttacgatttctccagatactcagaattctcttccaaatggtacaagtgttgaatcaataagtatatggagcaatggaggactccttggactcgcgccattgaaacctccagtatttgctgagcctaattctggaagccaacatataaagcacgagatcaacgaagctagtgttctttcgacaaggaagcaggaatcatcgagccgatcagttgaaaatgctgagaagagctcacttccattaattgtttcagatcccacgtctcaacaacaaagcaacatgtcgagtctctctcccatgcagagcactggaacatcgttcagagtttttggcttaagtcatagattactcatggctgggtttcggggaaactcttcttcaacttgcaaatttgaatctgtacctagtagtagctatgataccagagt

SEQ ID NO: 21884 - DNA, 470 bp, Arabidopsis thaliana columbia
gtaccttccttctctttgctggcttctccacgatcgggctcttcttcatttggttgctcgttcctgagaccaaagggcttcagtttgaggaggtcgagaagttgctcgaggtcggcttcaagcccagtctcttgcggcggagggagaagaagggcaaagaagtcgatgctgcttaagacgatgatgatcacttatctctctctttctatttttattattgtcgctgtctgttcctaattctataatgtatgacaccggatttggaatacgtatttttcaacaccttttaaaacctcaaagaccacgattcaaagcaaaacttctaccaacgtgaatttccccaaaaagagtttacaaaagcacatagcagacagctttgtgcagccaaagcatcagcttaataagtgaaatgcttacttttgagacagtagtcataactatcaatgtcaaagtggtgggaaaactactgt

SEQ ID NO: 21885 - DNA, 994 bp, Arabidopsis thaliana
ctgttttgaatcacagtctttttgcggggtttgcaggtggaggagacaaagtatgtgtttgaagcaaaaaccatacagagaatggagctactgattctgtctactctcgagtggaagatgcatctcattactccaatttcgttcgtagaccacattatcaggagattgggacttaagaacaatgctcactgggatttcctcaacaaatgccaccgtctcctcctctctgtaatctccggttcgtaaacgacaaaaagaaaaaagccactccatttcgttttaccatctgctgaatctgagtaatcatcttacattcttgtcttatcttcctcaattgtctttgtcagattcaagatttgtcgggtacctcccatcagtagttgccgcagctaccatgatgcgaattatagagcaagttgatccctttgaccctctttcataccaaactaatctcctcggtgtccttaacttaaccaaggttagcttctctaatcatctctctacttgttttcactcagtcattttctcaaacaactctcgtgcattaacaggaaaaggtgaaaacttgctacgatctaatcctccaactaccagtggaccgcatcggtttacagatccaaatccaatcttccaagaaacgcaagagtcacgattcatcatcatcgttgaacagtccaagctgcgtgattgatgcaaaccctttcaatagcgacgaaagctcaaacgattcgtggtcagcgagttcgtgcaacccaccaacgtcgtcgtcgtccccgcagcaacaacctccattgaagaagatgagaggagctgaagagaatgagaagaagaagccgattttgcatctgccatgggcaatcgtagccactccataatcgaaagctcgatttcgtttatatgatatttactgtttttttaaactttgagaacaatctttgttgtattaagctttacccgtttgcatatacgaaatgtcgcgaatgcccttacgtgc

SEQ ID NO: 21886 - DNA, 583 bp, Arabidopsis thaliana columbia
tgaacatcttcaagctactgactctgcggattctgttgtctactatctcacacggatgtgttcaaagagttcccttcagtgttgttgttcttgaagaaaaaagagtttcggtgtttcaggacttgagtagaagctctgaagcaagtctcttcagtgactccgacgctttaagaagatcggattccgaatgtcccgctgagacgtagagtttgattcccacaggtaaccggcatttatcaagaaatgatcttttagaactcacaaccaacaatgagtcttccttcagagcctgcatgcatctagtcatgtcaagaaacggggacagggtctagatttggttttgcaaagaaacaatgaacttacacggtcagccattttctcaagtagaagcaaatcatctttagctgaaccgctagatttctctaattttaagaaaacaataggtgattcccggttgcttgttaatgacatccccttgatatctgacaatcctgcgttgttcccagcatttctttttcaattagaggaagataacaaactaaatcaaactctaattgttgctagattagattaaaacttgaag

SEQ ID NO: 21887 - DNA, 471 bp, Arabidopsis thaliana columbia
tcttagaattatatgcccatacgtatcttcatcttatagcgtatgacatgtatgactagtgagtctagttccatgattctagtgttatgtaactatgacacttgtcttttctacagatagccatagacagcgtataatcagttggctcgatgcgacgggacagatctctgctgcatttgacttcacaactaaaggaattctgcaggtaagtagattcttcaagacctctaaaattcattgagttttgcttacataatcccaccattgtattgaaacacaaatgcttcttgttacaacaggaagccgtacagggtcagtattggcgtttatgtgatgcccaagggaagccaccgggtgtaatgggatggtggccttcaagagctgtcacattccttgataaccatgacactggctctactcaggttacttaacaattacttctgtaatcattttctttcagccttcatatgt

SEQ ID NO: 21888 - DNA, 517 bp, Arabidopsis thaliana columbia
cccccgtaagaaattttctcgcgttttccctcggaatattctctcctggtttttttttgtttttgccttgtttgatgcttcgtctctctctccctcgtttctggaaaaaggaagagaaaagagaatccacgtaggcgtgtcaggtcagacatttgatgatctcgaaattacccctgcaattataccggatttcagttctaacattgctcctggaccaagccggtttatagtattcgattctaatggaggagatgatgacaacgtggcgcaagttgagtgtgtctatacatggagcagagcattttcttcactgttctcgcttcgccagacgttaatggcggatagaggagctctttcgttaccgcgagcttctacttatcttagtttctcaaacctccatgtctggcgattccacaaccctagatcgttatcctcctctcgttctcaactcctctgtttcacttcctcatgctctagagtaacttcggcgaagataattcagctgaaccgccggaga

SEQ ID NO: 21889 - DNA, 517 bp, Arabidopsis thaliana columbia
tcattatatttttctttttataaggggagaggaacatattctttttatcacattggtctcaatatcaggtaagaacaaggagtcaagatctatgaatactaaccgtttaaagaggtaaaaggaagagcagtgagattagctccagccttaatggttgagttggaaactaggatatcctcaagtttgttggtttgccatctagattttctaatagtcggattgactcgaacctgcaacactcatcaatgaggcaataaacaagagaaatatagatcatgattcctaactaaactaaagaaaaagttttttttttttttaaagtttttttagagaagaaaataaaagaaataaccaaatgaactgcaaaacaaaaataaaggcaatattagtatgaacctccaccagacttaaacgacactgtccccagtggcattcaaatccagagaaagcggagaaaataaatcaaacttaaaagaaaataaaagacaggcgaaagaaaaatcaaaccagtgggttg

SEQ ID NO: 21890 - DNA, 790 bp, Arabidopsis thaliana
  unsure (1)..(790): unsure at all n locations
ataaagtgtgatgattttgcagatgcgagttgcttgacgaaggaatacttggacacagttatagattggataccgtcaatgaacaatgtaaaactaaaagacattcctagttttatacgtaccactaatcctaacgacataatgctcaacttcgttgtccgtgaggcatgtcgaaccaaacgtgcctctgctatcattctgaacacgtttgatgaccttgaacatgacataatccagtctatgcaatccattttaccaccggtttatccaatcggaccgcttcatctcttagtaaacagggagattgaagaagatagtgagattggaaggatgggatcaaatctatggaaagaggagactgagtgcttgggatggcttaatactaagtctcgaaatagcgttgtttatgttaactttgggagcataacaataatgaccacggcacagcttttggagtttgcttggggtttggcggcaacgggaaaggagtttctatgggtgatgcggccggattcagtagccggagaggaggcagtgattccaaaagagtttttagcggagacagctgatcgaagaatgctgacaagttggtgtctcaggagaaagttctttctcatccggcggtcggagggttcttgacccattgcgggtggaattcgacgttagaaagtctttcatgcggagttccaatggtatgttggcattttttgctgagcacnaacgaattgtaagtatcttgtgatgaatgggaggttggtattgagatcggtggagatgcaagaggggagag

SEQ ID NO: 21891 - DNA, 544 bp, Arabidopsis thaliana columbia
cgcttttcagtttcatcacgatgacggatccggatcgggtctcagaccgcttccggattctgtatctgacatcttgatgggatctggattcgagcggttacttgaacagctaagccaaatcgaagcgtcggccactcgaattggtacatctggaaaccctccggcgtctaaatcggcgattgagtctttacctagagtcgaaatctcggattgccacataggctcggaggccaattgcgctgtttgcacggagattttcgagacggagacggaggcgcgtgacgatgcgtgtaaacaccttttccacgacgattgcatcgtaccgtggctatcgattcgaaactcttgtcccgtgtgcagattcgagcctacttcagagcctaatcgacggagcaacaacaacgaggaggataacgccgtgcggatgacgatttggagacttcccggtggtggattcgccgtacggaggtttaacgcagcaatgagagacggagagagagttttgccagtggtgttaaagaaatggatggtggtgggattggta

SEQ ID NO: 21892 - DNA, 833 bp, Arabidopsis thaliana
gattcatcgtctccattagaaatataacatcaggagagagtttcttgagtatctctctcactctgcgaactgtcttggggttcccaatcccttgacagttccagctcatggttacgtgagccggcttcttggggagtgaaaatccacatgattctgtatcgaaggaccacccatttgtgcttcatcccgatgtggactcatgggatcctctgaaacatgatcctgatccaagattagtcttcttctggggaacgggatggtttgctggttgagaagtttcagcttctttgacttcactcctgccaggggctttggactagcacgcttgcctggaggtcttcctaccttccttttaggagactgcttggacctgactttcctcttgggtttaggctgattgactggacctagacgttgagataccggaactctctccacgctggatgaagtcacctcctcagggatttggactgaggtagaagaaggagctggttgagctgctctaaccatttgctcagcagttgcttcaagctctcctagagcctctgcctgtcaaactctttcgcgtctggccgcactctctgtaggatccgggcagctaacatactgggtcatgacccctcggagctcatccatagcagcattcagtgcatcctttcctggcgggggcctgtctttgtctctgtgacttgaagctaggccagagccttgcacttcctggcttcgacttgcgttatcctctagaacaggagagtattttctttgaacacctttacccttatcaataaggggtcgatagacagaagggcctgggtgggagtcctcggggatcc

SEQ ID NO: 21893 - DNA, 639 bp, Arabidopsis thaliana
gttcttcatatgggaccgacgattatatacaatgtgcctggtcgaacagggcaagatataccgcctcgtgccatcttcaaactttctcagaatccgaatttagctggtgtgaaggaatgtgttgggaacaagcgagtcgaagagtacactgagaatggggttgttgtgtggagtgggaatgatgatgagtgtcatgattccagatgggattatggagcaacaggagttatatcagttactagtaatttagttccgggtttgatgaggaagttgatgtttgaaggtaggaattcatctttgaactcaaagcttctacctttgatggcttggctgttccacgagccaaacccgattggaatcaacactgctttggctcagcttggagtttcgaggccggtttttaggttaccatatgtaccattgccactgtctaagaggcttgagtttgtgaaactggtgaaggagattggacgagagcattttgtgggtgagaaagatgttcaggctcttgatgatgatgattttatccttatcggtcgatattagcatactttttttttgttaatttttggttctttttgtttggtgttaatgaagaagagatggttctatcatttggttttatgtagctgatgaatg

SEQ ID NO: 21894 - DNA, 484 bp, Arabidopsis thaliana
  unsure (1)..(484): unsure at all n locations
nnnnnnnnnnnnnnnnnnnnnnnctaaagtgtgcgctttgccgtctcgcccagtaaataatgatgggacttaaccaatgcatccggcacatgcccgccgccagttcaaaggggcgcacgcgtcgctcatcgggtagcgattcagcgcgtcataacggtaagcactttccggctcgccgtggggtaatcacgctacgccagtactttcccgccagttggtttcctcccggcccgctggcaaaaccacgacttaatacccggtccagccactctttcagtagcgccgggcagctataggtataaagaggatgctgaaagacaatcacctcgtgctcgcgcagtaatgcctgctcacgggggatatcaataaaaaaatcgggatagtgcgcgtgaaggtcgtgcacggtaacattgctgagcgtgcgtggccggtttaagcagtacccggtttgccaccgagtcctgagattccggatgggcataca

SEQ ID NO: 21895 - DNA, 694 bp, Arabidopsis thaliana
gtcataaaaatactttcattcaacttagccgtctccttgaccatccagatacacatacgaccctatctttttgatttttacaatttagtcccttaattcttcatatattataatgtacacagagcagccacaatatatccaattttttagtcgcaccaataaatttcatatactattacgatggcatataaatatttttatttgcaatttatccccctgatttaactttattggtaatttaaaggaggcttttgaacaggcacgtgcgttaaaataatatccactagatttctctaatagagtcacattacttccacgtataagttgtcatagctatcaactcatgtacatgcaaaaacaaaaaccttaaaagctttcatggaacgtatagagtcttataacacgaatgagatgaaatacagaggcgtacgaaagcgtccatggggaaaatatgcggcggagattcgcgactcagctagacacggtgctcgtgtttggcttgggacgtttaacacagcggaagacgcggctcgggcttatgatagagcagctttcggcatgagaggccaaagggcgattctcaattttcctcacgagtatcaaatgatgaaggacggtcgaaatggcagccacgagaatgcagtggcttcatcgtcgtcgggatatagaggaggaggtggtggtgatgatggga

SEQ ID NO: 21896 - DNA, 549 bp, Arabidopsis thaliana
  unsure (1)..(549): unsure at all n locations
nnnnnnnnnnnnnnnnnnnnnnctaaagatcaataattttgcgcaaatggttgatgtcctggcaggcaagcaagaagagagcggcgtgaagctgctgtggggaacggccaactgctttacaaaccctcgctacggcgcgggtgcggcgacgaacccagatcctgaagtcttcagctgggcggcaaccaagttgttacagcgatggaagcaacccataaattgggcggtgaaaactatgtcctgtggggcggtcgtgaaggttacgaaacgctgttaaataccgacttgcgtcaggagcgtgaacaactgggccgctttatgcagatggtggttgagcataaacataaaatcggtttccagggcacgttgcttatcgaaccgaaaccgcaagaaccgaccaaacatcaatatgattacgatgccgcgacggtctatggcttcctgaaacagtttggtctggaaaaagagattaaactgaacattgaagctaacacgcgacgctggcaggtcactctttccatcatgaaatagccacgccattgcgcttgg

SEQ ID NO: 21897 - DNA, 554 bp, Arabidopsis thaliana
  unsure (1)..(554): unsure at all n locations
nnnnnnnnnnnnnnnnnnnnctaaagcggcttctctctgcgcttgcaanccccgctcaattcctctgtggtttcattaagtttacggacaagaaattcatattcttctttatcaataagccctttatcgaaaaatttctttaattcagaatagcgtcgaccgacagtatcaattgcggcaccaactggatcaatagctgcttttaattttgcgagcgcgttcttctcatcttctgttgccttagtcactttccctgcgctatttgcagcagtttccccagcctgcgtcattttgactaatgaggaggtcagattgtcagcattatttttcgctccagtgctatcaataattattgcgagacgcgaggtttgctctgccatttattaaaactcctgacaacaaaaaacccaccgcgaagtgggtttcaggcgacataatagtagatatagcgattacgaggccacgcaatgcttttctccaggagcatcatcgatttaattaaagacaccatcacatctctgtaacagagtgtacgtaattaacaactacacaca

SEQ ID NO: 21898 - DNA, 350 bp, Arabidopsis thaliana
tcttcttttaggctttatgccgatggttatccatctgaatttgcatcttatttccattattgccgttctctgagatttgacgacaagccagactatgcctacctgaaacggcttttccgcgacctgtttattcgtgaaggtttggtcccctcaatcacttatgttaattccagtcttgtgaagcaaatataacttggaccagttaatcaacatgttaatttgagtttgcgtcatctgcttatattaggcttccagtttgattatgtatttgattggacgatcttgaagtatcagcaatcacagatttctactcctcctcctcgtcatcatgtaagaatcagtttttcctt

SEQ ID NO: 21899 - DNA, 514 bp, Arabidopsis thaliana
cgccagtgtgctctaaagcattgcatttttgccccgatttatccatgatcgaattgtgacatttgtcatacaacgaataggttttgtacttactatggaatggattgccgatccgtctatctgggccgggttaatcacgctgattgtgatcgaactggtcctcggcattgataacctggtctttattgccatcctcgccgaaaaactaccgccgaagcagcgtgaccgcgcacgggttaccgggctgctgctggcaatgttaatgcgcctgttactgctggcgtcaatctcctggctggtcaccctgactcaaccgctgttcagcttccgctcgtttacctttagcgcccgcgacgttaatcatggctgttatggtggtttcttccgtgttgttcaaagccacgatggagctgaacgaacggctggaagggaaagacagcaataatcccacacaacgcaaaggtgcgaagttctggggcgtggtgagcaaaattgtggtactggacgccatttt

SEQ ID NO: 21900 - DNA, 476 bp, Arabidopsis thaliana columbia
taaaggtgtcctgaagcatatgaaagtcgaaagtttgactatattacatgtcatgagtcatttgcaggtttagtttatatttattcctaacatatgtttatcctaatcctcatagtctgtttgtaaaagtctacaatttttcttattcatattgcagaaatatagaccagctaaatatataccagtaccatcagaaggtacgaacagactcttttatgtagagtcttcatgtgcatttactagtcttaagatgtgtatatattgtagtagcttacatacacaaattcgatcagctcttgttgatctagccaatgctactctcatcttgatatgtaagtgaaaggctctcgacattgtttgcttgctagacactatgatccgattttctagactaagaaccctcttcccggactcatttagcctttgttataatcgtgagcagttctatagatgtgtaacttcctacagacgatttt

SEQ ID NO: 21901 - DNA, 595 bp, Arabidopsis thaliana
actccaatactcgaacctatgatttttttacttttgattctcttgtcctctgcaataaagacgaggcatatattttcttcaatcataataataactccaaagtatactttgttgtacttacgtatttttgataaaatattattcaataacataaacaaaataattaatatattttttggtattggaactagcttaagccatattaatcttttgatatataagttattctagtattttgtatatcttcaagtaataaactaaaaaaattgaccaaacatcaacaagatactttgtggaccatatactctttatatggtcggacctagtggatcaagccgttatgttacggaccttggcttagaacctattagtcaactaaacaataaaataaaaaccaaaagagcaaagaaaaactaacctagatcaccagcagctactctaacgtaaagatcctgacctcccttagcataatttcggatatcgaacagccctccggaccaaatcacacaacctgaaccgccattacgaatatccgtattagcaaacgccgtacaattacaacctttaggcactctcttcacattctttcacccaa

SEQ ID NO: 21902 - DNA, 582 bp, Arabidopsis thaliana
tagatcgttattagatgaaacagaaaaaactattaacacatgaatatatagctttctcactgataataaaatgattgagctaattatcataaatataattacatagtatactattgagttagcaactatattgtatgcatatttgagctataaactattgaaaaaatgaaatagttgtacatatatgtattaatgtatatcaacgacccgaatagtatgaaagtattgatattcctatcaaatcattgtatgtgatctagtttcgcaacaattcttaagtaatggtttgatactaatttactggaatatttatggtggtttgggaatgattagggtttatatgaaggactgaaagcttacaggacagaagatggtcggattctgctattccgaccagaccaaaacggtctccgccttcaagccggagctgacagactctatatgccttatccttcggtcgatcaattcgtctccgccatcaaacaagttgctcttgccacaagaaatgggtatatatattattgattgttgttgaattcgcaagataataaacttataaatgaagattaacaatggggtttc

SEQ ID NO: 21903 - DNA, 633 bp, Arabidopsis thaliana
  unsure (1)..(633): unsure at all n locations
gataaccccctggaccagcatgagtatgagttccactaattgcaacattttcctccgtataaagctcaccgtacctctgtttcaatctttcaatcactttgatggtcacaagctgtgaggccataccagcatcaagattaacaaaagcaatccttttcttgtatggctcagccacgatgaacgcacgagctctgagcctgaagtgaacaccagatgctacttgttccatgttagcataacccatcatgttaacatcagctgcaggtcctgtgatgtcatagcttccaagacccatcaaataatcggaatctgagaatatacaagtgagcctcaacagaaatagcaagaacaatgtgcagtgcatagacatagaccacctcgtcatcttcacactcaatatggagtaatcaactctttctcatttctagtccttcctagagaataatacaaacgtaagcaacataaacaaacacacatatttcatgaatctaaaattattaaacccaaaatattatccacctgaagaagaagtaacgcaatccttaatgattttagctgatgacacactaaccatttgctggagctgatagaactaattgatgtgacgatgtgaacaaacaanagagatgagag

SEQ ID NO: 21904 - DNA, 499 bp, Arabidopsis thaliana
cacatggaggtgaaaaaccgtcaaataattcttactaatcaataaagccaatacacgaagaaggttaatcaagaacaacgaaaaagtcgccggattaagcaaaatcaagaaacttacagtcatccatctacagcgcagggcaacatctcgaacagtcttatctttcattttcatagcaatcttcgcatatcgaaaaaccgacggttctgtcgcgtacctatataaagattaattactaaaagagtgataggatttaacaaggctcctacaaaaatttacaaccagtcattacagataagtagacaactcatcctctaattaaatcctaaaattttcacattgctctaacactaatgagcctatcataaatatgataccacactagctagctagtcatttttctagtattttatttattaccatacttgaaaccacatccaaaactcacaatcagctaatcaaataccactgtttctcttctcagatataattcaaaaaa

SEQ ID NO: 21905 - DNA, 590 bp, Arabidopsis thaliana columbia
tatgaggtttcttctgctggtatttccaatgaccacattggaatgaaaatatttatcacagaaggtgttgttccaactttgtgggatcaacttagcctgaaaggaaatcaggataaagttgttgaagggtatgttactggcgctttgaggaatctttgtggcgttgatgatggttattggagactgacactagagggtagtggtgtagacatagttgtgtctcttttgtcatctgataaccctaattctcaagcaaatgctgcttctctgctggctcgtctagttctgtccttttgtgatagcatccagaaaatattaaattctggagttgtcaagtctctgatacagcttttggaacagaaaaatgatatcaatgttcgtgctagtgcagcagatgctttggaagctctttcagcaaattccgatgaggctaagaaatgtgtcaaagatgcaggaggtgttcatgctctcattgaagccattgttgctccatcgaaagagtgtatgcagggaaaccatggacaatctctacaagaacatgcaactggagctttacaaatgtgtttggtgggatgcgcatttgattatat

SEQ ID NO: 21906 - DNA, 705 bp, Arabidopsis thaliana
tttctctttgcagaaagccaacacttcttctgtctctctaatgctccctataaagctccctgatatcactttcctccctgtcaaaatatagaaaaaaacatcaggtttgctattgaattttgttgttattagctagatatgatttaaacgcaagaaatagtactgaccaagaatgacgagaggggtcacgaactgaagaggagtgttgataacacccatgagaatcaatttcccgtcgagtttaagacaagccaagtaagggtcgagagggtgaaacaccggtacggtgtcaatgatgtagtcaagggaatctgcgagtctttgcatctctgctggatcagagctcaccacatagtcgtcagctcctaaatgttcgatagcttcttcttttttcttatctgatgagcttatcacagtcacatggtgtcccattgctttagctatcttcacacccatgtgccctactccacctaaccctagaatccctcctttaagcccactcgccattagaccgaagtggctcaacggactataaaccgttactcccgcgcagagtagcggtgcagcctgctccaccgccattccttctggaatcttcaccacaaaccttttgaaacaaaaataagttacttgtggatgaagaaacaaatgccatgtgtgtttcttgtgaaacaaggtgtgtgcgtgtgctacttttgattgacg

SEQ ID NO: 21907 - DNA, 540 bp, Arabidopsis thaliana columbia
  unsure (1)..(540): unsure at all n locations
catgtttcaacacttggtcctctcctaacttctacacaagggtaagcaacgtagatggttctgtttacatagaccatagttgattctctactctggctctaattcatgtggattgtactattgtgtgaataaaagcaggtggggataacaggagtaagaggtgataaggtaatgaagaaaacaaagaaagaacaaaagacatgggagccattctggaacgaggagtttgagtttcagctaacagtaccggagctggcgttgctaagaatagaagttcacgactacaacatgccagagaaggacgatttctcgggtcagacatgtttgcctgtgtcagagctgagacaaggcatacgttctgttcctttgtatgatcgcaaaggcgagagactagtttcagttacacttctcatgcggtttcactttctttaaacacagagtttccttaaaacagagtttctttcttctttataataataataatacttcacagagagtggaactttttggcatatgaanaacggactaaatcaaaatttg

SEQ ID NO: 21908 - DNA, 537 bp, Arabidopsis thaliana columbia
tctgaccttgaacaggctcaataccatctgcatacgttagctgccacattcttgttgtgtaccattcactaacataatcttcaaccttctgcttctttgctatgatcactgaagcagcatgaacaaaaggaatatcagtcatctgccacttaatgcagccgcatgtaagcttgtccatatcaacagaatatttttcatcatgcaactctacctcatgtttattgtgcctagccattcttcttacgcaaaactgtgacccttctatcattttctctatcttcatatgagctctcttagtgaatctggtccttaatctaccagcaattatatgtctcttcccattcctaaccatacactgctgcctaatctcttcaagcatttccaataagggtttctcctagcttgccgtatggttctattaaaagactcactgaggttgttcaagttatcattgcaacatgtacctactctaaagaaagctctagaccatgtcatcggattggtgcttaatagagaagtataggcaccgggattata

SEQ ID NO: 21909 - DNA, 496 bp, Arabidopsis thaliana columbia
atttgactgagatccagcctttgttgcatccatggaaacaaaccaacagatggataatttagaggaagcaaaccttgctgctctccacctccccctcttagccatgttagaccacttcccaaatcaccccttccatctgtaacatcataatgttttgagtaaatagctatggagagtacctacacacttctttgtaaataaattataacagtaagaccctcttcagagctctactcaatcgaacatttgttatttatccgaagtagcaactaagttacaatagcagaaacactgagtgacagtaagagacttcacgaacgtactatactagttaataacagttaggagaagagccaaaaggtggataccaggcaaagatgatgtgccagcatgccatggacgttttagtctgagaggaaaaagagatggatacataggaaaggtagtcagaggctcaatctcccataaagagacccttggctgtctctcccctgca

SEQ ID NO: 21910 - DNA, 580 bp, Arabidopsis thaliana columbia
gtgtcttctgtggaagcagccaaggcaagaagagcagttaccaagatgctgctgttgacctcggcaacgaactggtaacacgttcatgactttctacgtattatcttgtctttcattctgctggtggtttttgagataagatgatgttgtgcttctctgtttcattatggtctgcaaaagtgtaattttcttaaaggtttttgataaacatgttcacatgatgtgtagcttttgcaaatgcagagcattttttctttcttctttgaaacgtgccaagtgatatgggtttgaatgtgtgcttcatgtagaactcaaagcttcaactgtttttttaccaaatctaggcttcatgtgtaactctgttttatcttgattttgttatgcaggtttcaaggaatattgatctagtctatggaggtgggagcataggattgatgggtttggtttcacaagctgttcatgatggtggtcgtcatgttattgggtaactttctctctttaatatcttctcttaaaacaactttgtgaatcttttttaagattatacagaagaaaactgtattttgagtttctgatggac

SEQ ID NO: 21911 - DNA, 521 bp, Arabidopsis thaliana columbia
gtaaaacttttcaatgaccaaacaataatacaaacattacatggtaactaagaggtctaatgagaagaacactaacgatccaatgcgctgattgcatccaaagcatctctttcgtcatcgaactcgaggaatgcgtaccacggaggtctacgagctacccagacactgcgatttttaagattcagagtcataattcgtatggcttgaaacaaaattgagtacagagataggacttacttgcgaagaacaccgaaggccttgaattcgtcttcgagttctctttcggtgacgcgtgggtccaaattcccgacataaaccctcgtcatgttgcaaagatcagttgaatctgaacgaaagagaatcgaattttgtgaagaaatatggatatcgataatagttacagcgagtagttaacaaggtacctgagattcttggtcctgagcagcgacggagatgttttagggttcagactcagactacggcgaggaaagagagtaccaagttatttcattattatatga

SEQ ID NO: 21912 - DNA, 428 bp, Arabidopsis thaliana columbia
gagaatgtattggccctttttttgggtttaacaggtgagctcaattggagtgactggtgcacgatcatctgtaagcggaaaggttcagtcgctcttgaaggatatcaaagaggtctaataacagttttttttttaaagattgtttctcaaatatcttgaaatgatgtagaaatgctcaagttgtttagtcatttgtaattcaatgcaggcgacagacaagccggtggcagtcggttttggaatatcaaagccggagcatgtgaaacaggtcctaaaccttacaaagcttctcttatgttgtcttcatagttacttctttgctgactagttttgttgtgtcaacagatagctggatggggagctgatggagtgatcgtaggcagtgcaatggtaaagctattgggtgatgcaaagtcgccaactgaagg

SEQ ID NO: 21913 - DNA, 576 bp, Arabidopsis thaliana columbia
atcttgattgtttcgtggttctaagaatttttgcttctaccatacttttatttcttattgaccaagcaagaccacactagaatctgattcattctaacaatatcgttggaatttggaaaccgttcatcgaaattgaattgaaaaatgataaagccattagatttatgcgaatattatcacgtgtcttacggaaatctatactttatttccgattttcagttatttttagattttagcgagatattgtttgatatgatttgcaggtccttaagggttttaaggaaaaaggaaacttaaaagataaataaggaagtaaaaaaaaaaggaaaaagagagtccaatttcaatccaaaaaaaaggattaaatgttttggttatatataatagacacagtagacacctcaatttcacaattcacaccacacacgcaaacaaatcacagctctctgttttatttctttctgaaagtaaaactaaccatggctgatcacaacaacactcctccctttgacctaacgaaactcgaccattacatcaaataccaccacgagaagaagctgaagatttttttgtcat

SEQ ID NO: 21914 - DNA, 610 bp, Arabidopsis thaliana columbia
  unsure (1)..(610): unsure at all n locations
ttaatattatctcatcgattatataatattcgaaacatccgctagtagcttcatttgaccgtcgctcatcacctcacgctgcattcacatacaaattaacataacaacgttaatataagtatccaatatttaacaaaataaactaaaaaatttataacatatacttataagaatgaaaagatcacatacgtgttgcagttggagctggcgctgattttgtaaggaatattgactttgcatgcgctaggaagtccagctgcacgggcagtgttgagaccgggaccaacggctttagcggcagattgaaggcaacggcaagcttgctgacggtctggggttgtactggccatgtttttaaggttagtaacgccgttgcagcacccttgggtaagtggagcacctcgggtcaagtaggcaatgcaccctgccaggttgccgttgacggtgccacaactcataagcgcgttcgctgtgattggaccggcacaatcatgcaagccaagaccatgcatgccaacttcatcactccagccatattgatctcttagttagtgtttacgttggtttcaagaggagatgtgatggatgatgnagagtgttaggggagtga

SEQ ID NO: 21915 - DNA, 974 bp, Arabidopsis thaliana
ggtatgcattacacttatcttgttctatagttcaatttttcagatttgacatagttgatgggcatgtagaagcttagtggaaaatttataaggctgaatggttaaagacagtttcagtacggttctgaagagtactattgtctattgatttatatgttaaacgagttattttctgcagcaatgcaaattttcagctgccagggtatttagcttctcttacttttggagatgatgaagaagaggatcttccaagcacatcacaggaagttaaaaacacacatatggaagttaaaatcacacacatggaagagccagtccttgctttaggcaagttagaggcacatgatagttcaagtgataaacctcactgtgtagtggatgttaatggtgggcttgaaatggaagatgcgtcttgtcagctgaaagatgatgtctgtgggattgaagcgaaagaggactcaccggctacaacctgtgcaactgagcttccttcttttccagcgggttctcctcctctacctcacgaatcgcctccatcttttcctcctcatcccccttcttcccccccacccccatcatctccaccgcaactggcaccagcaccacctccctctgatcattgtttacctccaccaacagctccaggggcacctgcacaatctatcgctctaccaccatcatcaataactcgaccgtccatgcctagccatccttcattaccacttcaaccaggattcgctcccccagcatatccactattgcaacatgaataccagatatctatgcagcgggatcattctagcattgccactgtaagcccattgatttctcttatttcgtgatttagttatcttgtaatttctcaagctacattttccagtacttttgcttatgcagagtaatcaaattgccccagtgcccgtaaacgctgcacatggaaggcatgctgatgggggtgtaaatctgaatattta

SEQ ID NO: 21916 - DNA, 534 bp, Arabidopsis thaliana columbia
caatgccgcatagatcatgtttcataagtttaagtattgcacctataaaactgaggaaatagagaagtaagaataccaggtcaaagggtggtgaaggcttgccacggaagaagtttgataaagtccaagtcgcatttctaagtatcgacaatgtagcatggttattcagctgatgcaacagtggaataaatgccccagagttaagaacaaagtcacggcactgtattgaatcaccagcaacattacccagtccccatatagcctgcaaattaagtgtaacatcaaactcttcaaaatttgaactcacatatttaaccattcatactcagaagaagcactatacctgctcacggacatcatcatcaggggaagcaagaagctgaacaaagagtggcacaacaccgtgatcaatcactaccttggtatgctcagatgcgccagaagcaatgtttgttaaagccaagcagcctcaaactataaaaaagatcaaagaattcagaaccaaagattacactaatcatcaaagatgggaac

SEQ ID NO: 21917 - DNA, 1648 bp, Arabidopsis thaliana
tcccgacaatttagtagttggaaatttctcgaccgtgtgatataatctataatataaaatatcataattattaaacaatgataaaatttgtgagcgacattggtatcaatttcaaatccaattattatgttgacacaagactagtgatttatagtataaccaatttaatgtctaacgtaaaaacaattactattaattgattttctatatctgatcatatgttcaacaaaacacatgctaatctacccaccattggcgaataaatttattgcagaatataacaggagaaaaatgccaagaaaaaaaaatccttataaaaacgcacaagaaaaaagtaaaagagctattctgtaaaataaaaatgaaaaaagtattgaatcctacattaatagatacaggatatgatgttctgtttctcaacggctacatctgtctgtgatccttttttaatccaacgatccagatctctcctcatcgcctatataaaactcacttctcttacatcaaacaaacaacacgcttggttaaactccatcagtactttaaccatcacttcaaagttcaaactcttttttttttttttgtttgatccaaattttaacaaaattatggatcgcaatttcctcctaacagttacattgatctgcattgtcgtcgccggtgtcggtggccaatctcctatctcttctccgaccaaatctcccaccactccttctgctccaactacttcccctactaaatcccccgccgttacttctcccactacggctccggcgaaaactccaactgcttcggcttcttcacctgttgagtcaccaaaatctccggctcctgttagcgagtcgtctccaccaccgacacctgttccagagagctctctccaggttcctgcaccaatggtttcttctccagtgagctctccaccggttccagcaccagtagctgattctcctccagctccggtagccgctccggttgctgatgtaccggctcctgctccaagcaagcataagaagactacaaagaaatcgaaaaagcatcaagctgcacctgctccggctccggaacttctcggtccacctgcaccaccgactgaatctcccggacctaactccgacgctttttctcccggtccttccgccgacgatcaggtacattagcttatatcaacaatgttgatatttatctaccgtcacaagttcgagtatcaatgttaaaaataaccaatgagacatttcaaaacagtgaacatagattttcaatttttgttatattgatttagtaattacatattcgattaactaaaatgaaaatatggaattgaatgcagagcggagcagcgagcacaagggtgttgaggaatgtagcggtgggagcggttgcaaccgcatgggccgttctcgttatggcattctaaattatttatcatttcacctctgatattttttagtttttatatttttgaccctaccattgtctctttctttacgaatttggtaatgagtattatttaattgattatacagcttgtcgtctgttactttattcatatggaaataataagaattcatatctgtcagtgacgaacatagtgtgttacacatcgactgttctgatcttttgcatgcaacagtcccttagtgacggg

SEQ ID NO: 21918 - DNA, 598 bp, Arabidopsis thaliana columbia
gaagtcttataacctgtaataaaagcaaaagtgtgctctttagttacctgaagaaagaaagtaattttcaaaaaaatcaaaaggcttacaatctggttaatgaattcagatgagcatccgcgaaagagaggaactttctcaatatacggcaagtataaagtttgcgcaatctgcagtaacaacataagtttacatttgttcatcatctgaatctgaacaagcatctctgaagcactcatcataccttagcacggatagagacaggaatgtcttgaagaacagctgcttcagtgtagctgctttcgtactgcaaccgcaaatgtccggtaatctgaccacggatgttcctaccgagtttgtttcggttcatataccgcatgatatcagccatcttatcccggaatctctctgttttcgaaccttttacaatcaaagctgtcatgttaccaatcaagtaagctcctagaatcatatcgaatgaaatgtagaccatcgcgaatatcatttcccgcatattaaccgcgtgtatatcccataacctgcattataagaaacataccaagttaaggaatgaaagcaaacgatatattcacaagtt

SEQ ID NO: 21919 - DNA, 621 bp, Arabidopsis thaliana columbia
  unsure (1)..(621): unsure at all n locations
aattcaacaaaacaaaacaaaaagttatttaaaacataatagtgtgaaagaaaagtaacaaaactttacaagtcaacccatcatccgttgacctgtcggaggagacattactggctgctgtgcttgcacattcccagcccaccctattgcatcaacataattcatagttggtgatattcaatacaagcattggttatataacaattatcaaacagataagcaaaggaatttaattaatgagagaatggattcataataataaaattaccaatattggggtcaaaaccacggtgtttgagctcacgatactcttgacaaagagcgcaatgctcacagaataagtgagtgatccaatcgggagccggagcatccggtaacccgaacttctgtcgtatcctggccctgaacatgtatgaatacacaaaacttgccccggtaaaaaatagtgctccgtacaacaacccnagtgtcgcacaagctgcgtgatagaaatatgtttacacacatgagacattacaatctatgagtgtttttcttaataaaggtttgtgtatgaatgaatgacttacggtcgcgccttcgtcaacgatctccgcaatctgtccgaacgtgacgcatgga

SEQ ID NO: 21920 - DNA, 602 bp, Arabidopsis thaliana
cctcctctgtatttccatttagtaagtactatatagacctttgattatatgtttctttattcttaatgatcagtctacattatgcgaatgtgacgataggacaccggctcaatggttcttggtggcattagacacaggcagtgatttgttttggttaccttgcaattgcaattccacttgtgtacggagtatggagactgaccaaggcgaggtaattttatacaatcttggaatgttatttgttatgacatcaaaacttgatcatcttttaagacacacatgtatacgtagagaataaaactcaacatctacaaccccagcaaatcaaaatcaagctcaaaggttacgtgcaatagcacactctgtgcattaagaaacagatgcatttctccggtcagcgattgtccttacagaatccgatatctctctccgggaagcaaaagtacaggtgtgttggtggaggatgtgatccacatgagcactgaagaaggagaagctagagatgctcggatcacattcgggtttgtaattctttctaaaattggcaatgcactgattaatatgtctttcatatagtattttaggtctcttcttacttcata

SEQ ID NO: 21921 - DNA, 446 bp, Arabidopsis thaliana
cattgatacactcccaatctgccacatcattccttgccctttctctcacatttaatggcctcagacgaacagaaacaaaaatcttctcttccctaccactcgatccttgcatctgatcctctcctatacccatcttcacccgtcacctcccttcccgcatcctaccccaaaagaaaccaggtcaagaacaaagcaatgtcatacatatagagagagcgaccaggaattatgaggccaattcattcactaaggttcttcggactacttatcaactggtcaatatccatgtctttggcaaaagaacattgtccctatccacgtgttttatatccaaaaaatctcagcaggaaatggccaaggaatccgtaacaagggttttccccaccatggtttgggcttaaggaccccaggttctattataatatatggagaggattttgtgtgtt

SEQ ID NO: 21922 - DNA, 493 bp, Arabidopsis thaliana
gaccaatggttggcgtacatttgtattgatagagacttattaaaaccccaccttggtaagctgttgggtaatggtggttccactccaatatggagagagccttggttgtccacaaaaacaccactttcaccaacgggacctgccacagaagctagtcaacttcttcgagtctcacacttattcacccagaaaccatggaatggaataaggagatgattcttcaaattctacccgaatatgaaagagacattcttctgttaagaccaagtaaaaacggaggactcgatcggtgggcatgacttcctacaccgaatggagtctactcaataaatcaagctactatgaagctctcaatattgaggaacagatcaccaccaattccggtaaccctgaaacctatgattagaaggcaaggctatggaattctaagtgtcacctaagatcaaactgtttctatggaaagcaatgcaaaatgtcttacctgttggagaga

SEQ ID NO: 21923 - DNA, 548 bp, Arabidopsis thaliana
ggtgcaaatatgaaacttacacatgttttatttgtacctgatctctcctgcacactcatctctgtggctcgtcttctgcgtgagttgcattgcttcgcaatattcactgataaagtttgcgtgatacaggaccgtacttccaagatgctgattggggttgggacagagagtaatggagtctatcatttacaaagagctgaagtcgttgcaacaagtgctaatgtggtgaagtggaaaaccactaaagctttgtggcatatgcgactaggccatccatcttcgaaagttttatcttctgttttgccatctttagaggattttgatagttgtagttctgatttaaagacgatttgtgacgtttgtgttcgagccaaacaaactcgtgcaagtttttctgaaagtttcaataaagccgaagagtgtttttcttttattcactatgatgtttggggccatacagacatgcttcctcttgcggacgtcattacttctaactattgttgatgatactctagagcggtttggatacactcatgcttgcaagagtg

SEQ ID NO: 21924 - DNA, 553 bp, Arabidopsis thaliana columbia
cttatatgcttgccacaataatccttatgatgtaaagcaaatgagtcagctcgctcagagacagttagagatttatctcgctgttgtttctttgatgaggggatgtgatacttctgatgcagctcagtcagtaagactttcagtgtttcaccttcttgtctcttcgcgtctagaatgaaagatacatacatcctataaaaatgcattaaatcacataaaatcagctaatgcagttcatactaagaacaaccagatccaacattaataccaaccttactgtaatatcaaaattatttaactcataaccaagtttagataatccaaaaaagaacaatatcataccgcaagctctgaatacgcacaccaagcttttccttgcttgtaactgacttttgacttgcaacaaaattcagacattcatcgagcttaacatcttctgtcatataagtgtgcagatagctatcaagaaatgatattatctcctcactagtgatctgtactggtccagtagaactggatatcgatggaaaatacagcacaaccagtggatgct

SEQ ID NO: 21925 - DNA, 601 bp, Arabidopsis thaliana
ctcttctttcccaatcaagatcgtctatatataagaaagattgaagaagccgatatatttttaaaaccaaaaaaaaaaaaaccaaacggtcaaccaaaacttgtctgacccacaaacacttcttgattctgtcattgaaaagaaaactttttaatttttggatacatcatcctctcattggaagagagaaacaatgaagaatccgatattgaagacatggagaaaagtgaagtcttttgggcatacgagctcttcgaccacaccctcgttcacgaagagcaagtcttgccatggctcttttcgtctcgaggatgctaagagcaacgaatcaaaaggaaagccgaagaaagagtcgccgtcacatggatttttcacggtttacgttggtcccacgaaacaaagaattgttgtgaagacaaaacttctgaaccatcctttgttcaagaacttgttagaagatgctgagactgagtatggatattagacgcgatggacccattgttcttccttgtgaggttgacttcttcttcaaggctttggcggatatgaagtataatcctggtcatcatgatcatgatgatgattatgatgatgatgatgg

SEQ ID NO: 21926 - DNA, 1054 bp, Arabidopsis thaliana columbia
ttttttggtggcagatgatacttcttctggcagacccctcaacatagtcggtctaactcttcaaatggtgaagtgaacacagcagatgagagtggaacttctcagagttgtcagatgatgtcgtggttaaagataatgctgcttcaacggcaagagcttccattggcaatgagaagagtcctgatgaatcgactatcatctccaaaatgaagagtactaacatatccggacctggaacggctaaataccctcgagaaccaaggtatggacagccagaaaggcagccgcatcaacagcaaaataatgcaacttggattcaaggtggcagcaatatgggttctcatggtgtaaacgatgcagttatcggggccggacagtttcattatggacaaccttacaagttctcgggtgatggtcagcccgtacttcagtcttccggttttacaccgcctctgctttacactgctacccaaacggcttatatgacttcaccagctcatgtctataacatgcagtctcctgctgtttattctcctcagtatggttatggaccatacaccaacatgatccctcagtttatgcctggatacccttcccatggttctgttcctgttgttgtcagtccagatttcattcctcagttatctgggccaagtgcaggaagtgtggtccatggaggtgaaatgcagtatgcggagaagctctatgttccaccaggacaaccttcttttccagatcctatgtatatgcagtactgtcaacagtcatttgggcagatggaaccactggctcctaggaaccacaccaatgctcccgagtctcagaaagatgatccaaagttccttcgacaaattagagggccaagtaactctaatatggcaagaccgggaatgggtgttaattactatggaatccagccaaatatgggcattatggtgcagtatctgcctacacatctcggccctcctctttcaccaggtcatgttccttatgtcgaggcatatcctggatggcagccacaagggagcttagaaggtgcaatggccctcgattg

SEQ ID NO: 21927 - DNA, 423 bp, Arabidopsis thaliana columbia
ctgaggattaaaatcggagattgagagagcaatgagaggtgtcggaagtccgttgctgtcaatcggagatcttctcgccgatatcggtgatgaaactggccactccccgcaaaatcatccaaatcctgaagtttcatcaaaatcatactctgatgataccatctctggacccttggatctaacccgactctttcaggtcactttctgatccaaaattagccttcagtttcattgattcaatggttttaaatcttttaggtgccatgaatcgttatcattgttcatccattatagtgaattgtgcgattattcgaaatcatcgttgtgttatgcaattatatatcaatgcattgttcaaatttaatgcatcattgtgttatgagtctgaatcaaggtgtatctggatctcatgagaggaatgtt

SEQ ID NO: 21928 - DNA, 366 bp, Arabidopsis thaliana
tccctgtctgcaaatttgtgtaataagttttcaagcatcatgaagattgcctctctcatgagaaccaacatctctttgcatattatgtgcaggtcatattgctcacttatatctacatgatgagctccttccattcagagatgttatcgcaaaggttatctacgacgtaagttttttgaatgtccttgtcatgaaagcatttttgttataatagcatttcgtgtcctgacaacaaagacatctaacgttctagcgggtctgttatatatgtaggagaattatccacggatctagactattgttaataaagttgggactatcagtaatgagtttcgagttccaaagtgtgaagtgttagcatggaga

SEQ ID NO: 21929 - DNA, 431 bp, Arabidopsis thaliana
gaggatcccctacaagccatcagcaacgtgctgaagattgaaacctttagagaaggctttaggtgctccccaagatgtgctgatcatggtcttgtgccgaggttggtaccaaaaatcatacccatacaaaggactatgtcctggtttctcccacctgatacaataaccaacaatgatatatgactaatagcgacaagaaactaaaacagaaaatgctttgttttgcaataagatacctattcttgatgttaaaatcagagtcaagaagaagaaacccattccccttagcattcccctcttcatctccaagacaggacaccaagatctcgcccgtgcgaggcaatgagccgtgtgaggaaacgccaatccagtcttatcagcaatctctttaggatcaacatactgaacttagcacacgactcaaaagcatc

SEQ ID NO: 21930 - DNA, 530 bp, Arabidopsis thaliana
ctaaagtgattgatggtgtggatattgccaaaatatccgacgccgaactccgtgaggtgcgcagaaaaaagattgcgatggtcttccagtcctttgccttaatgccgcatatgaccgtgctggacaatactgcgttcggtatggaattggccggaattaatgccgaagaacgccgggaaaaagcccttgatgcactgcgtcaggtcgggctggaaaattatgcccacagctacccggatgaactctctggcgggatgcgtcaacgtgtgggattagcccgcgcgttagcgattaatccggatatattattaatggacgaagccttctcggcgctcgatccattaattcgcaccgagatgcaggatgagctggtaaaattacaggcgaaacatcagcgcaccattgtctttatttcccacgatcttgatgaagccatgcgtattggcgaccgaattgccattatgcaaaatggtgaagtggtacaggtcggcacaccggatgaaattctcaataatccggcgaatgattat

SEQ ID NO: 21931 - DNA, 218 bp, Arabidopsis thaliana columbia
gaggaactctataaatgtggccactcttttcacgtcgactgcatcgatacttggttccgttccagatccacttgcccgctttgcagagctccggttcaacccccgtttcaggtcattgaaaccggttcttcttcttcttcttcgccgttgacatttccgacggagggttgcgagagagaaccgattgacctcgccggtatctgtcgtgccattcagag

SEQ ID NO: 21932 - DNA, 504 bp, Arabidopsis thaliana
gtctgctttatttcaactatatagttgatgaatatggaacttctcaggtgaaactcagcagtgcaacaattcatctacggcctgtgagatgaaaagttctgaagtggttcaagacagctgtgaagttccacctgtggaagttgaatcagcttcagagaatcgacaaggtgcacagcattctactgaaggacactctatgtcatctgaaactgtgattgagtcatcacaggaagctcaggtcattgacggtggtgataccatatcaaatgatagattagagacagaatgcaaagggaagttaacgaaagaatctcaatctaagttagcatctgcattaggaaagagagaggatacttcagattcatcgtggaacgatgaagtgatttactcagatgtggagggtcctatggtttttcatcagaagcaactagtatgactcatcctgatgaagctagctgtatagtcagtgaggatgttccagccatacatctccagtaaagctga

SEQ ID NO: 21933 - DNA, 534 bp, Arabidopsis thaliana columbia
atcgaaaatacgaagatccgagccgacagcgacagatcagatttctgagatggatgaacggaaatcaatgcaggagcaacttcgagtttgttttggatttcaacttcttcgatgtgagattcttcctgcattgttgttgttgttgttacacagagaacaaaggttggagtttttagggtttaaagcagttcgtgaaaaaaagccgccacaaaagcacaaacaacaaaatcgattttatgtatttggattgtttggatgttagtctaatcgttttctcattagagttaagaaattgagcgtgttagtgtttgtttggtactactcgtaagactgggtttcaccatagttgggccggaagtcgaaaccttatgggcccattggactatatttcctgctttcgatttatgccaataaagattctgttttcgtatgttttaatctttataaccaagtaggaaattcgaaactcgattggttggttgacttctctctcttctctccctaatatatgtaagagtgagaggtcttatatgt

SEQ ID NO: 21934 - DNA, 583 bp, Arabidopsis thaliana
ccaaacgagtttcgagttcggattcttcatctcaacgcgggcaacggcggtggcggagagagacgcgccgtcgggatcgtcggcgagtttgaagccgtcgagacggaaggaagcgaggctgaaagtgggaagcttaggatcgaaccagaggtagaaaacagctgttccgaccaagacgcgtaatacgaacacggctagagtaatgccatgcacagcacctgactaggcagcttctgcgttttgtctttggtcggtaagaagtaggcatagggacggcttttctcgtaggttgttgttgaatgggaggtggacgaggaggaggagaggacatgtttggatctctgtaacctggtggcttttgaagaaccgggttcatctgataatctgccatcttttttctcttaattgttcacctctctgacgatctcctgatgaatagtatcaaggaagatcaaaacgaagtcttcgaaatggagagagagatgctatgatgatgatgattgcaggcaaacttggtttctaagagattttgagtttttggaagagagacacagagaagagaatgttcttttgtgttgggttg

SEQ ID NO: 21935 - DNA, 592 bp, Arabidopsis thaliana columbia
  unsure (1)..(592): unsure at all n locations
tgcaaagcancggctcaagatgatcctcttctccgacaggtgtgatgttagtgacgaagctaaaaggaaaatcgtcaacaacattatccatgcactgtcggatttcgtagagatagaatcagaggaaaaagttcagctaaatgtttccacggacggtgaccttgggaccatttactcggtcacggtgcctgttagaagggtgaaaccagagtaccaagacgtggacgaggctggaaccataaccaacgtggaatacaaagatacccgtgatggttctgtcgatgtcaggttcgatttttatgttccagagtgatgaaaaggcacagtcttagatttatttgctggatagtatcttgtctgttatgttgatgttcttcaagtttagtctggagggaacaaagacagtttcttgacactccccatgtatatatatatatgcaacttctcttttcttataagtttttttactgtgtttgaccgagctggtcggctcaacctattttagttcacattctgtgaagttaatcatattcaattgcaatactttaccacaaactatataagttaaactcaatcaaaatatggtgcaatg

SEQ ID NO: 21936 - DNA, 1283 bp, Arabidopsis thaliana
cagcctcttgcagggtatcggctttcttctcaggccacttgaaatgcttaagcacagcacgctcatcagcctgtaaggaataggcaaagaggaattcacatacaatgtaagataagtatgatgcaaaactcattttggagaaccgatcatttatatatttcataagtgatacactttcgtctcagtacaccaaaaacatggccgagtttacaaaaacttgtcacttgtgtaaaaaaatgttgaaagaggaattaggagttaccagagttgccagttctttatcaagccaatccacaaatttcatgacatcttccatatccgaaaaacaagtggtcagaactttctggataagatcattgataaactccccttttgtctctatatcagcttttatctgatgaagaaaatggagctcaacagtgtcagatgagattagctaagactcaggttaaagtaaacagactccatataagaaaatttggttacttacagcgatgagatgcgcagaacggttttgaatttctccgactatactgttgtgagcactgttaacttgagacttattcccattaacagactgagaaaggtttctactattatcttgcttattcaacaactgaaatagctgtgaaactggaggagacttctgagcacgagctgctttagcaagaggtctaggtggtggtggtggcggcggaggcggtggtgttggaggtgcaaagggtgaagaattttcatctcttttacctaaactgctagctggagacaccaaaaacttcggtaatggcggtgttggcggtaatcttgaaggagaaggtgatggtggagataatcttgatgactctactgctacctccttcttaaccttgggttgctctaatttgctagctattaacctctggatatctttgaatctgctgttttgatgttctttagctggctgattcaacaaaaacacttgagagattataaccttatcataagcctaaactatgtgcagaagcagaatcaaaagcaatcttaattccgtagtcacactaagtcaattcaacagtaagaatcttcataccttgtcgttagaagaaagagatgagatcttagcttcagctgaaacaagatcctgagaaaacttcctattatacaactcaagctctacatttgaattacgagcttcctctaactccgttttcaaattccaaacctgcaactgcaaatccttaatcaacgactcattcactaccagcttctcctccaattcctccattctcttcctcttctcatcc

SEQ ID NO: 21937 - DNA, 1476 bp, Arabidopsis thaliana
ttacttcttcggttcgggatttcagatatcagcgcttacaactcgataatcgaaatgtactctggttgtggttctgtggaagatgcattaaccgttttcaatagtatgcctgagagaaacttggagacttggtgtggtgttataaggtgttttgcaaagaatgggcaaggggaagacgccattgatacgttctctcggtttaaacaagaaggaaacaaacctgatggtgaaatgtttaaagagatcttctttgcgtgtggtgttcttggtgacatgaacgagggactgttgcactttgagtccatgtacaaagagtatggaattatcccttgtatggaacattacgtgagcctcgttaaaatgttggcggacgtggttatttagatgaagccttgagatttgttgaatcgatggaaccaaatgtagatttgtgggaaaccctgatgaatctatcacgggttcatggggatttaattcttggcgaccggtgtcaagatatggttgagcagcttgatgcaagtagactgaacaaagagtcaaaggcgggtcttgtacctgtgaaatcatcagacctagtaaaagagaaattacaaagaatggccaaagggcaaattatgggattcgatatatggcagctggagatatttctcgtccagaaaacagagagttgtatatggcattgaagagtttaaaggagcatatgatagaaattggttatgtacctctatctaaacttgcattgcacgacgtggaccaagagagcaaagacgaaaaccttttcaatcataatgagagattcgctttcatctcgacatttcttgacactcctgcgcgttcgttaatacgagtaatgaaaaatctacgtgtatgcgcagattgccataacgcattgaagttgatgtcaaagatagttgggagagagttgatttcgcgagatgcaaagaggtttcaccatatgaaagatggtgtttgctcctgtagagagtattggtaacgtctttccacacagagaggaggagcaaacacacatttaaggattacaatggaaacatggttttagtgttcatttttttttgcaggatgttttgtatttgtccactcagtgaggaagaaacattcttaaatcacaagatcataaaatttcacggttcgatatgattgaccagagtaatttcttttttctttgtcaaataacattaagctttaaaacaacaacaaaaacagtgggccactgggcctaaaagcccaatttctcactagacgcgagaaacccacagtgactgtcatcattcattgtcccgtgaatcaactcgtcgccgcaagctcacggcctccgagcactgagaagcttaacgtcgtcgatcaccggtccacataagctcgagaaatcgtcgtttctcatcgcgtaaaacgtactgtagaacataactctagtccgactcgagacagcgacgaatctcaatgacgatcgcttga

SEQ ID NO: 21938 - DNA, 714 bp, Arabidopsis thaliana
ccttaaacccgaggactcaagaagctgtccagctgaaagttggatcaagcagagagctcaaacggggattcgattatgatctgaatttcaggcagaaagagccaatagtagaccagagctttggagcattgcagggtctattaagtctaaaccagacaccacaacataaccaagaaacaagacagtttgttgtagaaggaaagcaagatgaagcgatgggaagctctctgacactctcaatggctggaggaggcatggaggaaacagagggaacaaaccagcatcagtgggttagccatgaaggtccatcatggctctattcaacaacaccaggtggaccattggctgaagcactgtgtctcggtgtctccaacaacccaagttctagtactactactagtagctgcagcagaagctcaagctaaacaaatggcgctcgagttccggtttagtgattagaaaccatcgttgttagtgttttgtttgaaaaactgagaccttttagctttctgttggtgttttacggttggattttgcagtagactgctcttatgaatggaaaattgtttgagacaacgctttactttcactgctggattagtgaaaagtcagaataatcacttttgctaaacatttgactaattatttcaagagttgccagaccgacagctcaagtattgcaacgggaagcttctgtgatttcaggatcgtgac

SEQ ID NO: 21939 - DNA, 490 bp, Arabidopsis thaliana
  unsure (1)..(490): unsure at all n locations
nnnnnnnnnnnnnnnnnnnnnnnttaaagcaacataattttcggcttcatacacagcgaacgcgcaatggcaacgcgttgctgctgaccacctgaaatctgtccgggaaacttatgcgcatgttcggcaattctcacccgctctaggtaatgcaccgccagatcttcagcctctgtcttaggcatctttggtagccaaatcggtgccagggtacagttctgtaaaacggtcagatgagggaagagattgaaatgctgaaagaccattcccacttcctgcctgacgcgctcaatattgcggatatcttcattaagttcgatgccatctaccacgatccgtccctgttgatgttcttccagatgattaatacaacgaatggttgtcgatttaccggaacctgaagggccacacagaacgatccgttctcccggttgcacggttaaatttatatttttcagaacatggaattgtccataccatttattgacgt

SEQ ID NO: 21940 - DNA, 590 bp, Arabidopsis thaliana
tttgattgatttatctattcgtcccagctgttgattattgattgattgatttgtgttttgatttgacttggtagcttgcattgatcatagaggtacaccagaacaccctgcaagaacttgcaccctcgagaaagctgaagaagccatatgcgtaagtagctattcttaatatgtgtataggatcttagagtctgttcatgaggcctgcttgttactcacacattattcttttcttactaacattccaatactttcttgacagtggggtactgcattctgtgtccgtggaggaccagaaaaagaacgtctggctatggaggtatgtccttgcatctgaaaactagatcgcttgatgtatcatggtcatgcctttgtgttgatctttctatttgtacacagtacttggaacgtagagagtgtgaatatgatctcaagacaagtgtagacttttacaaggtgagtcaggactcagccgagattattgaataagcctattattccttatgctactaaaaattgacctcaaaagtttcttccttacacaggaagatgatctctaaagccactgtaactggagtgatagtgtaagt

SEQ ID NO: 21941 - DNA, 556 bp, Arabidopsis thaliana columbia
tttttacttcttagtacaaaaaaagcgaaaagtaaaaaagttctcacatcgttaaagtttaaactttataggcacaccaaaagatgaacaaatatgaagatacataacatacaaatgaggacaacaaaatgttacaaatgaattgaatcagtaaacacacagttaagaaaaaaagaagataaaaaaaaaacatttgtaaactgtaatcattacattacaataccaactatatacagtagcattataaatcaaacgatttttaaaaaatttggcaaaaaaatgaagcagaagtttcgatttaagaaacctctcaaacaaaaacaaaaaatgaagtggtggtttacttgttagaccactggaattctatctcaaggtttctgggaccacttttgctttctggtaacaaactatattcacctgcgactgctcccagcatcaccaccctatcgatttggatcgttactttcccaaaggaactctgcagaaagaaagaggcgataagcacagtttcagttaaccggcaaatttcaaactgtaaaatcgagtgaagtttgat

SEQ ID NO: 21942 - DNA, 191 bp, Arabidopsis thaliana columbia
tggaaaattgtctgggcgaaaattagaagataaccgtgcaggtgagagagtcgcagttgacacgaggaagaaacatcccgcagattttgctctgtggaaagtacgctttttagttacgttttagccctacattgaatacttgtttactcatttaagtcttaaaagacttctgaatttttgggcaggctgca

SEQ ID NO: 21943 - DNA, 414 bp, Arabidopsis thaliana columbia
tgcaagactagaccaccaagatgctattgctcgacttaacctcctgaaactcatcaaggtaatggatcatttgattttccaagttcttactcgtcttgttctgagtgctgagtgtttggttgttggcgatcactgtaaacaggccgtttacgagaagcatccgaagcctgaacagctgatcgtagagaacgatctatcacaaaaactgcagaatctgatagaagcacgacgtgatggacaacgttcaggaggccaagttctggtgaagcaaatggcaacatctctcctcacagcacttgacatcgacagcatcttgtgagtgtacatttattcccaaattttgcaggaagaattacccagctaagtgtatatcatctgccatttatacaacagacttgtaactgtagagttgtg

SEQ ID NO: 21944 - DNA, 781 bp, Arabidopsis thaliana
ccggttgcattgtctaagccggttccagctgaagcgaaacagacaccagtggcaaagtctgcaatgttgtatgctggatctaggtaggcagggactgcgttcttgagtcccaaaccttcagaaatgaagtctggtgcaatccggccatttgaaaatctcccagtcgctttgccgtcaaagtaatcccggccatatggctggaaattgctcttcagaacagtagaaatctggttgttgttgcctgaatcaacagttgagtcaccaaatacgataagtgcgggaaattttgcacacgtttcaggtatcttcaccaagagctgagctgctagcaacaagaacgcaagaactctgtttcgctgcatgctttttacacaagttttttcaattttttgcttctgcaaaacaagaacctcacgattaattgggaagaacaattggagcaagcatttaagatggagaaagataggtatcttctatcaaacctgactaaaacagatttagctcgtgtagttaataccttggcctgttgttagatgaagcgtaacagatagtccttgagtcagctatgtctctgtttattaatggccaccgagagttagttgaggtgagtggtgagctgaaaatgattgagagtttcaataatagttgtgcagcagagagccgtatttatagctactgaaaaagagagaaagacaggatattttaaaatagaaggattcgtaccattgcaagcttcagatgtatatgtaacgcatcttcctttttaccggattcacgctca

SEQ ID NO: 21945 - DNA, 871 bp, Arabidopsis thaliana
atcaagctatggtcagaaagctctcggcatgcgagacgatgggctcagcgacagtgatatgcacagacaaaacaggtactttaacactgaacgagatgaaggttaccaagttttggcttggccaagagtcaatccatgaagactctaccaaaatgatctcaccagtcgaacgggatctgctttaccaaggcatcggtctgaacacaacgggaagtgtctgtgtgtcagactcaggatctacgcctgagtgctcaggcagtccaacagagaagagcctcttgtcgctggactgtgctaaatctgggtatggatatggagtcagtaaagcagacacatgaagttctccgcgttgaaactttcagttcagcaaagaaaagaagcggagttttggtccgaagaaaatctgacaatacagtccatgtacactggaaaggagccgctgaaatggtcctagctatgtgttctcactactacacaagcactgggtctgttgacttaatggactccaccgcaaagagcagaattcaggcaataatccaaggtatggcggccagtagcctcagatgcatagcattcgctcataaaatagcgtcaaatgactcggtattagaggaagatggcttgaccttgatgggaatagtgggtctgaaagatccttgtcgacctggtgtctcaaaagctgtggaaacttgcaaacttgcaggagtcaccattaagatgataacgggagataatgttttcactgcaaaagctatcgcttttgaatgcggaatcctcgaccacaatgacaaagatgaagaagatgctgttgtagaaggtgttcaattcagaaattatacggacgaagagagaatgcagaaagttgataaga

SEQ ID NO: 21946 - DNA, 404 bp, Arabidopsis thaliana
tcggtatcgtcgcaaattttgatctttcgggaaaaagaaagagaagagaagagaacaaatcgttgaaaaagtaagtaagctcaaggcgcgacgcggaaaaagacgaagaagaagaaagtagcaatctgtagtaatcaaagtccaattagtgaataggggttatcttgttcagaagagaccgagaagctatgagtgacgcgttgtgttcggactgtaagaggcgcacggaggtcgtgggtgaccattcgcgccggagatacagtgtggtccagagtgtggtctcgtgcttgaatctcactcgatctgatgaaacttcgtgagtggcgtactttcgctaatgagtccggtgataatgatcctgttcgtgtcggtggtccgacgaatcctcttttagcagatggtgg

SEQ ID NO: 21947 - DNA, 598 bp, Arabidopsis thaliana
atcccccaatcttgttgctagtaaaaaaaggtttaccaaaatggagaagggccgctttgggaactttctcgataatgctaaaagtaagtttgtgaactctcatcttccttgtttttttacattcatttactaatttggccatttgggacgacaggtttggtggacgctgctgtgaagtcagatatcactcccgtactcgctctattcgcctattttgctatttgccttaatggcaaattcgccaggaagaggtgataggggcagacccacagcataatactccttgtttaaagttagctaataacagtagcagtataaaatcatttagctcagctagactctctattccacaccttacgttcggagttcaatacctacttagtaccacttattttgcttatttttcttgggtcaattttatttttgtttagtgattttagcagttgcattttcctttgtattgtctttattccattttttgttttcttaaataaaactatatgattttagtcaatttatgtatctgttccagtttacttacaagagaaaatcggatttgtagcatattcttgcaaaaatccgatttacatagatttga

SEQ ID NO: 21948 - DNA, 841 bp, Arabidopsis thaliana
ggagataaagggcgaaactctttgatttttggttcctcctgtgttgtctttatatcccctgagattgtagaaaacaatcgtttcgatgttcccacatcaagagcacggaaagatcgagtcaattgagcaccaacaattgcagcttcagtagattttgacttctggaaaaatcgagacaaggatcaccaggcaaaaaggataagttaagctgctcttaaacattacaaaagcaaaaatcaaacaaaatgtagacaaagtcattttacctctctctcctctctaatggcattgttagtgcccaaaccagtaccaagaatgtcattcacaacaggttttgacctataaaagaaaacaacacgtagtcgaaatgacatccacagagtaattctaataggtataaaaagcacaagaaacaaacacaaacctacccgaaagctctggagaaacttgcatagttctgaccaatgtatgaactaccccaggaaggttgagcattaccagcaagctgcaaaacaagaacgtttcaagagcagtcaaaaccaacaatttctctacgcatatgcaataaacaaaacgaccataacctctaatgattgttaggcactcaaactacaacagtgatatgaagctaaactctcttcttcatcccaaccttttagcactatactcaactacaagctttctcaatcaatcaaaaggaaacaaagtcttaaggttaatttcgacagatatgtgtctacttacacaacaatctcatctcaaatttttgtttaaatgaaacgattaaacacataacacaccaaaatccgcaaatggatatatatatatcatttcctgaaaa

SEQ ID NO: 21949 - DNA, 700 bp, Arabidopsis thaliana
gaggtagtgacactactatccgattccgtctctctacaattgaacaagtacatgtattttttgcgatttttctatcgtaaattttgtattccttgatgcccgtaatagagtcttgtcaactatacaaaacaaaccagccacaagagtaaaagacagtaaactgagacaacaatggaagctatcaagacctcctagtcactatcataagggacaaaactaatatcgcttgagaaatcaaacccaaatgcttgcaaatgcttcttccaaagccctcctcttgcttatctctaaagaaaatcctccagctctctctgctttcatcctcctcgtcgcttcgtcttccatagcgtaatgttgacgctctgctccacctactataggtacaggttgtgggcccattcccgttggtcgtgaagcctgaccatatgtagttccagccgtgaccccatggttcgacgactacaaaatgcgtaaacaagtaaagagatttcagcttcgtcaggaaacttcatctgcttgttgatatgaaaattaaaacccaatttaccgtgtcagcatctgtctgtgggggtttggccttgcaagctgccaaggctgcagtcaattcttctgcctgttggagcaaattgtaaatacaccaaaagcaatttgcacagtgatatcatataaccaaacatgcttttaatcttctttcttttcc

SEQ ID NO: 21950 - DNA, 516 bp, Arabidopsis thaliana columbia
gtcgttatttcctccatttttctccctcttctcccaaataaaaaaagttactcagatctcacgatttgagcagaatacgcaatgaggacaccgacgacgattctccttcttgtcggagctatcctcttctccggcgccggctatgtcagatccgacgcctccgaccaccgttacaaggaaggagacaccgttcctctctacgccaacaaggtcggcccatttcacaatccaaggtaaacggaaacatctattctagatctgagcttcagatctgaggttgtttcccattcttaagcctgaggatgataaattgatcgtttattgttgaatctgttgctattgaattgagtaacgacattgatacctgagtacactgcaaaatcggtatggtaaacccaagagtgaaagaagaaactacatttggaatgtttttccgttaagggaaggaaccggcctagaattggataccaatatatgaatgaatttgggtttggtcaatgatgattgcagtgagac

SEQ ID NO: 21951 - DNA, 726 bp, Arabidopsis thaliana
cgtaagtaaaactcgggcgaggagggtacccactcagattaccagccgtcacggaaggatctgcgacgaatcctcgaacaggtcgggctgaaaaccctcgacccggtagagcaaacgggtaaagaacagctgacggatcttgaatttggcgtctgaccggaatcgaatgtgcgtagaggttattactataagcagattgttgttggaacggattagggtggcgaagggagctcatgggtctgtaagtcggcggcggtagtggcggcggacgaggaggtggctgagacggcggtggtctaacagtgtttactggtgttaccggagtttccgatgcggtggatagagacggagacaccgttagagatgcggaggagttgggatcgggaattgacattccgacggcggaaggaatttgtcgattcgattttcaaaagaatttttggggaaacagtaaaaagaaaaaaaaaagtttcaaatttggtcacggtttaataatgcgcgaaccctcttactcatagggaggttttcaggttttgggccgatctgggcctgagggtattagtgtcaatttaaacacgggagagaaagagagagtaatcgccatttttctttattgggggagtgaagaaggataggattcagatgatgaagtacagatgaatgctccataaaccctactctgtctcttttcctccagcttcgattatacattccttgtatgtgaag

SEQ ID NO: 21952 - DNA, 782 bp, Arabidopsis thaliana columbia
aatatcgattatagaaagttttatttgcttcagtttatatcacttgcctctgccattcacaagtttcttacgaaacgtattaaataatttaaaattttgtgaattaatacgaattttgtttagaagatttaagaaaacaaccaaaaataaaatatataaaaataatcatttcaatttctaaaaaaaatattaaaatgtcgcagattttattttcttacataatgctttttattcgcaatattttttcttaagcatttagtagaagaaaattcgttaaaaagagagataaaataaataaaagtaatataatcgtccttttgccataagcgttgctctcaaaaatataaagcaaactcagatctcacgattttcttcttcctctcacattaacacacatcatcatgagattaccaacgacgctgctcctctttatcggagctctcatcttctccggcgccggtactgtcagatccgatgcctccgaccaccgttacaaggacggtgactccgttcctctctacgccaacaaggtcggcccctttcacaatcccaggtaaatccaattctctaatctcagttcctttgtcggtagcttagatctgtgattctctttgatgagtgataaattgatcgttgcaaatttctgtagaagcttgcgttggtattgaatttttgtatctgaccttgaaaaaattcgattcgtgttctcaaaatgtgatagatcttcgattgcattgttatatgactgatttttacttgtgtttgatgatctgtgcagtgag

SEQ ID NO: 21953 - DNA, 1817 bp, Arabidopsis thaliana
caatatttgaatatttaaatagatgagtatgccaattattcctcctggcttcttgtggcatactgttgacggattcgttatcactttcatgccagacacgtgtgcaagcatcaaccttgtcatttcctgaagtaatagccaagcttccagagattggtgtccggggagtgtataggggttctattccagcaattcttggacaattttcaaggtcttttcagttgtttcaaatcaaagatattttcacttctacctattaaatttgatttccatgtggcttaatctctttcatcattgtagccatggcctgcggacaggaatattcgaagcaagcaaacttgtgttgatcaattttgctcccaatctcccagaaattcaggtgattatcactctctactcactgtttggctggtttcgtcaagattctaattttgtgcttcaagtatatgtattattatgtgttcttatagttcatggcatctagtaagtaaaccatatgttagaggaaaaatccaatatcaaggctatttcattgcagtacttagcttccttgatgcaatggttgacatggtagttggtagatcattgtatactactatttgttgcatctccttggttctaaagttctagtagttatgtaaagtttatggctagaataatatacacttgatgctgctggggctaaatggtctcttaattgcttggtttgataaagttgtgtatggtttctgaagtagaacccatccgcttttggttaacagttacatcgtttgcatttgtgctttctgatctgtgttttgtactcggtaaccaatgtgatcatttaatgcaggttcaatcgattgcatcattctgcagcacactattaggcacagctgtgcggattccatgtgaggtgctgaagcaacggttgcaggctggcatgtttaacaatgtaggggaagccattgtcgggacgtggaagcaagatggtccaagtggctttttccgtgggacaggcgcaactctttgccgcgaagttccactatacgttgttggcatgggactgtatgcagagtccaaaaaggtaagaaaaccgaaatgattggattatcataagggtcactactgtaattgttatattgattggggtttatgtgtgtattgtagatggtggcgcaagctctgggaagagaactggaggcatgggagacaatagcggttggggcggtgtcaggaggtattgcagcagttgtaacaaccccatttgatgtgatgaagacgagaatgatgactgcaacgccagggagaccgatctcaatgtctatggttgttgtatcgattctgcgtaatgagggaccgctaggtttgttcaaaggagcagtcccgaggttcttctgggtggctcctctaggtgctatgaactttgctgggtacgaactagccaagaaagctatgcagaagaacgaagatgcagtgctagcggatcagcttggtcagaagaagctttgctaatgggattttactttgctttgctgctacgaagttttttgggggcagcttaagccggagactcacctcttttgttaaaagctactttgcaaaattttgacaaaaaaaaaagggttcattgttttgttgtgcattgaggacagtttcatttactctttataaaaactctgcttcaaaaatgtgattttttgccctctctacaattggttgttgctttgacagttgcaattacttcaatggtatacagtagccttaaatcgccatattacgaatcttaaggtaaattcgttgcttctttttgtcaccaaacataagagacattggca

SEQ ID NO: 21954 - DNA, 694 bp, Arabidopsis thaliana
acacaaacgtaaccagagacggtttgatattgcaagtttgtgctcctaagcatcattcgacccctgacttgagcagtttcgccaatgtcttaacaaagaacctgaatgattctaagttcactggagctggagttggtattgattctgatggtatttggcttgttaccgtcctcactacaaacacaccagggggtagctattctaactcaggagcttttgcattcggagttaatggccttgtttcttcaagtttgatgtttcttcatgttttgagtcacaactcgttgtctttgttttcttaatatgacgtgattatggtgaaatttttaataaattcgtgtggcaatcaattaaagagagaataacaatatattaattggagcaaatcgcctttcttataaagtttcctcttaccaagtgtgtgtgagttgagtaaataagaaaacccttttataagcccgcaaaacccatacaaacaggaatgaaccgccaatgtccctaagaatatggactcctagcagctaaacgtgcctagtcaagccccgtggagccgcgtagcgagagagggggagataaaagagaagaggagagtgttgcatggaattacattttagttgatttttggaaggatttggtccacctgtcttcatcaagtcacatacaccaccgagttatcattttgtattcataattt

SEQ ID NO: 21955 - DNA, 454 bp, Arabidopsis thaliana
gattccccacattctcttcacacaatccattagtagctgcttcaagctctctaagagtataccatcttccccaaccaagatgcgaaacctcaggtccaacacaaccactccctgaatacgacgccgtttcactaaccgttcctctgctttcaccactcgagactcgatccgagaacacaacacggtgctcggtcttccctatatccacttgaatctccgccgcaacgggctgcgtcggatggcaatggtcttgcgcaggaggtctaacgatctcctgaatctcctttgaaatcggcggcgttgctacggctgcggatgcgaaatcggcgtgacgtggcttacggtttctccggcgagaggttaaacagagggagagaaagaagagagcgatgactataagagatcctagtaaaattccgatgacgaccaaagctttagccaaagatcgatgttg

SEQ ID NO: 21956 - DNA, 517 bp, Arabidopsis thaliana
ctagactattagaatatgttcaaatatctaaatgacggtctaaatgagtttacctgatattgccaaccatcaagtccatgatcatcagtttgttgttccatctcgaagcatttttctgatcccgaatagttgtagtataagcttgcagcagcaaaggcacggtcaagattactggatcctcgagggaacccgtcgatgatcttgcacatctgatgcaagagaaaatgacggtcgggaaaaagaaaatactcgatgacacactttaacgaatgaatatctcacctgctctacgggataaccaggcagtggcgccatgaaattagctgcagttggataattaaccatggctgtataaacaaatgctccacttaaccaatctctggctgaatattgagaatgaaggccctataaaattcaagcaaaacagtttcggttaagcttttgtttggagagcttagagaaaagaacaatggatttaaagcatattttacttgcaagttcggaactttttgctgag

SEQ ID NO: 21957 - DNA, 1443 bp, Arabidopsis thaliana
acaacatcaaatttgctggaacagagggactaacagaaacccaaaaatatttatcgtttttaattttagtgttaaaactaaaagttgtatttttttttaatattgtgttttgctagtatttacgattatattttttctttgaatactattaattttagaatttaacatgtggtatattgttttgtattaatattggttaaattcatttcaccaagattctgtttcataaaataaaacatcatttttcattttttccctttaataatatttcatcaatttaaaagtttctttttaatggttttcataatatatacattttcaagtattatagcctagacccaaaaagttgtcctttgtatattcataggttctctaaatgatataagatcttcaatattcaaagaccattcttaaattttttatattcatagattctcttattgaaataaaatattcaatattcaaagaacattacaatccttaatttgttgcatttattaccataactacgttttgcatttaataattaccaaaaatcataaaacattacaaataagtcaactcattcatgtagtcaacaatatggttattcaaatagctatagtctatagttacgtctctcaaaggattctcaaaatggcttctctaatttttgcaactctcttgtcccttttgttactctcaaacgtgaacgcctatccgaaagatggcttcaccattgatctgatccaccgcgattctcccaaatcaccgttctacaattccgccgaaacctcttcacaacgtatgagaaatgctatccgccgctccgctcgcagtacactccaattcagcaatgatgatgcttcaccaaactcaccacaatcttttatcacttccaaccgcggtgagtatctcatgaacatatccatcgggacgcccccggtcccgatactagcgattgcggatactggcagcgacttgatttggactcaatgcaatccttgcgaagattgttaccagcagacatctccactctttgatcctaaagaatcttccacatatagaaaggtttcttgctcctcaagccaatgtcgtgccctagaagatgcttcttgttccacagatgaaaacacttgttcttatacgattacatacggtgacaattcatacaccaaaggtgacgttgccgttgacaccgtgacgatgggatctagcggtcgccgcccatgtgtcactcagaaacatgatcattggttgcggacacgaaaacactggaacctttgacccggctggctcagggatcatcggactcggaggaggatctacatcgttggtctcacaactcaggaaatccatcaacggtaaattctcctattgtttagtacctttcacctctgaaaccggcctaacgagcaagatcaactttggaacaaacggcattgtctcgggcgatggagttgt

SEQ ID NO: 21958 - DNA, 448 bp, Arabidopsis thaliana
gagtatcttcgtctgcaaaccgaattaaaggagcaaatagaaaagtgcaggtctcaacaggagcttcttcagaaagaggctgaggatctgaaggcccaaagggaaagttttgagaaagaatgggaagaacttgatgagaggaaagctaagatcgggaacgaactaaagaatataactgatcagaaagaaaaactagagagacacattcacttggaagaagaaaggctgaaaaaagaaaagcaagcagcaaatgaaaacatggaaagggagctagaaactcttgaagtggcaaaagcttcatttgcagagactatggagtatgagcgttcaatgctctctaaaaaagctgagagcgaaagaagtcaactgcttcatgatattgaaatgcgtaaaaggaaactcgagtctgatatgcagactatactggaagacgaagaaagggagttgc

SEQ ID NO: 21959 - DNA, 615 bp, Arabidopsis thaliana
gatgtcgagttggatcaatttcgttaaattggcaaatgaaacagaagatttgccacttaagtggtttatggaaaggcgaaggtacattagtttggtcaagtttccaattgaagatggaacttgaccaactaatttattttccgaaaggtcgagaaaggtgagatgagaaagggttcctaatgaaaaaggaatctctccatagagattgcaataacgaagggttaggttttggagatattggagtttgaaaagaccactatttggttttaaagtgttgttaagattaacgccaagaagataaagtgaaatcacctggccatatttagcatcacacgtgacagactcccaagaacagcaatcactgctcttgttccatgacctcatattttcaagtctccggaagttcatatctgctcccggaaactcgtgtttgactccaaaagagcaccctctgatcatggcggcaacggtgggccgtaggagaagcaagagtgtgtggaaaaaacgataacaaggagatgacatcaaggtaataacacaatccattaaaggaatagattgcttggtacatcatacttcttttgttttagtttagttgtgtggtgtataggtata

SEQ ID NO: 21960 - DNA, 620 bp, Arabidopsis thaliana columbia
ttctgcaccaccttgaccttgaccttgcttcttcctcttcctctgcccatttctattctcttcacctctatcctccccgaacttcctcttccttggttcgctcaaatctttggaaattttcggatctggtttctcagttgtctctttctgtctcatcaattggcctttcttgtttgaagacggtttttcctgtgtgcgtataggtctcttcttctctgctgcattatcttttactgctatattggattttgcttcttctttactctcttcacgtggtcccttcttaaacctggctgcattctctttccttggaccagtgttatccccttccctcgtttgtcgtttgtatttattgtcaggtgcctgtgcttcgccgttcgcctgctgctgatcagattcattgtgtttctcgcgttgctgaaactgctgctgcttagcttctcgtatcgtcagcttctggacattatcaacagcaaattctatgacagggcggtgttgagaccaaatgtctctgcagagataaccagaacgattaccataacatgaaaattattattcttggacattgcatcgtaaatcggaagctaaagtgatacatgtgtcatcagattggtgagata

SEQ ID NO: 21961 - DNA, 502 bp, Arabidopsis thaliana
cgccagtgtgctctaaaggtgcgaacaacggacgcacagtattacacctgtttgccgatattcaccctgatgtggtgttgatggatatccgcatgccagagatggacggcatcaaggcactaaaggagatgcgcagcatgagacccggacacccgttattctgatgacggcctatgcggaagtggaaaccgccgtcgaagcgctacgctgcggaccttcgactatgttattaaaccgtttgatctcgatgagttgaatttaatcgttcagcgcgctttacaactccagtcaatgaaaaaagagatccgtcatctgcaccaggcactgagcaccagctggcaatgggggcacattctcaccaacagcccggcgatgatggacatctgcaaagacaccgccaaaattgccctttctcaggccagcgtcttgattagcggtgaaagcggcaccgggaaagagttgattgccagagcgattcactacaattcgcggcgggcaaagg

SEQ ID NO: 21962 - DNA, 582 bp, Arabidopsis thaliana
tgtaccatccattaattgcttccacaagacaagaggagcaattatgaaaggctctagcggagatgagagtacgataacaaagataatgtccctattaagttgatacaatgtgaaggtaggtagttttagaacaattcttatggttattcttgtatataattttcttttaaaaaaaattgtattgatttcaaatttttggtgtacagggagggtcataaatttttctcaagataatagacgattagaaaaaaactgggcatatcagaaatgataataactagtaataaatatgcaagcttgaccggacatgtaaaatatactgataccatttcgtaacccacatggccacattcaaatatgacaatgcgtgcgtgaattttaaaggtaatcacataattgcatatgacatatcgtcagctccaatgaaggaaattggaaggaacaacaacatctttctcttgtacaaagaggtcgtctgaattccgtatgattgcgtggaccaaacaaagcaagacacttgtaacgacgccaagaatcaggcattggaggctattaatgaacacaatgccaaagcgagcaaga

SEQ ID NO: 21963 - DNA, 568 bp, Arabidopsis thaliana
gctcttccaataatctcttctgcagccaacacattccgtgttcattcgccatcttactggcatctgggaaaaacatactcctctcaaacttgtgttcccactttctatacaacgtttctgcaagagtggttttaccaatcccaggcatcccaacaattccaacagttttagtttcgaggctatcaaaatctaacttttcttccatctccttaaggcgtggttctattccgtagttgggtggaggatgttcaatactaccagttgaacttacagtagagatcgtgttgagacgttcaccttccctgcttgcggggggaattgtggcttggtactgaggcgagttgatactgaggtcgtcgtcaatggaagtagatggaaaatcactggagtttggcgaaaatgtgtctacattctttgcctctgagtcttttgagatccgtttagagattctgctactctgcttgctcgtgtaattcgggcaagtacttttttgatggagtcaatgatcttgtcaaggagtccttctcgtttctgaaacacgaaaatgaggaaaaaagaaacaatgaaa

SEQ ID NO: 21964 - DNA, 540 bp, Arabidopsis thaliana
gttgcaaaagctggtcttttggaagctttttttgagggtgaagataaccattgctcaaccttggaagttatacctgatgtaggacattgcttctgcactagctgctgtcagtttcgatgtgaagaagggaaatgaaacagctaccgaaccaagaattagttttaaaagaaaatttaaagccgtaaacatgccttattcagagagcaagggcgaatggtagaagatttaacccctagtgaattttctgttaagtccatcatcttaggaatgttcttagcagctgcccgaagtctttcatttactggagagattttccaagttatctcaccaccacagtcatcttgactttgctttatcagctatgaacataacacacgcatgtcagactcatacgaccacaagggactcaatcatgtgagcagatatcatcgggtaattgcaattacatcaaccagcaattaaggagaaacacatacccattcaaactattaaattagaatataagggaatataagaaaagaaactagcattccaggagag

SEQ ID NO: 21965 - DNA, 745 bp, Arabidopsis thaliana columbia
gctaaactaatttctcctatataaaatgaagaactatctatatacaatatgtggtatcaaatacatttgaagtagtttgattaacaggagtgattcatcaggttggttccgtacctgatctgacagagcacttacataggacaactgcgaggatactgctgcatgttaatgggtacattgccgatcttcttatgagcttgtgttttcgaaagaagtgattagataaattgcacctctctcttcccttgcgccttctgttcgattcttactaacctcaggagttttaaaactgttacattgaatgtatgcatgttcattcagcttaaactaattttacagatatgtcgatcggatagctaattctaaatgggaaatcaaggagcttggaatggagcataatgggtttgtttaccggatgacccctaactgaatcatgaaatatacttaaatgtaataaactctttgaactaacaggtatgttgatttgatgctcggggaattcaaacactacaaaacaaggcttgctcatggaggcattccacaggaggtaaatttctctaagacctcatcaaccccagaagtcgaccccctatcagtagttggaacctgttgagatttttggttttgtatgtttttgtatgtcataatcaaactaaaacataattctgctgcttaatcagtcaactgacagacagcatgcaatttaatttgataaagatatcagattgagaatgttttcttatca

SEQ ID NO: 21966 - DNA, 2025 bp, Arabidopsis thaliana
cagaaattgttcatgatccatgagtagggaccaaccgaatatgcttaattattgtacctaagtaattcatcataaacttatggccttctcttgctggaaatttttctgtactctcttctacaattttaacactccatcgatccaacattgtaactgcagcatgatcaatgtcttgcaaaaacgttcttagacttccttgtccatcaactactgaaatacctcttccccactgcaaaactctagataaatcatttcctgtgcctaaaggaagaatagcgacaggtggaggggattcgaaattgcgcttctcaatagcatcaagcacccatgcaactgttccatctcctccacacaccaaaactctaaaatacttcactttgctacataggtctaaaccagcgtctggcccttgacaagagccaagttcaaagacctgtaaattcaccaaagcaattatcaatcagtgatataaattcaatatgtttaaaagcagacaaacttctaaacgtacctgtactggattcaatagcatattaagtctcctgtgaagaaaaggaccgagttgacctccgcttttggcgttaataaagactaaaagcggtcttgcatctgggggcaaatcaaccaaggaaaacttcttcataaaatttaaagcggcacttttatttcgtttgtgcccgcctataccattttgcaaccctttggcattaggcatgtccgagacttgctttaagcaatctatgctcctatctctgcgtagtttcttcactacaagcccattaactacggtttttactggatcgctgactgaatcctccagtagcttaccatttaaagattggccattcccattttttcccctgtggcgctttcttctcacatgccctcgtatagatgctaactcgtttttaatagtagtcagtactccatcgacaccatttgcttcattgagttttacatgtactggagagaggattactcttctgagagagccaagatcacaagcatcaccagattccttggacataatcatgtgacacttaacatgtatgaggcgctggcaccaaagacagtgccacataggagaagcttcaatgaaaggaataccacaaggttcatcacagtagaagcaaaaggcagtcatgtcagcattatcatccatgttaacccatcgctcagaccagtgatgtcggacatggtcagacccagcctgtgcaacacatttgcagtcttttgctgcagagcttgagcaataaaagtgagctgctacaccgcatacagcacatcggtggacgggaatactcagagatgctttattagaaacattttgacctggaacaagggagtagagacaaacacagcaagtggatggctgttgcccataaccataatcatcagtccattgatgatgagaaagtggaactctcagtcttttccataccttcttcttctctctagcagcagctttaacccaatttaaagaagtttttttctgccatttaagaaatgtgtagataacagccagaaggccaacagatccagttacaagccatccaaatataaacggactgtcagcaccagaactgatcaaccactgaataagagagaaccccacttccatcattgtaaatctaatatgtcattcctatataacttcttgcactagcataaacttatgagctttaggccacaaaagacctgccagataagtctccgtaagaagagataacctcaataatcacagattcaataatggctcaacaattccgcttcaacaaagctagtgacctagtttttccctttctatcgtgccagagatagcacaatctcataattcctaaaccaaatcctgaacaattaggagattactgtatttctaaagctagacatcaaactctgttcaattccacattggacagtctaagccacaaatcgtctaagaccacaaaactaaacgagatcaagcaattcggcgaaacaacaacacacaaatcaagcctaattgcacaaaatatgcacagaaga

SEQ ID NO: 21967 - DNA, 922 bp, Arabidopsis thaliana columbia
tttacctcttttgagagcaaagaggtttcaagttagcatattttgcagcttaagagttgcacagtagagcagtggaatcttgatgacatcaacacagatcaacggatcttcttccatgcttgcctatatgaatcagaaaaaaaagagttaaagttgataagatatttaggagtgatagaaagtataaagtgttaacctttaatttgatttctccataagagtggtaacacaaatacaaaataaggattctatgagcaacattggattgcttgatgaaattgacagcgccaaacacacacacaatctcatcaaatggaatggcaaaaacaaagcaataaaaattagaactgagagagacctgtccagatttttatggcagaatcagtttcgatagccatgaattgatcaagagaatcttcatcaaagaaaaaaagagacaaaaatcagaatccgccattttcgccgttttggtaagagaaagagagaagtatttatgttttggggaatttctgagttctgagaagaagaagctacaaaatgcaattctattataataaaaggcctcattagttattattatttatttataagcccaatcaagagtactaaacggcgtcgcagaacttcccaaataaaaaccctgagaattcgtctttctgtctctgttgttgacctgaaaacttgcggaggaggagttctgaagttgcagagagacagagacagagacagagagagaaagagagagatcgaggatgggaatattcagaagctgcttctctttcataacgggatcagtttttggggtgtacttggcacagaactacaacgttcccaatatccggaagctcaccacaccggcctcgtcgtcgctaagcacgtggaagagaactatcgcaagcccaagaaagacgatcccaatgat

SEQ ID NO: 21968 - DNA, 617 bp, Arabidopsis thaliana
  unsure (1)..(617): unsure at all n locations
ttgtttcccggtaaagattatgttcatcagcttagactcatcactgaggtaatctagtttagtatgtttcatccaaagaatcaccacttagtctctcttcacggtattaatgaatctttggaaagcagcttataggatctcctgatgactcaagcttgggattcttaagaagtgaccaatgcaagaagatacgttagacagcttccacagtaccctagacagaactttgctgctagattcccaaacatgtcggctggtgcagtcgatttgctggagaaaatgcttgtttttgatccaagcagacgcatcacaggtgagttatattttatataactgcttctctgtttcttcggctattttctgaacatgttttttgtgtgtgtagttgatgaggcgttgtgccacccatatttggcgccgctgcatgatatcaacgaagaaccggtatgtgtgaggccgttcaattttgatttcgagcaacctactttgacagaagagaacattaaggagcttatataccgtgaaacagtcaagttcaatcctcaagactcagtgtgagagaaagagagagagatatatatctttaaaaggaaactcatcanaatgctatgttttgt

SEQ ID NO: 21969 - DNA, 654 bp, Arabidopsis thaliana
tatggaattctgcatttttggtagagaaactggcccttcatctacagcgcaatcaacaacagaagagatgatatcatctttaactcgagcttgaggcatcacaatccccacatcatcagttgttttgtcatcaactgcgatgacatcctccacttgatctaatagttcaagcaaggcctacaaaaagaggcaatatgctgaaataataatttgaaacgctgtagaaaacaagttctagaggaaataatgcatgtagtcttgatcaaccacaggtggaagtgacaaaacattttacataatactctaaatacgcctttcataagcatctaaaagactgcatcaagtctcaaatcatacctttttatgttgtccagcccccatagatccacaagctccgctgcacgttacagtacaaggaagctgaacataaacagagcaaagttaagaagtagataaaatgtgctcataaatctgtttatcaggaaagtaatttaccttgttgtgagggcatgaaagagacggtggggtctggaaaggactgtttccctacttgaagtgtaacaatttcaactctgcatctggggaaggatttaccctttcatgccctatttgttgcaaagctggtcttttggaagcttttttgagggtgaaggg

SEQ ID NO: 21970 - DNA, 512 bp, Arabidopsis thaliana
ttctcgcagcagattttatgcaccctaagatgcagtctaacactagacttcaaatcatggctcatatctctcttcttgttggagcaggggttatgtcacttttagctaaatgggcttaaatgggcctaccattatgcaatatggaattcaaaatgactctactacaaccaattcactaatagatgacacgttatatgattcacttatagtttatagtctttgtttttttttgacacaaacttatagtttatagtcttgtttcatacaaattatatacccttctcgtttcttgacaattattggtttcaaaattttgttttttgtgtcattttatcgttttatgtttttagtgtaaacttgtaaacaaaattcaagttttagtttcctatagttaaagagaaaaatttaaagtgtattaataaaatgtatggtcaaatatataaatcccttattggagtgaattttattttcaagatgacggttacactgccaagtgccacgagatgttagta

SEQ ID NO: 21971 - DNA, 531 bp, Arabidopsis thaliana
ctaagagaattaacatttccactgctggctgatcatgcatttaaggcaacaaaaacaacattaaccagaattctactttatgattcaacaatccataacgaagtttaagcaactaagctacaaaagacagtctgataaaaatgcggaactcacctggaattccagtttaaacaggtctttaggcatgtacccttcaggtgacacagattctgtcggtggaggtaaccacagaacagtgaatccaagtgaagctaactcatcggctttttcttgaagttccaagtaccatctcccagatttattggactcccagttgaaaccttggcataatatctcaaatcccgagccggttcctgaggagattttaatgtcaggcttgtcagcttctgcttctaaaacaccttcctcggaaaaagctggagttgtgcttctaaatatgctatatgcctccgcagccagtttctcaatttcttgtagaatgtttcctgcacttctttgacgtttgtcttctgattcttatgagaggaaatg

SEQ ID NO: 21972 - DNA, 487 bp, Arabidopsis thaliana
atctgcattaaccaaatccaattccatatcaaaaagtaacaacaaacataattttgtgtttccaggtgtgtgtgtgacacttacatagattgagaaggttgtccagcaggggtgagaaacgagacccaataacgaccaatgctttcaccattcacccaaatttctccttttacccatactcgacatgtgtaggcccacgggcgcatctccattcggcccatcaaacgttgtctgcatattcacattcgtcaccgatactattcataaattacacatatagtacttatttacatatgtaaataggcataccttgtaccaatcgagggggcggttcttaattagtccagctttattcatactccacttcactctatttaaattcttccattgatataacctaactttctctccaagcaaacccaccttcacaacacatatacatactaggttatgtatcaacacaatcttccatcactcataaaatgaa

SEQ ID NO: 21973 - DNA, 459 bp, Arabidopsis thaliana columbia
atctctgaacgacatcgtttgcaatggaggacaagtgcttcatcttcctcatcgttttcttgctctcgtgatctctgagaatcctctgttttagttttttgcttttgctattttttttccttttcgcattcggttttagtgacgttgaggtagagagaataactcgttcactgggaacttctccagatgccatgtggcactcccatgccaatagccgagaactgagacgcatactagtacgacgtcatgtcagtcaatagctgaagtataattattttcaacttaaggacccgaagttatcgctatagagtcagaaagtcccaatactcgcgaatctatcacttatacactcactgcctggttaaccctaaaccgactctcgctgtacttgaaatatatacggcggagttgagagaatccagagcatcggcagagcctagatggcggtggaggcgattg

SEQ ID NO: 21974 - DNA, 914 bp, Arabidopsis thaliana
cgatgtccaatcgcaattccggcggatgtggtggccgttgctgcagcagagaaccgtttcatactcatgggtcggccggtgataccaagacggcagaatgtacgctctattatagcgtctatgcctcgggtgtggggccaatcgagccttgtccatggcagaattgtgggtggtaaccagtttcagttcatctttccctctgaggaatccttggcgacggtcatgcgcagaggtccttgagccttcaatgatagaatgttggtcctccaaagatggactcctcttgagaacccaccgttaatcgacttcattcctttttggatccaagttcgtgggatcccgtttcacttcctcaatcgcgacgtgctcacacacattggccggtctattggtaatcttctggatgtcgactatgatgcagaggcggccgctagggtggaattcgtttgcatccagattcactgggacattcaacaaccgctacggtttcagagatattttcaattccaggtgggggttaacactttgcttcgcttccgttacgagcgcctccgaggtttctgtgagatctgtggcatgctgacccatgactccggagcctgcataattccaaacggcggtgctgaccacatcccagagggaaacgatgacgacgatgctgcaatccctccacctgaccgtgctcctattgcagacatcaacgctatcccgagggatatcgatgggaatgctgaggacgaagcgagggctgacatggatgatggagaggccgaagctgatgcccttgatgacattgaccctaatcatgatgcgttgggctctcataaagagatggaagggagagccggggtttcaattggtggaatgctgagggggaaacaagcagtgtcactcatcccacttatgcagatctt

SEQ ID NO: 21975 - DNA, 771 bp, Arabidopsis thaliana
  unsure (1)..(771): unsure at all n locations
aaatcactgagaaaaacatcatctcttggaccgtgatcatttcagcatatgctattaatggtctaccggataaagcattagcattgttcgatgaaatgaaacaaaaaggttacacaccaaacgctgtgacatatctggcagctttatcagcttgtaatcatggaggattggtaaagaaaggtctcatgatcttcaaatcaatggtagaagaagatcacaaaccttcattgcaacattactcttgcattgtagacatgcttagccgagctggagagattgatacggctgtggaacttatcaagaatcttccagaagatgttaaagcaggggctagtgcttggggagcgattcttagcggttgcagaaaccgttttaaaaaattgatcattacctcagaggtagtagctgaggttcttgaactcgagcccttgtgttcttcaggttacttgcttgcgtcaagcacatttgctgcagaaaaatcatgggaagatgtagcaatgatgaggaggttggtgaaggagagaaaggttcgggtcgttgcgggttatagcatggttcgtgaaggaaacttggcaaagaggtttttggctggagacaagttaagccagagtgattctgaattaaatgatgtcgttcagagtcttcatagatgcatgaagttagacgatactgcaggaccgataaactaaagccctttggcgtcaacgaagcagataaatgatattattatacgatgcagtatgtatcntcggatctgggtgagaaaaggac

SEQ ID NO: 21976 - DNA, 599 bp, Arabidopsis thaliana
  unsure (1)..(599): unsure at all n locations
catccctgactccaatgatctaaagtttatctaatcttagattgtaatgatggagcggttaacatctcctcctcgtctaatgatagtctccgatcttgacgaaaccatggtaaaaacgcaaatcttgattcttcctctgttaagaacagaacaacgattttgagttttttcttttgcttttgattttgcaggttgatcatcataaagatcctgagaatctagctctattgaggtttaattcattgtgggaagacgcttatcgacacgactctcttcttgttttctcaacaggaagagctcaaacaatgtacaagaaactgagaaaagagaaacgtttgttaacccctgatgttatcattacttctgtaggaactgagatagcttatggtaactcaatggttcctgatgataattgggttgaaatcttgaataagaaatgggaccgaggtatcgtccaagatagaaaccagcaagttctctgagttaactcttcaggtacactttctacttagacataacaaagtctctatctaaatatttcntcagatgtttacttgtccttagagtgtgatcattgaatgcagggtgaacatgacaga

SEQ ID NO: 21977 - DNA, 591 bp, Arabidopsis thaliana
tagactttagagttagttttttgccttggtggctggagattagagactggttaaatggactgtgtcatacactgtgttgatattttttttcgtttcatttatacagactgaagatggcgcaaaacgtgctttggcttttgatagagctgctatgtaagtaatctatagctgtgactcaaatattttaagactttccttggtcacatttgatattggttgagtaatttttctttactttactactaggggtgatctgatatttgacaatccagcaatacgtgaaaaccaccaccccttccattccaagaaggaaaacatcttctggtttcgctccagaaatggtggatggctataacagggtatacattgggaatttagcctgggacacaacagagcgtgacatacggaagctcttctctgactgcgtaataaactctgtgcggttgggtaaaaacaaagaaacaggagagtttaaagggtatgcgcatgtggatttcaaggatagtgtgtctgtggcgattgcgctgaagctggatcagcaggttatttgcggaagacatgtcaagatatgttgtgcacttaaagacagac

SEQ ID NO: 21978 - DNA, 1434 bp, Arabidopsis thaliana
cgccatgaaataccaaacctctaggctgaaaccaacaaacagcaagtcactaggtgtacccatcaatgaaccatttatgtatcgatctgactccaaagtgttccgatatctcaccaaaccatgactgcagaggcaagagacaatcttgcaaagcctctgagattcttgaacgccatccaagagagccctgaccaagctctgccagaagaaccaccacaaatataaactatttgagtaacatctattaaccaccacgacatattcaatacaacggctcctccggccattccccatctaagtttcagcatcagcaaccaactcaatagagtgtgctgtaacagcacagtcgctgctataaccgccatcgcaatcactttgctttgtgcctataataattaatcaatctcataaccaaacaacttgaatttacctcaagtaaactgattttgatgttgttacctgcaagaacttggcggtggcgaagttaacagcgtaagcaaagagctgaggaatcatccagagggagaatttcccggctgctttagagatctccggagactgtccgaggagactcaacagtggagtggcaaacacgtaaaaaagacaaagaagaagggcacaagagttaaggatgatccaagacctctgaagatatattcccatcatctctagttgccctgctccgtacgcttgcccacaaagcgtcgctagtgcacttcccatcccaagcttaaatcaattttaagtttaaaagaataaattatgaacaatggatcaactaaaaaatgtgttacacatttgtcatagatatgtatgcttaaagtaactaattatattaccataatgccgacagagaagccggagatgacggagttctgtatggagacagcagctaaagccagcgtgttgacgtgtccggcgaggatctgcgtgacggcgccaagagagtattggcagaaagatgtgaatatcgcaggaccagcgagccaccacaacttctttgactcagccgcaaactgtcgaatgaagtctctaccgccggagatcggaggcatgtcggtgtcggatttggtatgtgctcgatgttcttgttctgaggaaatagtatcttcatgatcaacgttgagagtttccatgtcttactagcaaaagagagatagtaatttcttagacatgcatgcataacgcatatatagagttttatttgtatgcaatatttatgttaggttttttttgtttttttcacaaatttatgttaggtactataatttttagcttttcaaaattctagtatcgtaccacaatttagagatgcagtggattgtacgaggacaaagtggtctaactattcttacgtagtctccaaacttgtagtgaactttatccccaattttagtttctgaaattagctgactgaactcaagtcatttggta

SEQ ID NO: 21979 - DNA, 431 bp, Arabidopsis thaliana
tcgccgatgtaaaaaaacagaagctgcagcacaggctgcgcttaatgcttatcttggcaattgggcatttggtgttcctgacaataaagtcattcatttgctgtcacaggccgcagatgtcccgaatttccaggatgatcctgtgattcagtgcattaaagaacaaggattagatcttagctttggaggaacaaaggaaaataataattaccccttgatgcagatgtgtgttgatacttattttgcgcagagaaaaccgcttcaggcattaaccctgttacataattatgcctggataatgtccagtgaaacgactgcatttcaggaacgctatgattttaatatcgatgaatggcgggcaaaattcaggcagttatgtttagagtattttggcgatagtcgtacacagttcacttaacgctctgcgtcta

SEQ ID NO: 21980 - DNA, 483 bp, Arabidopsis thaliana
agtgtgctttaaagtatgtccttcttgcccccgcccgtaaaaatattttcactttaaattcaatttgataactacatccattagccacagcgcgatcctgtgcgaaattttgtgatcttcctccacattacataacatcatatgttgttatattcatcatgcattgtcatgttaccttttaaatgactgcaaactctcccctacaacgtattggacaagaaaaaggtatcgctatgggaagccaggaactccaacgcaagctcggattttgggccgttcttgcaatcgccgtcgggacaaccgtcggctccggtatttttgtatctgtgggtgaagtggcaaaagcagcgggcacgccgtggcttacggtgctcgcgtttgtcattggcgggttaattgtgatccgcaaatgtgcgtctatgcggaactatccaccgcttatccggaaaatggcgcagattatgtttatctgaaaaatgccgg

SEQ ID NO: 21981 - DNA, 458 bp, Arabidopsis thaliana
ggcataaacccaatgtagctcattctactcagctcttgtacgatctctgcaaagccaatagattgaagaaagccattcgtgtgattgagcttatggttagctccgggattatacccgatgcatctgcttacacgtatttggttaatcagctttgtaaaagaggtaacgttggttatgcgatgcagcttgttgagaaaatggaagatcatggttatccttctaataccgttacttacaatgccttggttcgaggtctttgtatgcttggtagcttaaatcaaagcttacagtttgttgagaggttgatgcagaaaggcttagctccaaatgctttcacttattctttcttgcttgaagcagcttataaagaacgaggaaccgacgaagctgtgaagctcttagatgagatcattgtgaaaggcggtgaacccaatttggttagctataatgtgctgttg

SEQ ID NO: 21982 - DNA, 504 bp, Arabidopsis thaliana
  unsure (1)..(504): unsure at all n locations
nnnnnnnnnnnnnnnnnnnnnnnctaaagagcggcacagtactggcagagaagcaggagctggtgcgccacattaaagatgagcctgcgtcgctggatcccgctaaagccgtgggcctgccagagattcaggtcattcgcgatctgtttgaaggtctggtgaatcagaacgaaaaaggggagattgtccccggcgttgcgactcagtggaaaagtaatgacaaccgtatctggacttttaccctgcgcgataacgcaaaatgggcggatggcacaccggtaacggcgcaagattttgtctacagctggcaacgtctggtggacccaaaaacattgtcgccatttgcatggtttgccgcgctggcgggaatcaacaacgcacaggcgattattgatggtaaagctacgcctgaccagcttggcgtcaccgcagttgatgcccatactttgaaaattcagcttgataaaccgttgccgtggtttgtgaatttaacgctaactttgc

SEQ ID NO: 21983 - DNA, 823 bp, Arabidopsis thaliana
tgctaacagggtttcgcctgcttgttgcgccggtttcctttgttaaatgctgtgcgatttctttcagcaacaccaactgagctttgtctgtccgcatcgacacaatgatctgtctcagtgattccctgtctgcctcaagtgcttgaagccttgtgtaaagcttctctatatctggctcgttaactccctgctgagtcgtgaacggttcttggtatcttggagagttccagtgatcaccatttaactttcccttactcatcttattaggctcatcgtcaatcttaacttcagaaactcccacgtgaatggagtcgatagtataaactcggtcgctactactagacataggagagtctgcgaaagatgcccccttaatatcttttgcagttcctaaaggcgaattgggatcataatatggccatcttggagactgaccaaccatcaccttttcttcaatctcaaagttaccatctggtccactcgggttctcatccacactacattccaaagaagtatactcgcaagggtaaacatcaaagccaaccgtgctagagtctctgccaaaaccaagtatctgatcatgtatctcagcttcagataccccatagctcaacaatctatgcttgtatgcttcgacctcataagtcaatgcctcgatagcttgttctttctcatacaacaaattctccaaaaccgagagcttttcttggtcatgtgtcattttctcttgagcaaacattttgaattgccgagcttccatctgaatctcagccttttctctctgcaacctcagtatcatcgacatagtctcattagctgcaga

SEQ ID NO: 21984 - DNA, 537 bp, Arabidopsis thaliana
taaagaaaccatgggtatctggtctttcgtttcagctatccccacatctagttgtatgatattcttactcatcatttcatttcagtgtaaaagagaaggctttgtgcaaaaggtaaaagatgaagaaggtgaaggttgtaatgttcacggtttcttggaagttaacaaagttgctgggaactttcatttcattcctgggcaaagctttcatcaatccggttttcaatttcatgatatgttattgttccagcaaggcaactacaatgtaagaaaagttttatttttgtttcattctctctttataagctcatatttcaaatgggtcttgactctattatatcattacacagattagccacaaggtcaacaggttggcctttggagactttttccccggtgtagtgaacctcttgatgggtaaaaactcaattatatagccattactcgcacctgttatcgctttttcaataatcctatcttctgaaacattctcttggttctctcagtgtgcagtggaatcaggggaaacagagtggc

SEQ ID NO: 21985 - DNA, 617 bp, Arabidopsis thaliana
ttacaacttgaagaagtcgatgataatgatgacctctcttcatttcccctctgttcccacgctcaagcttcgtgagccaatctctcctcttaacacttgctttttggtttacctctacgatcctttgttacttattcgttctacactcttttcgttctatttccagcgactacgcgtggcttaatgggttgtaagaatctgtttcaagtgtttgattttcgattttttgcttaattagggttacgtgatgttttatagttgcaaatatgtaatcctttagataatggattcaacgaatagtaatctctgaatttttatttgttggtgcttgacagtgtaacctcggtgatgatgaacttatgttcaacccggctttggcttccttacatatgtttcttggcggtacggatcgattctctcgtcttgtttctctccgaggtggtttcttatgtgtttccacatttgagcttatatggttttgtaatgtttaacagaggttgaagacactcaaaacagagttgttttttgtggatggaggaactgtattgaagatccgcttttctatcttgaaggtatttataatactatggtgtggtgttctgttgctttagtttaat

SEQ ID NO: 21986 - DNA, 818 bp, Arabidopsis thaliana columbia
cttgctgatatttatagggttgcgagtatatcgcttatatacgtttggctatttattagcactgtattctcttccctgcatcaaactaaaaactatcacactaaagagtttagcttccgacaactttaatgcaaaaggagctaaacacaccgagaaatcaagactgaaaggtaaaggtaaaagctttgggtattacgtatattattgttaagttccgtaagagtgagtttttactttagggtttcatatcgagtgaaacaaaaggacactaacaagtttgttattgcggatattgatccaggtgacagagatggtctggcaggcattgggaaggacaacaacatgggcgtaagtagcaatgaccaaagaaacgtctagggggggggggttatcataagagacaacatggatattatagctgggacaagcggaaccgcactaacagacacacaaccagactccattacaagctctaaaggaaaagagaaagttactgatgatgatgagagagaaagggatcgtttgtttgagatgtggcgaactcatcaacaagaagaaatgtggcgagagatgtgtgcaacacaaatgaccctaggagtaactcaaattgatgcaacaaatgtgggcgacactcgtaaaactgctaggctcttaatttcgggagtggcgacatttccaagggcgatccacatgaggatttgcgactcactctagcaagatttgaaacacaagaagtttgcacacaagtggtcgccgtatcatcaagcgattcaaccttcggaacgccaacctcgctttccacaagcatttcattctgt

SEQ ID NO: 21987 - DNA, 784 bp, Arabidopsis thaliana
atagtaacggccgccagtgctgtaaagacctaggagcggaaaactggaaacctatcagcaacttacatgatatgtcatctagtcactcaaagactttaggctataagaggctgactaaaagcaatccaatctcatgccaaattctattgtataaatctcgctctaaaggccgaaaaaatcagcgctcgacacggactcattgtcaccacccgtcacctaaaatctactcagcgtcggcaaaggagccatggattctagcaactaacttacctgttgaaattcgaacacccaaacaacttgttaatatctattcgaagcgaatgcagattgaagaaaccttccgagacttgaaaagtcctgcctacggactaggcctacgccatagccgaacgagcagctcagagcgttttgatatcatgctgctaatcgccctgatgcttcaactaacatgttggcttgcgggcgttcatgctcagaaacaaggttgggacaagcacttccaggctaacacagtcagaaatcgaaacgtactctcaacagttcgcttaggcatggaagttttgcggcattctggctacacaataacaagggaagacttactcgtggctgcaaccctactagctcaaaatttattcacacatggttacgctttggggaaattatgaggggatctctcagtgctatgtacctttatatatttatcaatcggatacgaatctaataataacctcatcattaatgaactaatcttatctatatacgatgtgatatgttctgtacaagt

SEQ ID NO: 21988 - DNA, 515 bp, Arabidopsis thaliana
cctgcagatcaagtggtgatgatttcagttgcatttctggtgatcctctttagtctacgaaaatatgggacgagtaagatgggactagtagtaggtcctgccttacttatatggttctgttctcttgctggtattggaatttacaacctgatcaaatacgatagcagtgtttacagagcattcaaccctgtccacatctattacttcttcaagaggaattctataaatgcgtggtatgcacttggaggttgcattctctgtgctacaggtaatttttcacttttgctggatggcttaaatttcattagaaattaattagattactcttgtagcaatggctaactgaactaagtaagcctttttatgctcaataatccgcctaatattgtgacactttctttgttgagtgttcatgttatataatctttatctttcaggctcataggcattatttgcagacctgtgctacttttctgttagatcagtccaggtaaatgaagagtagaaagcctttg

SEQ ID NO: 21989 - DNA, 822 bp, Arabidopsis thaliana columbia
tgagcagaaggagcagatgcaagccaccaattctatctcagtatctgagaacttttcacgtgaaaaattgaattcatctcctgcaaggggtactccaaattgcaactcagtatgccgaatttctaccgcagaaagtgaaaatgctatgcagaacaacagttattacagcaccaatgttcagtatggtgagaacaaatcattaaatgttgacactgtcaaagaagaaagcaaagttgaaacaggcacaactcaggtgaagaaagttgttagttctgatgtgcaatgcactgttgagtcttttgagactgcacttgactcattggtgaggacaaaggagaccattggccgagcaactcgcttggctatggacttggcgaaattcggcgtttcagcaaaggtatgaaacgttctctctgcttgtgatcttgtcttatctgtttgtggatgccacatgttaattagaggtggaatccaatcggagacaaatttcttcttatagattgttaaaacattgtacctggatctgtcccatgctatatacctatttgcatttatcaaatagttaattgcgagaacatgtcaaattgtcaataccaactttatgtattactacgaattagagaaacaccttatatatatagaattgtctactgattttaggatgctgtaggcatccagccactcttttcaagcaaaggactagggcaatccttattatcttatcttaccgttttaatgtggaaagggactttttgcacggtgcttttgtgtaatttataaaacactattttgcagacttttgtctaatgttgttaatgatgc

SEQ ID NO: 21990 - DNA, 1037 bp, Arabidopsis thaliana
ctcaattactcacctctactcccccagtttccttgagggactgagataacaagaccaggcctttcgcagttgcttgtgctctagctagtattgcttctgcctcacctgtagaacatcatcaaggataatataagaaaaaaccagtgggagatagcaaccatattgtgcattagcagtaacgaaaatagttcctcatgcaccaagcattcatcagtgtacagtggaaaaataagcaaatgaaaactaactttttcttctagtgaaactaactaacaatggacataacatgcaactctgatgtgttctcgatcttaatggctcactaaccttgtgctcgattcacctggtccatctttgctgcttcagatgccaagattacagaacttttcttaccatcagcaatgttgatatgggattgcctttctcctgtcaaatttagtaaagcaatgattagaaacatgctaagcagcctcttcttttccaaatgcaaaaaacgaaactcaaaaggaataacagatagattttagccaagaataacattatgagccgtagcaagcactgctcagtctcgaagatgagttctcaaagacaagtcagtcaaggttaccttcagactcaagaatctgggctctctttttacgctcagcttcacttgcatttccatagcagctcgcactccatgagggggcataatatcccctggaaaaacatgaattagaaataggaaaaaacagatatgtaactatcaccggaaaagaaaaaacacgaacaacttacttatctcataacgaaggcactgaagaccccagtcttttgcagcaacattgatggcttcctgcaagaatatatatacatctcaaaaatccatcatatattttcttcttcaatggatatacttcctctaaccatcatgtctccttatgatttgaaaaagagacgcaaataagttcggatatccacaaatacaacatgactaaacccccagctgaatctaatccatatcccaacttgtggtatcaacacactgcagatgtgct

SEQ ID NO: 21991 - DNA, 745 bp, Arabidopsis thaliana
gctctcagacacaaacaccaactccggatcatctgttatcgcttctgtcaacttagtccacgcatcattgttctcgttgtcactatcccaaatgcaatggaaacacctggaaatttgcgtcttgtgcactagctgcaactaagcatccgccatattgtcctcgtaggtgagtcccatcaattacaatgactttcctcatgtaagcatacccttgaacacatgcatgaagcgcaaagaacaagtacttgaacctctctacgccagagttatctttttcggtctccattaccaccagagaatttggatttgtctctaaaagacgcttgaagtaaggttggattaaagcgtaactccccataacagaccccaatgcattgtccatggcaatttcccgtgcccgacatgctttccaataggaaacgttgaggctgaattcttggcgtagcattcttctcagctcattagcgcgaggccccagcctactccaatatatttagtacggatcaactttccaatcacagccgttgaaacctgcttttggaagtctcctcttgcatccacgctatatgtgtgggttcgggtggtgcttctgacctccaaccgatcgctatctggcagcttagttgcataaacccgccatggacatgtgtcgctgacgcagacagccgccacgacattcggtcctgatttcgcctagatgaaatggaacttccggcgaattgcgtgaatcgtagtttcgttgcat

SEQ ID NO: 21992 - DNA, 1396 bp, Arabidopsis thaliana
acaataatcttagtaatttgacatttttacatcaacatgttatttagtaggataaaaaccaattacttgaagtaagccaatcctgaatcgctgtgctcactaagataagattcttggactcccattgcagcgtgtacctggaatagtaagaaatcagactattatagaagcaactatagttcacttcttgagaatcagtacaaacgtgaatgagtaaagccaacgcaaggagaagctccagatgttaaatcctatttccttattaagatactaaagttctcgaacgacatatacctctccagattactagttaacccttcccatggtttcacaaaatcttcttcttcaaaaacaacaccagcaaccaagacttccactgctaaccgctgttacattgatttccacaaaactgttcccatcagcgaaaaacgtggccctcaaaaacgggaaaactcagagcaaggagatttccagatgaaggagggagaggaaatacaaccaatatttcgttctcaaactgcaaaattatgatatgtcacaataatctagtagcatagggaaatatgaacttactccttgattatgattttcgccaatagctttaaattcgaactcatcaaggtccccaattctccttgccatcttagtccctgtgagaccagctccagcagctggatacgaaaacatttaaaacgaagcaccagtgacattgtaaacgctccttaacaaagatttaatacattaatggggatgaaagagaaaccaaaacacctagtgcctagttgtaagcacactgattatccatatagtgcaaaaagtgaactcatctactcttattcacctccaaacgatgctgcaaccgcaacggagccagcaacagttcctgcggcactagccgcagcagcaaaacccccagctccaatcaccggaataattgtgcccagtgttggtgccaatgcaccaaatcctgcagctatagctggagcagccaatcctgttgaatataaccatgtaaatgtaagataggtaaccagttcaaaatatgctctaatttagaatgttaacgctttgaatttgccgtaccaccagttatggccatcaaagtgcctcctgtaatagcagcggcaccaatgatgcctcctcgcttccacttagcccatgaagtcgtaggagttagattatcttcacccttcatttcagcagacttctgaatggccatggcagagcatgcgaccattgtctcaattgcttcctagaaattgaagatccataaatattaatcatttataagaatgaaaggagacacaaaatcatcattcactaaccaactgccagaacaaaaagaaaacaaaatggtagcacatgaaaaactactggaatttagagcactgccagt

SEQ ID NO: 21993 - DNA, 163 bp, Arabidopsis thaliana
agaaagatgactcttgaggaggcatggaatggtagacgtcaaagagacacagggataatgttctcaatcagatggaggaggctcttgaactcacacgacaacgtagaaatggaaatgatgacgttactctttgtgaaggcgaagatgatgactatagggatag

SEQ ID NO: 21994 - DNA, 1478 bp, Arabidopsis thaliana
ttcctacttgaaaggtggatggattccgataattttacgtatatacatttaaaatttatgatcgcttaaggttccttatttattcacatcgccatggtattccttgtttatcctggcagcatccatcactttcttcgtcaaaaaacgtccttgaaccttttttctacggtccctgcattcaaaatggataatttaaatatcccataatatacatattaactgataatgtttgacttactagtattggtccattgcaggttggcctgttatgtcccaatgacttgcatcgtgagcatctttttcttgatgctcgctacaaatggaagcgaaggttacatcctaataatattaccatataaatattttattagctttgatgtcaaatattttaccttgaattctccttttgagaataatctccgtttccttggtcgcccaggcggtcggcgcacatacggtggagctaattttccaccacctacatcatttggtgaaggagtcagcgtttctgtgtcgggtaccagcattatgagtgcttggtatgaaaatctaagctggggtgtcgtgtgatggactctaaccatcgtgttcatgcggagcccttcttctatagccgccgatatggcatgtgagcaggggatagttaggagctggaactccctgtacacgttctctcccataggttaactgcaaatgctgagcctctcttttctataacctcatatagcccatccccaatctttagcacaacacatccagctcctttctcgtaattctcgatcaccatatcgtgcaccttaggcggtaagatattatcctcagttctggcagcttgcctcctaagcgcaaaccatgttacgagtgtagtgcgaattgactctaatatagaattaccgggtaatctcgagcgttaacacattgtttagcgactccgcaatattacttgtcatgacgttatacctattcccaacaaatagggaccttgtccaatgctcgaacccgataccttccaagtagtctgcgcacggtccatgcttagctcgaacttcagcaaatatcctattgaagtcagttagtcgataagctctagctgcactggataccaaagtacctagctgttcatatttaaaggacgcctcaatgttccttttcagatgtacgacgcaagcagcatgagatgacatggggtaaacctgcataatatttaggcaggatgtgattttttagaaaacatggtatattagtgactaacttaattagtatgagatacattatgtgttaccatgttaccttacggatgctggcgtaaactgagttgtgtctatcagacacaaacaccaactccggatcatctggtatcgcttctgtcaacttagtcatgaaccatgtccacgcctcatcggatttgctgtttactatccgaaatgcaatggggaagacctggaaatttgcgtcttgtgcactagctgcaactaagt

SEQ ID NO: 21995 - DNA, 1016 bp, Arabidopsis thaliana
tgatcaatgtaagttccttcttcttcttttcatctaatatcatcaaatacttaaaaacctattaaaactcaagtaatataaaaatatacaattaaacacatctccctgaagtccaattagtgtcagtaaaaaactttcaaagttagttgttttgcttatagacccattaaacaactttctgtttctatttgggggtataaaacaagtttaagtgtaagccctagtaaaaaggaagatccaccaaaaatggaggaaccaaagaacaagcccttgcctttggggttgaatattatcttacttcccaaaatctgaaatttatttggtcacatttcttgatcttttgatgagataactacatctactacaaagaagtttccttttgtgtgtttctcaaagttagacataagaaaacgtgtagatcaagcaagtgactatgagtcacaaagtctccaaaaagttagacgaggagcaaatcaatgagctccgggagattttccggtcatttgatcggaacaaagacggaagcttaactcagctcgagctcggatcacttctccgagcactaggggttaaaccaagtccagaccaattcgaaacgctaatagacaaagccgacactaaaagcaacggactcgtagagttcccggagttcgtagctttggtctctccggagcttctttcgccggcgaagaggacaactccttacacggaggagcagcttctccgattgtttaggatattcgacacggatggcaacgggtttatcactgcggcggaattggctcactctatggctaagcttggccacgccttgacggtggcggaattgacggggatgataaaggaggcggatagcgatggcgatggccggattaacttccaggagttcgcaaaggctattaactctgctgcatttgatgatatatggggttgagtctttttcactggactcttccttaattttcccttaacttttttttagttactatgtttagttttcactattctacagggga

SEQ ID NO: 21996 - DNA, 1459 bp, Arabidopsis thaliana
  unsure (1)..(1459): unsure at all n locations
tttgttcacgtagaggcacaaatttacaacaacaaaaaaaaaaaaaactcaattaatcaatattatttttctcaattttaaaactacatatattaaacgggacaaatagatagcatttttcttagattttttccaaacccaaaataattagaagcaaacaataacacttcaaacgagcaaaataccaaaacacaaaagactatatagattttacagttttagtatttactaataataaaaatatcaaaacgttattaaattattatttcaatttttgtattctttttcttatgtgtattttatacaatttatgttcctaagaatgatgttttggatttttcttacaaaattaagatttttttttttagttttctattaattttttgttaattgaataataaaaataagaataatattgatctaaaatattaatatttgtgaaaaaaaataaaactcaaaatatcaaacttcattaaaacagagaatattatttttaattattcttatgttgcttaccgatttttatttatgctaaaacagttatagtgctgtatacaatcaaacagaataataatttagggttatattaattcctatgcttagaagattggtaaattaaggaactatgcataaaaactcagaaataaaatctcactcctctgcgacaaacgattctgccgaaattacccctaccaaatcaaaatagcgtagctctgataacactttagagagtaaacgcggctacatttaatgcccaagatataaccgaagattttctcagctaaccttggaaacaaaaaatatattcatcatcatgtcggatatttatggggttgcgagatatcacttatacacgttggtgtatttattagcagtatactctcttccttgcatcaaaaaaaaaactatcagactaaagaccttagtctccgacaaaattaatgcaaaaggagctaaacacccagagaattcgagactgaaaggtaaaagtaaaatctctgagtcatacgtatattattgttaagttccgtaagagtgatttttactttagggtttcatataaattgaaacaaacggatactaacaagtttgttactgcggatattggccaagcaggtgtaaatggagttcgtggtcagactagtacctggggaatggaaaaaagatgagaacggctatttcgaacacgttttgcatgccgatggatttgcgttaggagtccgattgcgagacacggatgggtttgcgaaagttgttatggcgaaaaggaaaagttagcgctgggtgccgaagacgatatcgagttaacatatcaatggccacagtggatgatggatcctgactggagacgcgctaacccgatcgatatattggacgatgaggatatgacactgtttatggcaatacgggcagatctagatgaagtgcatctcngggtgaagatctacgagaagggaat

SEQ ID NO: 21997 - DNA, 804 bp, Arabidopsis thaliana
atacttcgacttgtgactcgatgcttattggtgacaatgcagccgctaatacatatccttacatacaggtactttgtatatgatcatctaaccttttattataaggttatgataaaagcacctctaatgaagatcttataacaggtaaagaatccatcggcgagaatagagcatgaagcaagtacttcaaagattggagaagatcagattttctattttcaacagagaggtatcgatcatgagagagcattagcggcaatgatctctggattttgcagagatgttttcaacaagttgcctaatgaatttggagccgaagttaaccagcttttgagcattaagcttgaaggatcagtgggttaaacaaatctcacaattacttaacattaaagaaagctttacttgtgcccaacaaactgctaacaattttaggctttcaataattaattttggcttgagaaaactgatatataaacacttgagaaaaagcatattctcgatcagaaaagagtctcacgaataatcaaagatgctactgttctctaatgccggaatatcaatgaccaagcacctaccacagtgatgaccttttaagttcaaagagttaattcaaaaacaaccaagaaagcatgaaccaacattttggaacataaatagtctatgaaaaagtgaacaagctttcgaacattttttaaaagtaactcaaaacaacacgacttgaaatatacccatatcatcaaaatcaggcttcaacttcggatttcttacctctacagctacattagtagaggaaaccccattagt

SEQ ID NO: 21998 - DNA, 3087 bp, Arabidopsis thaliana
ggtggagccaattttccacctcctacatcatttggtgaaggagtcagcgtttccgtgtcgggtaccggtattatgagtgcttggtatgacaatctaagccgggggtcgtgtgatggactccaaccatcgtgtccacgcggagccttcttctatagccgccgatatggcatgtgagcaggggatagttaggagctggaactccctgcacgtacacgttctctcccataggttaactgcaaatgttgagcctctcttttctctaacctcatatagcccatccccaatctttagcacaacacatccagctcctttctcgtaattctcgattagcatatcgtgcaccttagacgataagatattatcctcacttctggcagcttgcctcctaagcgcaaacaatgttacgagtgtggtgcgaattgactctaatatagaaattatcgggtaatctcgagccatagttaacatattgtttagcgactccacaatattacttgtcatgacgttatacatattcccaacaaaatgggaccttgtccaatgctcgaacccgataccttccaagtagtctgcgcacggtccatgcttagctcgaacttcaacaaatatcctattgaagtcagttagtcgataagctctagctgcactggataccaaagaacctacctgttcatatttaaagtacgcctcaatgttccttttcagatgtacgacgcaagcagcatgagatgacatggggtaacctgcataatgtttaggcaggatgtgatttttttaaaacatggtatattagtgactaacttaattagtatgagatacattatgtgttaccatgttaccttacggatgctggcgtaattgagttgtgtctatcagacgcaaacaccaactccggatcatctggtaacgcttctgtcaacttagtcatgaaccaggtccacgcctcatcgtttttgctgtttactatcccaaatgcaatcgggaagacctgaaaatttgcgtcttgtgcactagctgcaactaagcatccgccatatcgtcctcgtaagtgagttccatcaattacaatgactttcctcatgtaagcatacccttgaacacaagcatcaagcgcaaagaacaagtatttgaacctctctacgccagagttatctttttcggtctccattgcaaccaaagaatttggatttgtctctaaaagacacttgaagtaaggttggattagggcgtaacttcccatgacagaccctaaagcattgtccatggcaatttcctggcccgccatgctttccaataggaaacgttgaggctgaactcttggcgtagcattcttctcagctcattggcgcgaggcccccgtcctactccaatatacttagtacgcatcaacttgccaataactaccgtcgacgcctgcttgtggaagtctcctcttgcatccacgctacatgtatgggtttgggtggtgctcctgacctcgaaccagtcgctatctggcagcttagtagcataaacccgccatggacatgtgtcgctgacgcagacagccgccacgatgttcggtcctgatttcgcgtagataaaatggaacttccagtgaattgcgtggattgctagtttcgtggcgcagtcctctttgcttttaaaaatccgaccaatgtagatatcatctccctcattatcagcatattttagggcacgatgaagagcatctgcgaggaagagaaaacatagctgttaatacttttagcgaagatgtttagttatcgagttaaacaattacttatcgaacatgattagctatatataatacagagctaattagttttttttttatttatcaaaattgctatataggtatgctttacctgctatctctgggtcgtcaaaatatggtggggcatctctatcgtacaacaccgtcggaaccggtgtatctttcaccattaactcattcctcagtacctccgatactcttgtattggttgaacccgcacctatctccttagtggttattcgttcgtctatcatgataccttttcccttatctgttattccgacgggctatggggccataatgagtgggccatcaagttcagaataaaagtgtgacagtgtttcgtcacctatagtcaaaagtcagaaaccgtgaacgaatggtaatagtattatgctatcggcgataacatattaaatatcagataaccaacctatgcacgatgagctgttgttgttggatgagtcagtgacgtccattaggtcatcgctagagaaagatacgcttgtggaaagcgaggttggcattccgaaggttgaatcgcttgatgacagtgccaccacttgggtgcaaacttcttgtgtttctgctcttgctagagtgagttgcaagtcctcacgtggattgcccttgaaaatgtcgccacttccgaagttaagagctctagcagttttaccagtgtcgcccacgtttgttgcgtcaatttgagttgctcctagggtcatttgtgttgcacacatctctcgccacatttcttcctgttgttgagttcgccacatctcaaacaaacgatcccgttctctctcatcatcatcagtaactttctcttttcctttagagattggaatggagtctggttctgtgtctgttagtggcacaccgcttgtcccagctgtaatctcgacgttgtctcttatgataaccccccccccccataagcgtttcgttggtcattgcctttctgtacgcccatgctgttgtcctttcccatggctgccagtccatcaccgtcacctggataagatatatggtagcatataaataagttatcggactaagtatatgagctgtaaatcaaccctgatataagcaaagttatccgatttatatattaacaaataaatttactacaatatagcgaacaacataggttttggtttcacctgatatgtttcgcagcaacattcttgttaacgccgtaccccaaacagctcttgtttccgcgctattccagtacttatccgaaatttctccaaagtcagacggcctatatccaggttactccgataactattaacgtttcgactatc

SEQ ID NO: 21999 - DNA, 569 bp, Arabidopsis thaliana
tgctcatgacaaggaatcatatggtttcatattcataagcggatgtttatttcttgtgcagcacaagaatctcaaatgaattaggtgctggaaactctcgagcagcacatatcgtggtctatgcggcaatgtctcttgcagttattgatgcattgatagttagtatgtctccaataattcggcaggaatcttttcgggcacattttcagcagtgacaaggaaactatcgactatgttgcaaagatggctccattggtctctatttctctcatgcttgacgctttacaaggggtcctctcaggtctgagacttgttcttctttctttactcacacacaagttcttgtcggatattgtttactcttttcctccacatagtgcaaagacacttcatgttcagtgttttgtcctgtgtcaaaagctatcccaaaaatatactcttttctaccacgcctaattgtcttttgatggtttgcaggtattgcaaggggatgcggatggcaacatataggagcttacataaacttaggagctttctatctctgggggataccattgctgcatctttag

SEQ ID NO: 22000 - DNA, 1174 bp, Arabidopsis thaliana
taacttacacttatactatgatgtctggtcagaaagtgagagtactcagccatttttcttctggtaaattttacacaaacttagtcaaattttgatttcgaatgttccttagtaaatggagctgattttgatagcaaaccttctgaatgatactaaaggttagacattggagatggcaaggaagtaaatctcaacaaatgttcaagaactcttcttcagcgtcaatgcatcacttaccttggtccggtatgtacacatggtcttcggttatttccggttggtaaaagaaaaccgattttagttctggtttttgactaacagaaagagagacaagcttacgaagtggtcgtggaagatgggaagttagtcagcagacaaaccaagagccttgtggagactactgaaggaaccaaatggatctttgtgttgagcacgacaagaaaactgtacattggtcagaaacagaaaggtcggtttcaacactcgagctttctctccggcgccgcgattaccgccgccggtagaattgtttcacacgatggagttgtaaaagctgtgtggccgtacagtggtcattatcttccgacggaagagaatttcagagaatttatctgtttcttaagagaaaaccacgtgaatctcactaatgtcaaggtgattaagctaattaaatctctaatcccgcattttattatttatttctttgctatattttaataaactttcgtaattaattgtgttgtagatgaatgcgattgacgacgatgatcatctggtcaataatgatggaagcactaagccgtcgatgatggtggcgaaatcggacggttcagatgaacagaaacgattttcatgcaagtggagtacaggaaacggtccaaggatcgggtgtgtgcgggactacccaatggatctgcagacgcgggcgcttgaacaagtcaacctttctcctcgtgtagtcaacggaacaatgggattatttggcccaataccatcgccaagacccagcccaaagattcgtgtctctcctagactatcttgcatgggtcttccaagcccaaggcactaattttaccaattttcctaatctgatcaattaaattatttcaaaatttttgaatattcctttttttttcactcccctaatagtattgggcgagtctttatttagagt

SEQ ID NO: 22001 - DNA, 498 bp, Arabidopsis thaliana
tgaagtttcatcgtacttattcagaaatactttggacagaaaatgatgcagtgatcccattctgctgataccaactcgcaatcagacttgtaacacagtagttgcgagtcagggaaagatgtgggagctgcttctgagtattggggcaagagttttccatcacagaaccatttctcgacacagacccgttcataagtctgtccagaagcaacaatgacaggatcacgcataagctgcaaagatatctgttcttctggtggaatgaaaatctgtcctgatttcctactgttcataagcttatagttgatagaaccaaacttcgatagttggcgcccaaacgcatgaacacgatgttcattacaaccttaaccagagtcatttgtcatccacaatttcacttctgaatagcttggagtactttttcatgagatgcaagatgtaagccacaatggaatccttcccttgtcttcttcacactttccagtcaatgagttcttt

SEQ ID NO: 22002 - DNA, 411 bp, Arabidopsis thaliana
gttttcttttattgacctctaggtaccttcttaggtactatttttgctttattttgacatacgtacgtaatggtaattagctatgcatgcatacaaacatagagagtttgtattacacgcaattcatggcttagcttgttgggcctcaacagtttccacaacctcgtttgcctcggcttgactcctgcaacagtatctgcaccgtccacgccaccacccaccgcaacatccccacctacaaccaccacggccaccgccaccaccaccgccaccaccacggccaccctgctgaggctcaacatcgttgggctcaacagtttccacaacctcgctggcctcggcttgactcctgcaacagtatctgcaccgtccacgccaccacccaccgcaacatccccacctacaaccacc

SEQ ID NO: 22003 - DNA, 875 bp, Arabidopsis thaliana
aaatggccacctaacacctaagaagggttggttcccattaattgctagctagtgtcaatcttaagggataaccagcaaactattttgtttgctgagagtacaggaggctgctaagcgtctagagtcaaatggtgagcttaatctttttctgttaagcatttttcatggaccacaacctctttttttcttttattgggaaaacattcctcacaaaatctactttattgttacggtgtatctggctcagaagtggaatacgtgcctcttcccgcagccccgagcacgaaccctggaaacaaaaagaaagaagaagtaaatgctattctctttacactagtgcttcttctgtgtttgcaagttatgtcacaactaaccatgctaatgtactgtaggtaagtattattgaaaatgtatactggaaggaactgggacttctcgtgtttgtctggattgtgttcctggcgctgcagatatccaaggttatttattggtctttatcaagcaattcacatatatattgttcatgtgcaaactttgctgatacttttcatgtcctactgtggaaacagcaaaatctggctaattgttcagtagcatattgggtcataaatctgttacaggtacgtagtcagttacattttcttgcagagagatctacgtatacggcttacaaatacttacgctttgctactgtaatttagattccggttgcagttggtgtatcaggctatgaagcagtagctttgtaccagggtagaagaatcattgcgtctaagggacaaggagactcgaatttcaccgttggtcagcttgttatgtattgtacatttggcataatagcaggcatagtcggtggttacttggtttaggcggag

SEQ ID NO: 22004 - DNA, 1027 bp, Arabidopsis thaliana
tgcacaaaagcccatcacaaccaaaattactaattagacatgtgtggcaaatgttatgactgatcatcatgcaataattcaccgccaataccatagatgctaccagactttgtaggctctctctctttagtaaataaagcactttgtttatgttcgtttaatgtactcataattagctttaactatttcactctactctatatattacacacactatctcttccatcttccctccacaaaccacacattcaagctcttaccttttatcctcaactaacacaacaatggcttatactctgcaaaatctgacagccacaattgttctggtaagcctgattcttggatgtacagaggaagtaaccggaatgcgttacattcccatttcccccactcccagtgagagcaaacattcagactttcctgtaaacatggtgcctcaaccatctagtctcattcctggttttggaaggttcttgctacctcccacacctaagctgccattccttccttacaaagatccccttgctgttgccccagccacttcaaatggaactcctagtaataaagcccgcagtccgagttcaggagaagatgaagttccaccagtgccacaaccatgacctgtcaacaaataagcttttgctagatgcagaagggtattcaattctggttcacataacaagtatactagtcatttcatcatagtcatatatcttcatgatctctctctatatatacttaagaggatattgaataaattccagagcttttgcttacatactatctaaaaataatatttccaaataaaatgtaatgactcacattgctgcaaatgtattgagtcacaaaagagtagaaatatgtagaaactcttcaattgaatcattattgccatgattgagtcaaaagagaaactctctttacaaagtctgaaattttgtcaagatatgtaaaatctcaaagtttcaaagtaatctcagcattagcatttagcattaacaaaaccaacgacaactacgatgtatta

SEQ ID NO: 22005 - DNA, 1160 bp, Arabidopsis thaliana
tgcaaactatattgtcatcatcgtaagaaagtttgaatacataaagcaacgttgttggtggttatattcatctagtgatagtaatatatgtgtgatcctgtcattattacttgtggagacacttgtgaaggtctgtgtcgagaaacattttcagtgattgaaaactctagctccaagactcagaagcagctcccacatctatttcctgactcgcaactactgtgttacaggtataagcgagctggtatcagcagaattggatcactacatcattttctgtccaaggtatttctgaactaccagaataatgcttcatcgaaataacgattgctgagggctgctaatattacaaaagaaaagaccaattattcacggcaaccactagtccagcagtaacatataacgatttggctgctacaaaaatggtaaaataggaggaacatctgtgtccctgtaatcttagatgggaagttctgactctgtaagttctgattcatgggccacagccattcgctccctcgcttcacgggcctagagttcaaaatgcatccaattgaacatcgatatgtttattccaaaatagaaacatgtcatgaaagacaaaaagcaaaggaaaggacctgggttttccagtttgtgcagcctgtgacaagagccagcagaagagtctgcagaactgcaccggctagtattccaatccaaaggccaacacctttcagatgaacccagaaggctaaagatgctgcaatgggtatcccccagagatagaaagctccgaagtttatgtaagcccctatatgctgccacccgcatccgcttgcaacaccttccaaccatcaaacgagggttagaagaatggcagaaaagagtacaacatgaacaggcatgacaacttggagctgtatattcgacactagcttatgtttgagaaacgaaatgggaaaaaatctcgaacctgagagaacccttgtaaactgtccagtatgatagaaatagagaccaacggagccatctttgcaacatattcgatggttttcttgtcactgctgaaaacatggccgaaaacatgcctgccggctaatagtagcatactcaccatcaatgcatccattactgcaagagacattgccgcatagaccacaatatgtgctgctcgagag

SEQ ID NO: 22006 - DNA, 632 bp, Arabidopsis thaliana
ctcttcaagcggcggagaagagagagaagttgatgatgtagactcaaagttcaacttgcattttcctcattgtgagatcgatgaaggacagtacaagaggccgaataggaaatcgcaatatagcatctgcagcaaatttgggattaaggaatttgcaaacaagtttggttatagcgctgagcaattgggactagcgttgtctcttgagaaagtttttgttgatgagcttgaagatgcaaagaaaacaccagaggagatggcattgaactatgagtgtgcaatgtttggagattctcaagctgttcttaaaggtgcaaggcatatggctgcggttgagataagctgcgagccatcgattagaaagtatgttcgtggaatttttatggagaatgcagtagtctcaacgagtccaacaccagatgggaatgtggttatagattccttccatcggttttctgcggttaagtggttaagcgagaagccattgagaaagtttgatggtgtcaatggcttctcattcagaaagcagaagaggagaagcttcttcaagtaactttcaagctgcctgagaatcagatgaataggataattagtgaatcgagtgaacactactaagtgttggtgtagaagta

SEQ ID NO: 22007 - DNA, 960 bp, Arabidopsis thaliana
cttcttcttcctcatcaggaccgtctgtttccggaatcaatccaacggctcctaactgttactgtaaaatcagattcaagaactttcctcgtgagattgtttctgttccggttatgttccgaactgaatctgaatccgagactcgttgctcctcctccggtaacgtatccaccgttgctgcttgtttcagtttaagtaaagctcagatcgaagcgtcgttgaagaaacctaaatttagtgttctctccgttgaggcttattcccgcggaaatagcgacggagacgacggtgttagcggcgcgtcgtgtggactcgctacggcgggtgagaagttgcttggtcgatttgaggtttcgcttgatttgaaatcggcggagacgaagagttttttggcgcataacggttgggttgctttgccgtctaagaaaacgaagagtaaaactggatccgatccggagctccacgttagcgtacgggtcgaacctgacccgagattcgtgtttcagttcgacggtgagcctgagtgtagtcctcaggtttttcaagttcaaggaaacacaaagcaagccgtgttcacttgcaaattcggctctagaaactccaactccggtgatcgaaatcttcttcacaggtcagttaaatcatcatcttactggaataattaagaaataggaacattgcctttttcagatagattctttacttaccaatttagcaaagagatgcgaacttagaaatatgtattttcatgctttgattggtgattgagatttgttttgtgatcgtatattgattttatggtttatattttgcagttcttcgatgatgtctgagataagctcaacgagaagttgtatatcgtcgatgaattcggaaaaagaacaaccgtcaaaagagagaaaaggatggtcaataacggtccatgatctctccggttcaccgtggctatggctctatggt

SEQ ID NO: 22008 - DNA, 575 bp, Arabidopsis thaliana
tttatacagagataagggtaaggaaagaggccgttgttgtgtttcttcgatgattaatcacacacaaataaaggaaatgcattcaactttgagttttaatattacctttggaacgaggacatccatggcagcaactgtcttctcatcatcgttaagtctcatgtaaaaagctttgattcctttcgggtagttatagacaataagtggctttctgaaacagaacctctgtcaagtatctgtaattgcaagacatgtttcattagcaaccatttcttaaaactgtttaaagctgaggaatggttcttaagggttatcacaaacctttcatgctccgaggctaagtcgattccccactccacattgttatcaaattcctttcctttagccacagcttcctcaagtagctctattgctttagtgtatgttatacgcccaaacggagtagaggcaaccaattttagcctgtcaatgcatcctgagtcgaaattcttagccataagttccatgtcagcgtaacatttctcaagcaaccagttgcacatgtatttcacatacgcctctgcacagttcatgtc

SEQ ID NO: 22009 - DNA, 576 bp, Arabidopsis thaliana
agagaattcactaacggtgactataatgtcaatgcagatgacattgaagcagtagtgcatgcttgtgagcttgctgctgagtggcgccagacgttccattctgatgttgttgttgacttagtatgctaccgtcgctttgggcataacgagatagacgaaccgtcattcacacaaccaaaaatgtacaaggtctggctattatatcatccatctctgtgaaataatctaataaccaattcaagtttccatttcatacttttcttgtactttttttttgtttaaaaacggatgttacttgttggtgataggtgatacgcagtcatccctcgtcacttcaaatctaccaggagaagctcttgcaatctggacaggtaacccaagaagatattgataagattcagaagagagtaagctctatcctcaatgaggaatatgaggcaagtaaagattatattccacaaaaacgtgactggctggcaagtcactgtactggattcaagtctccggagcagatttctaggattcgaaacaccgggtaaaaaacatttttagttcatttagtttgtcaatgccttt

SEQ ID NO: 22010 - DNA, 710 bp, Arabidopsis thaliana
cactacctccctccatgaatgctccaaccactttaccaccttgaacccaatatgctccaaatcttggttttgggtttgatggattgctgtctccaaataacacagagtctcctacgttgtctccgtagaactgccatgagagatcaaaggagcgagagtagaagaatggaagatagtcgtattcctccaccgctgcgcctccctcagccgctttgatcgcctgccacaatgtatcacatatataaacgcttcatcagatatatacaactgtatgttaatctataagatttaggcctcaagagtttgcgttgcattttttatggtatggattaatagggttttggtgtagcgatatcagccatattgtaagcattatttaccttaacagcttgctctgctgatttgcgggaatggtcaacatgctcgacccttctcacgtctccgtacattttcaaagggaaagtagcaacgtcaccaacagcgtaaacatctggaacacttgttttgaagaatgcatcggtctgtgtgaaacagttaagcagtcaatttaaaagatccaaatcagaatggtacgggataagaagaagaagagacgcacaggcagcagataaataccttaattccacctttatcttcctcgacctgtcccttgaataaggatgtcaatggttttgcaccaaccccaactatcacaatgtcggcttccaatg

SEQ ID NO: 22011 - DNA, 751 bp, Arabidopsis thaliana columbia
tgaactcagtttttgttttgtctgaattgagatttgctgtgttgaccaagcttccaagcttgaagctgcaaacaagagtgagaactgagaagtaaacaatggtactcttattgtctgtttttcttccaagaagttagttcagaaggaagtaattcttcattgcaacttaaaacagctttagacatgagtttcccaagccaagcatgatagagtagtccccttgatccgagccctgaaaatacccagaagttgcaaaactgaccagcacctatgagctgattaacacatcccaagagcggcagtgatccatggcttgtgacaggtggcattgctctcaagcccgcccttgctcccgcaaattcccacttttctatgtctggataaactgcacttgctttcggaagaagctcgttgagagctcttgaagcttcctctgctgggacatccgatgaataatttcttgattgccattcccatgtggatcccatgtgcagattacggggtccctgaaccgcgagccacgcatctgacaagatcgaaggtccatcgtccgggtaacttcctctgcattacataatttaataaagaaaagcttttgaacaggaaaaaaaaaccacaaagataagtagctgagctcaacatagtaatgtgcgagtatgcgactacatcaacacatactttctttttttggaaggtctcacactagaaaagaacagagaagaattgtacaattgaaagaggatgtaaagtt

SEQ ID NO: 22012 - DNA, 849 bp, Arabidopsis thaliana
tttttattacaatctttattattttacatcttttgtggcattttaatcaattcttatttttaatttgatgtgttaactcttttaacatttatactaatcatcaccctagtctaggtattaaccaaggatgtgcttactctagaaagtcggggcctaaatgaatggaaagccacccactagagatgccttaatgtccggtccattattctaatttctcggacgacagaaactagcgaggactttatagagttatgtggcaagcatgtgcgcatgttatcgcatagtatgtaacattttcgtcttctatttagcatacaactatacatagtggtagagttacacgttagtcaactatataaacatacaatatctaacatatgtagagtcgttgaagcttgtttcgtcggctgatgtttttctccggctgatattacggaattaataaaagaaaagtttaatggaatgtgtagatgaatcacccaaaataaaatactcctcatttacgaataatcaaactattatacaatattacggtgaagaattgaaaaattaaaaaaatatatgaaaaaagaaaaataatcagaaatgtaaaacagtacgtgaaagcctgagcaaccggtcgagagcagtaggcaagaacttgcgagcaaataaataacaaatattcgtctcttctccattgtagagacactcaccaccactccttaggttctccatgaactccgcagtcacctcgtgtctaatagaccggttagggtgtcggccacctttcgaccagtcgacccacgtgagagtccggttggagttgcgccgtttcaggcttgatttgatgttgaggagtgtaggaat

SEQ ID NO: 22013 - DNA, 887 bp, Arabidopsis thaliana
catgggccggcttctgaaggtccacttctggctcaagatgattacccacaaattcgggcagcatttaccaactataatgtgtggatcacgccgtacaacaacacggaggtttgggccagcggtttgtacgctgaccggagccaaggcgacgacacgttagccgtttggtcccaaaggtaatttacacctctattaaatctttaaaaaaaatttcatctgttgcattgcatgatttgaataatcgcataatcaactttgatttgaaacctaatataattcaactttaaatcaacaaatatattcgaagggcttaaaacatgaacgagctaacacatatgattttttcttgtttttttttcctgaaagcgtagtatatttccgcctatcacaatgatatagaaaaatgacttacattatttttagataaaattttaagagattaataaagaaaattatatatataaaaattcagaactttgaaatttatatatataaattttaagcttagtatgtgcttttttttgtgggggactaaaagttatgtaattgagtgcgacaggaataggaaaatagagaagacagatatagtgatgtggtacactgtcggattccaccatgtcccttgccaggaagattttccgacgatgcctactttgtttggtggctttgaactccgaccgaccaactttttcgagcaaaatcctgaccttaagaccaaacccatcaaactcaacaccacaccaacgtgcactgccaggaacgattaataactagcttaccattaatgatttgatctctatgtgtattcatgtgtattcatgtaaactggataatatatgcaattaactagattgactgttaatttaaggtctactagttattattga

SEQ ID NO: 22014 - DNA, 922 bp, Arabidopsis thaliana
  unsure (1)..(922): unsure at all n locations
ctaaagaccatctatggcgtgatcgacgaattcaacatcccaactcagggctgtgtactggcgcacgtcaccacccagatcgaagcgatccgtcgtggcgcaccgggcgggctgattttccagagtatctgtggcagcgaaaaagggctgaaagagtttggcgtggagctggcgatgctcgacgaagcgcgcgcagtgggcggtnagttcaaccgtatcgccggggaaaactgcctctacttcgaaaccggacaaggctctgcgctatccgctggcgctaacttcggcgcagaccaggtaacgatggaagcacgtaactacgggctggcgcgtcattacgatccgtttatcgtcaacaccgtggtcggctttattgggccggagtatctctacaacgaccgccagattatccgtgctggcttagaagatcactttatgggcaagctgagcggcatctctatgggctgtgactgctgttataccaaccacgctgacgctgaccagaacctcaacgaaaacctgatgatcctgctcgccaccgcaggctgcaactacatcatggggatgccgctgggtgatgacatcatgctcaactaccagaccaccgcattccacgataccgccactgtgcgtcagttactcaacctgcgcccgtcaccggagtttgaacgctggctggaaagcatgggcattatggcaaacggtcgcctgaccaaacgggcgggcgatccgtcactgttcttctgatgacgcggagataacatatcatggatcaaaaacagattgaagaaattgtacgcagcgtgatggcgtcaatgggacaagcggcccccgcgccgtcagaagcaaagtgcgccaccaccaactgtgcggcaccggtgacctcggaaagctgtgcctttagagcacactgtccccatta

SEQ ID NO: 22015 - DNA, 778 bp, Arabidopsis thaliana
ggcatctgcatcttgagcggaaatggcacagtggctaacgtcaccctccgtcaaccctcgaccgctgccgtttcggggctcctggtggtgcggctgttttggctttacaagggaggtttgagattctttctttaaccggttctttcttgccaggaccggctccacctggttccaccggtttaacgatttacttagccggtggtcaaggtcaggttgttggaggaagcgtggtgggcccattgatggcagcaggtccggtgatgctgatcgccgccacgttctctaacgcgacttacgagagattgccattggaggaggaagaggcagcagagagaggcggtggtggaggcagcggaggagtggttccggggcagctcggaggcggaggttcgccactaagcagcggtgctggtggaggcgacggtaaccaaggacttccggtgtataatatgccgggaaatcttgtttctaatggtggcagtggtggaggaggacagatgagcggccaagaagcttatggttgggctcaagctaggtcaggattttaacgtgcgttaaaatggtttttaatttacagaagttaacaataagattataatgatgtttattatgatgatgaaaaccagtcagttgctacttgttactagtgagctatatagtttgtggacattatattatgttctctcttgactatgattattatttgctaaatttcacttagcttacttgtgtttttatgatgttttattaaaagtttttctctttgttggattctcca

SEQ ID NO: 22016 - DNA, 485 bp, Arabidopsis thaliana
ttggcaaatgtgaactctgtgttgcttgttggaggccgagaggtgaaagctgacatgaagattattgaagaagaaggatgcaatgtcttgattggtacacctggaagactttctgatattatggaacgaatggagattctggattttcgaaatcttgaggtacttttcttcaatcaaggatttgttttaagatagatgttgttgaatctatagcttggtgtggttatgttgtctaaacaacttaaaagtttagtttttttacttaaactgaatcgttttgcgtatgtagattcttattctagatgaggcagataggcttttggagatggggtccaaaggcaggtgaattacattatctcacgcttgccaaagcagaggaggactggcctcttttcagctacacaaacagagggcgttgaagagctcgccaaggctgggcttaggaaccctgtgagagttgaagttcgagctaagtcgaagtcgga

SEQ ID NO: 22017 - DNA, 552 bp, Arabidopsis thaliana
aattatgatggtgtaataagagaacaataataaattcttcaaacaaaaaatatcctcgaatttaaaatcttccaacgcaactaaaatttgaaaacaaaaactgactgttttagtctgaaacacacataagtaaaggcgtgagacaaacaagctggaaaggtgatttactctgcatcttcatgtcatcaccagtcaccagatgctccgtttaatgccttcactctctcgatcaacttgttcttcctctcttcgtacgtcagtttcttcaagtcgtacctgttttgtttgatatcacaatcaatcaagaaccaagtgagacacaccaatcacaacaagaagattaaaggcagtaatgattatttgttttacctcttgtgtccttggtagctggtttctcggttttcttatggttgggttctgctcggatagctgcgtgaaccttcttgtacatctcctcgatgctctcagcttcaactcctttcttaatgtaagcactgaagagagtttgtaactctctggctcatattccccaacagcttcatgtagtttgag

SEQ ID NO: 22018 - DNA, 903 bp, Arabidopsis thaliana
tcatctacggaggcagaatatcgagctgttgcaaacaccgcctcggaactacgttggctctgctctcttcttttggaaatgggcatatcacaaaccacagtcccggtcatttactgcgacaacattggcgccacatatctatgcgcgaacccggtgtttcattctcgtatgaaacatgtggctcttgattatcactttgtcagaggttacattcaatccggagcattgcgagtttctcatgtttcgactaaggatcagctagctgacgccttaaccaaacccttaccacgtccacgttttacggagctcaatagcaagattggagttcaagaattacctccatcttgagggggtgtataaggagttgtatatattaaggatataattgtcattagtagttgtgtataccctagactaagtactatatatgttgtaacacattcatcataataagacaattcactctcttatcacagattttacaagatgaaccccaaaatcagaaaacccaataattcatcttcgaagaaggtcacagtttccgttctctctgttttcttagtgttcgtcttcgttaatactttcttctacccaagtttttactctgactctggctcaattcgacgcaatctcgttgattctcgagaaagtttccattttccgggaaattttcgtaaaacgaaggtttacatgtacgaattgccgacgaattttacttacggagttatcgagcaacacggcggagaaaaatctgatgacgtcaccgggttgaaatatccgggtcatcagcatatgcatgagtggtatctttactcggatcttacccgacccgaagttaaacgagtcgggtctccgattgtaagggtttttgacccggctgaagcggatttgtcttacgtctct

SEQ ID NO: 22019 - DNA, 781 bp, Arabidopsis thaliana
tcatacccagtttcgttaggtttgatgtttgaccttaacatttgaattttgaatgtcaaaaattatagatgaggtctggtttctaagttcccccactcagaaagtaatgatttttttggtacttttcctttgtttgtcttggtttagtaactttttgtcttttagggtttacaaaagattgaagctttatgttctcttcttttgattttccaacacttatctcttgttctgtgaagggttgcagagaacaatggggtttatctctaggaatgtgtttccggcatgcgagagtatgtgcatttgctgtcctgctctcaggtcgagatctcgtcagcctgtcaagcgttacaagaaattgctcggcgagatcttccctaaatcccctgtaagtgtctccttttagctcattccttaaagtttccacttttagcttgtaatttgttattatctttgcttctgagtaactatttcactgtaacaacttaaaatgccaacgtgagattgatttgtgaagttgaaaacatgcttcggtatatattaaacttattttcatgaattttctgtaggatggtggaccaaatgagagaaagattgtcaaattgtgtgagtatgctgcaaagaacccaatccgtatccctaaggtatagttttggtatttgaatcttactagtaggtgaggagtagtcttgtgtgtgtaagtcagcatactgtgttgtatggctgtacagattgctaagttcatgaagagaggtgtacaaggacttcgatctgacagatgaag

SEQ ID NO: 22020 - DNA, 563 bp, Arabidopsis thaliana columbia
cgactctaatcccctcaaactcttgaattcctctgctttcattctccctagcagaaccatcctcaatgatttctcgtcgtttgacataactgagacggtccggtaagtaactgtagcggccatggtcaaggtaaagccgttgtgcccaaaacctaagtctattgcagccgttgagatctttggggctaagtcatcgcacaagtaactctcaaaggggtagccgactaatcgatcgtggagaagcgttcggatgtggtcgtgactagagctacggagattgatatcgatgagaaaaggtggtgaaacttgagtccggcggttttggcgaccggttgtttggtttcaataatgatctctacagatttggttttgaggcgtatgatgactgagtttggttctgatggagagagtttcctccgttggtgacgtgaacttccacttcaggacgagaactcatactcatgtttcgaaacgcaaagagaaaatccaaaaaaaataaaatcagaagaggtttcacagcgaagaagaaaattgtgatgagagcaaattgagagagaagagga

SEQ ID NO: 22021 - DNA, 618 bp, Arabidopsis thaliana
ctcaacacatccaccttctccgagtacacggtcatagactcggcctgcgtgctcaaggtggaccctctgtttcctctggagaagataagcctcctcagctgcggtgtctccactggtaattaaccatctctgtataatatatatgacatgcatgatgtgttttcttatttaatgaaagagataagtgtttatggaatgaaggagtcggtgcggcgtggaatgtggctgatattcaacctgcctccaccgtcgctatttttggacttggcgctgttggacttgccgtaagtccaggttcctctttgtttgtatggaattggtgacacatagacttaataatgccttgttaataattggggaaacaggtggctgaaggtgcaagagccagaggagcctctaaaatcattgggatcgacatcaaccctgacaagttccaactaggtatgcagatgaacatgcatgtcagtcttaaagtaggttaaagagcattgttactaaatgaagtgtgctttgctggatgaacaggcagagaagcagggattagtgaattcataaatcagaggagagtgacaaggcagttcatgagagagtaatggagatacagagggaagagtggag

SEQ ID NO: 22022 - DNA, 1333 bp, Arabidopsis thaliana
tgatttcagaggtaaccgtgacagaatatctgtttgtagatctctgaatgctctccgagtttgttactgtcaaatgtcaatgtttagaggtattcttttaagcaatgactagagctttactttaacaatgggccgagagatgtatctcttctcttagtgggctttagtagaaactggaccaaaaactacctaattcgaacaaaattttgctgtaggtctaaaaaataaagctggagtgagcaacaagcaagcggcggccgtcatggattcatcgccaccgaacactatcatcgaggaggcgccgcgcgtttctctgaactcaaacctccgctctcagaagatatcatcgaggcgcttgaccggtccggtttcgaggtctgcactccggttcaggccgagacgatccctttcctctgcagccacaaggatgttgtcgtcgacgcagccactggttctggaaaaaccctagctttcctccttcccttcatagagattatccgtcgatccaactcctaccctccgaagccacaccaggtaaggagaattagccgaatatcaagagtagtagcttatgctatatgttaacaatttcaatctcaggtaatgggggtgattatatcgccaactagagagctatcagcgcagatacataaggtggcagagccatttgtctcgactttgccaaatgtgaactctgtcctgcttgttggaggtcgagaggtggaagctgacatgaatactctcgaagaagaaggagccaatctcttgatcggcacccctggaaggctttcagatatgatgaaacgaatggagtttctggattttcgaaatctcgagattcttatcttagatgaggccgatagacttttggatatggggttccagaagcaggtcaattacattatatctcgcttgccaaagcaacgtaggactggcctcttttcagctacacaaacacaagctgttgcagacctagccaaggctggccttaggaatcctgtgagagttagatcgggagcttaggaacgttacggaagttagattgggagatgagtcaaagtcgaaaacgccttctggtctgtattgtgaggtattattattgtaaggtcaatatttatatacgtatatgtgtttcgggatagtaagtttatttcttcttcgtgcctctgcagtatttgaaatgcgaagcagatcaaaagtcatctcaactagtgcatctcctgatcgagaacaaaaataaaaagcttgtcgtgtaagttttgtcacaacgtacttatcaaattaagcatccttttacagatagtctaactagtatctcttctgcagattcttc

SEQ ID NO: 22023 - DNA, 1326 bp, Arabidopsis thaliana
ggatcccataaaagactcattaccgcatattgaagcacgtggctatgaagctcgagaatatagcgatggcggttatgtactatacaaggaaacatgttcctctgatgaatagacaagtaaacatggatgagcaagtgattgagacaccaaatccttctgaagaagaccaaaaaacttgtcttgaagagattgtcgggttgcttccaagcaagaaaggtgtaaacccgaccaagtttcttctcaggctgcttcaaactgcaatggtgcttcacgcaagccaatcctcgagggagaatctggagagacgaattggaaatcagttagaccaagctgctctagttgatcttcttataccaaacatgggatactctgaaacgctttacgatgttgaatgcgtcttgagaatgatcgaacagtttgtttcgtcaacggaacaagcaggcattgtcccttctccttgcatcatcgaagaaggacatttggtgaaggatggagctgatttgctaactccaacaacgttagtggcaactcttgttgacggttatcttgctgaggtggcacccgatgtgaacctgaagctggcgaagttcgaagccattgctgctgcaatccctgactatgcaaggccactagatgatggagtttatcacgcaattgacgtgtacctgaaggtaataaagatactgtttctaattttaaccagtccatgtattaagattttgatgctggattgcaaattttgcaggcgcatccgtggattactgattcagagagagagcacatatgcagactcatgaattgccagaagctctcattggaagctagcacgcacgcggctcagaacgagaggctgcctcttagggtgattgttcaggttctcttcttcgaacagcttaggctcaggacatctgtatcaggctggttctttgtctctgagaatctagataaccccgataaccaacatggcgctaatggcggtttacttaaacccagaggtgagaacgtaagagaacgggtttctgagctggaaaaggagtgtatgaacatgaaacaagagctgcataagctggtgaggacgaagagaagctggaagaatttcaccaggaagcttaacttcaagaagaaatcagaatgctgcaagccaaaggatcaagcaacaccagcaatttgagcaaaatcctctgttttaaggcagagctactagtattatcttcccgcttagattagctttgtttttctggttcttgatgctactttgttttcaaaagttttcatctttctcttagtatccgctaagagttttgatgcttttaagataaaaacaag

SEQ ID NO: 22024 - DNA, 1209 bp, Arabidopsis thaliana
agctgagttctcagattggagccttgtttgaagaaccacagatttatcgtattgatcactatctgggaaaagagttagttcaaaacatggtaacacatatttgcttctagtcattagtttattaatttagacaaataaagatataatctaacgcattcatcgttagtgcagttggttcttcggtttgccaatcgcttgtttttgccactatggaaccgcgacaatattgcaaacgtacaggtgagagtttgatcgcttagcacaaatatttctaaacttttgtatagagttgaatccatccacataaatctctaatttctttttgcagatcgttttcagagaagattttggaactgaaggtcgcggtggatattttgatgaatacgggtaagcttttctcagtgtttcatttgaatatgatatacatgagacagaagtatcattgcattctgatgacttgtatatataatcttctatttttcagaatcattcgtgatattattcaaaaccacttgctccaggcaagtgtttacatttgaaatatttgtctgttgtgaagaaaaacatgaaatttccttgttgaaagccacctccatatgacatttttccttgtttttccttgcttgtaactgcagatacttttatgtattaactaagtttagtgtaccacaggttctttgccttgtcgccatggagaaaccaatctctcttaaacccgagcacatccgggatgagaaagtgaaggtgattacagttttcttgatcacatctttagtttcaaacttttgtagaatcaagtgatatcttcatttgcattttcagccaattaatattaataacaactgactgatttcttaaatgaacttcaggttcttcaatctgtgattcccataaaagatgaagaggtggttcttggacaatatgaaggatatagagatgatccaactgttccaaatgactcaaacactccaacgtttgccacaacaattcttcgcattaacaatgaaagatgggaaggtactgtgtgcatgtgtcccttcactcttcatcttttcattttctagatcaagtttggaacatcatgtgccaaaatccctttttagttgtagtggttagtacttgtgtattgatgtactctcaggtgtccttttatactgaagccggaaaggaatgagtcacagaaggagatatcgcatcagttaaagatgt

SEQ ID NO: 22025 - DNA, 344 bp, Arabidopsis thaliana columbia
gtgacccacgttgttcaatcaatagatgaaacatggcattcgtgttaagccgatagtttcggaccggagactagactctcgagacagatggaacaccgctctgtttcgatcttcaaactcttcaattcctctgcttttattttcccgactagaattgtcctcaatgatttctcgtcgtttgacgtaacggagacggtccggtaagtaactttagcgtccatggtcaaggtaaagccgttgcgtccaaaacctaagttgataaactccgttgagatctttggggataagaaatcgctcaaggaacgccaagggttgctgaatgcggataggcattgattgaggag

SEQ ID NO: 22026 - DNA, 909 bp, Arabidopsis thaliana
ctgcagaaggagataataaagacactgcagaaggacttcatgtgagaggtgaaacaaatcacattgaagaagacacgtaggaatcatgatttgatttcagagcaacagcttgatgtgaagggttctggttatattgttaaggatttaagagtttgcaaatgaacttaaaaccgacaagatttgtgacacaaaacttctctaattgagtaaaacccttaaaacaacaaattacattcaatgtcttcaactagttacagcatgtgacaaaaaactagaatttctaacttctattggaaaccttaatactaatccttacataaaaccctgatttcaatgttttcaatcgtagagctcagtccgacaaaggggacaagtgttcttacgcttgagccactctaaaagacagccattgtggaagacatgagaacaagtcatgcgtgtgatgtccctaggtttaggaccggagactagactctcgagacagatggaacacggctctgtttccatcttcaaactcttcaattcctctgtttttattctccctagcagaaccatcctcaatgatctctcgttgtctgacgtaacggagacggtcaggtaagtaactgtagcgtccacggtcaaggtaaagccgttgcgcccaaaacctaagtctattgcagccgttgagatctctgtggctaagtcatcgcacaagtaactccaaaaggggtatccgactaatcgatcgtggagaagcgttcggatgtggtcgtgactagaactacagagattgatattgatgagaaaaggttctgaaacctgagtccggcgggtttggcgacaggttgtttggcttcaatgatctctcagatatgtttcgacgcttatgatgactggtttaagtttgagtttggtctgatggagaga

SEQ ID NO: 22027 - DNA, 703 bp, Arabidopsis thaliana
ccaaaattcgcaccaagaagaagaagaagtgatcgaaacgttaccactgagtgtacatgtcgaggacaacaatcttatcaccggcggctttaacaattggccagaacgtgtccttatcaacctccgtcacctggccaacagtgacattcactgtttctaagctacacctcaccacacaggaaccaatccttctaccggaatctaaaacaccaccaccaccagaacagaatccaattttcgtcgcgacgcccgaattcgggatccggcagtgctgcttcacgggggaaaatcctccggcgccggtagatgtaatcggagaataacggaaagacgtcggagatggagcaagtcggagagagagaggcattgttgaagaagaagctcgagtccaaaaaacagtagtgtgatctttcaaaggaacctgggagacttttgatttccaaattttaattcgagtgttgttttcgttatccgtgaaatattgtagattttcttaccgtgaggtcaataataccctcaaatggataacgaagaaagaagacatttggggatgtttacgtattttcgggttcgatggacgcgaggttcagaattatcggagtgtaaaatgacgatcatacccccacaatgtaaggccaagaattgacgattagtcgattacgattagcaatctgcacactcattttcttttggtttaaactta

SEQ ID NO: 22028 - DNA, 879 bp, Arabidopsis thaliana columbia
tctctcaatctccgttcaaccattgccaatatgtggtgacgtcctctctctcttgtcccgtctctctctctgtatacaatttttcttttgcgtatctatctatatatgcatgtgatacattcgtatataactatatatgacctaagatcataagctgaaaatttagtaagagttgacctagctagctcaacatgtaagcatttttcttgcatatatatctatatacaagcttacacgtacttatgaacaaaaatagcaataataatttaatatatggttaaaagtgatgcatttatgtaaagatcaaaaatatatattatacaatggtttatacggaaccttgcaggttggggaaatcaaatgatatgcaacaagaagtaccatttcgtgatcccctcaaaggaaacaatggcggcttttttaaaactggaaggtggaggctacgcttttcccgaaaaggaaagtttctcccatcttgtggagcttcaaggccatgtccttcacggcttctttcactccaacggatttggtcacttgctctctctcaacggcattgaaaccggctccgacttaaccggtcatcaggtcatggatttgtgggaccggctctgcaccggtttaaaggccaggtactaattagactttatatatttgtatatcatataaaccattcaacacaataaccattcaacacaattctgttagttttcatatcataatggattattcctagctattaatttggatttacacataatgagtcattttatttttgttcatataggaaaatagggttgaatgacgcgtcgcacaaaaaaggaatggagttgaggctgctgcatggggtagcaaaaggagagccatggttcggtcgttggg

SEQ ID NO: 22029 - DNA, 492 bp, Arabidopsis thaliana
cccaccagttcaatgtagggtagctcttccaaaactactatcttgatctcttggatttctcatatccttttcttttgcattttctgttggtttgttcatctgagaagtatactttttcaggaagttgaggtcaatggaaatgctgggaaatctgctgcagaacgtcaacttgtactggccaatcactttatactatatatgcaaacagttttaacaagtaactctgttaatctgattttctctgccggtgcaggagaatgttgatactctcatcgactgtgttaaggaaaacattggtttcagtaatgggaaacctattgctgcatttacaatatacaagtgtcttcttcactggaagtgctttgaatcagagaagactagtgcgtttgatcgtcttattgagatgattggtccgcgattgaggtaaattggggtgcattttgtgccattatgaagatactgatatgtcccaaaatgaggcatcttatgtat

SEQ ID NO: 22030 - DNA, 1961 bp, Arabidopsis thaliana
cacctacctactcttggaagatctcagtcagagaactccaagtacctgagacaccaagaatgacacccagcagcaggatccccacgtctaaagctcgttgcttccactccatttcgtctttgaagaccatcagatgaaacaaagaaggcaacacaaagcccaacgcacaacagacgctgctgccaaccaatgacaaaaaatcagcaaagtttggcaccaagagagccaccaaagtcactgccaagacgagcagccatctgagccagacgcagtacattccactccagaaacgtctctccacaatctcaaacacagggttcatcatcaagggaaaggtgaagaaaaggttgatacagagccccagctgcacaagactgctcaccactcctgcccctaagttagctgtgattatatccattgtatcatccccaaaagccatgtagcctaacacaccaaaagatccatacatcactgcaatgaatagcatgctgagtgccaacactttgccaaacttgtccttatccttagtctcggattcaagaggcaaaaccattccaaccccttcaaaggcgtaaacagccactcccataccatagaagaacacagacatgccaccaaaggcgacaacttgaggcctttgcaccaccgtaatcttgatgtcctccacaatcaccaccgccattgcacccaaatcgaccacatcagcaaatatgctcagaggagccaagtgagtgagtgtcttaatagaattcaaacccagctgaaacggaaaacatccccatatgtagagactcttaggagacacacccattaaatgcctcagactcatcaaagtcgtactcttggttggcttagagagattagctaaagtattaccgatgaagataaggtatccaacacaaaacccagcctgagacaaaataataagaatgtcgacgacgaacctcccgagattgccgcaggcagcgaaaccaaggtccccaaaagatccgatattggagacaccaagcttgcgacggatatgaacaagaagcatcatgcaatggttgatcaaagcagcgacggaaaagagcgtaagcaaacccatgagccatccggttcgtttgaaggcgtaaggaagaccaaggacaccagcaccaacgatagcaatgaagacattagcgaaagtcttgaacttgctcgacaatggtcttcctttaccaagaagaggtgtgtcttctctcgcccttccttgttcctccaaacccatctctatacctgattagagatgggctctggagatcaaaaaaattcaatgcaatcggagatctaagatagccagagtgaagatagacgatcctgcggcatttgctctctattactccttggaatgctattaaaaggccaaacctttccatcatttttgctattaagatgagattgtggcttattgtggaatgcattacgatgtacatgttgcatcgtattatacgaatacttgaggaacacaaacaaacatggtaggaaaatttagagtgataatatatcagccaaactattaacaactttattcatttttataagccaccactttatacacgattaataatgtgaaaagtttatcaaattaatcaaatctcccaccctcttattatcaactctcaagatataatatccacacaaaaaaaatgtcaaaagtgtgccactggatccttccttattatcaaatggttagattctcttgtatggctatgaatgatccgacaatgttacctccgacgtccgggaacgtctcactcccgggaagtggtcggacttttccttttcgatcaacttccactggatactttaataaatgtcctctcatgtctgagacttcttcagctgcaaactgtttccagttcctctctcccattgttctcactttccttacacactctatactctctggctgtgtgaacagtcatctaatgttgccatat

SEQ ID NO: 22031 - DNA, 600 bp, Arabidopsis thaliana
gtcctcattctgtttgtagaatttggaaaatggccaccaaacgaacttggaaaaggagttcaatgtatatatcctccaaccagctatctcgatcacttggttctcatgacgttctttttgtttgcatttttccattagtttattaatctgtaaagtctatttttccaggaagccgagtttacaacaccagttgatggcaaggctgggaaatctgctgcagaacgtcaaattgtatgtagtccaactacgtcatagtacttcacactgctgttagttgataattctgctaacttgatttgtattgtcactgcagatgaatgttgatgctctcattgactgtgtaaaagacaacatcggtttcagtaatggaaaacctgtggctgcatttacaatttacaagtgtctacttcactggaagtgtttcgaatctgagaagactaatgtgtttgatcgtctgattcagatgattggtccgcgattgaggtaattgggaatcttcacactgtttcaatgtaggatttcacgcatgatggaattacctcattttgtgtgtagtggctgtgcatctgcttatctgaaatatggactatgaaagattta

SEQ ID NO: 22032 - DNA, 2077 bp, Arabidopsis thaliana
cttttgcagactcccccaattgcgtgtttttgtctctgcagtgtctgaggctgagggagggtttccaacagcttctggctgagaacgggagcggtgaattcccggtgaagaccatggtggaggaggtgatgaccaatactgtcaaggacgaagaaaccgagctacctcacgttttcacaccagagacggaataccatctcagctccatcttcgtcgacatgcagagaccaactgtaaccttccttttttagagtacattgattgtttgtttaacactttccataaatattcagtctcactcatggagatacaggggcgttatgggaccagaagcatctctgcgatcatcgtcaagtcccatggagatggtggtggtgatggtgagatttgcttctacgagaggcatcttgaagaaggcgattcatggaaggaacacactcaacagtttgtaataatacaaaaccaaagcatttgattagctagccaggcttatttcgcgagcttcccttgcttgtaacattgagaaatcaaaactctcacatatgttgtacatgtaaacacaaaacagaagacagagctgatctcttttattccaaaccatcaaaatacaaatacaatcacagttactcttaaaaccacaaccaattccatatacataattgcacacaaggagagaaaaacctctccaatctctgacttcacggacgctcacactttgacagagaagatctcactcagggaactccaagttcccgacacagcaagaaccacacctagtaccacaatcgctgtgtctgaactccattgcagccaccccatctcttccttgaacaccaataaatgaaacaatgcaggtaacacaaagcctaacacacagcaagtgctgctgccaaccaatgacaaaaaatctgcaaagtttggcacaaaaagagccaccagagtcactgctaagacgagtacccatctgagccacgcagagtacatcccgcgtgagaaacgcctctccactatctcaaacactggattcatcatcaaggggaaggtgaagaagaggttgatgcacagtccaagctggacaacagtgctgacaagtcctgcccccaagttagcagtgataatgtccatggtgtcctcaccaaaagccaagtaacctaagataccaaatgcgatgtatatgagagagatgaatcccatgccgagagccaagactttgccaaacttgtccttgtccttcatctccgattcaagaggcaagaccattccaacgccttcgaaggaatagacagcgacgcccataccatacaagaagagggacataccaccaaaggcaaccacgtcaggcctttgcttgagtataatcatggaatcctcaacaatgaccacagccatagcgccaagatcaacaatatcggcgaagatgctgagaggagccaagtgagtgagcgtcttgatcgaattcaaaccgagctgaaagggaaagcatccccatatgtagagactcttagaagacacgcccaggaattcagaacccagccttgtaaactgatgcctcagactggtgggcgattcaggatcggatagattagctaaagtagtgccgatgaagataagatatccgacacaaaaaccagcttgagacagaatgataaataagtcaacgacgatcctccccaaggagccgcagacggcgaatccaaggtcaccaaaagagccgatcttggagatgccagcattgaaagagtcgagcttgcggcgggtatagacaagaagcatcatacagtgatgggtcaaaacagagacggagacgaggaggaggacacccatgagccatccggttcgcttgaaggcgtaaggaagaccaagaacaccagcgccgacgacagcgatgaagacgttggcgaaggtcttaaactggctggagaggggaggtccttgccgagaagaggcgagtcctctctggccggtggaggtattttaagggtataagaggaggagctagcttcgttctgaaaacccatctgatgattatcgaccgaatctcagaaatcgaagaagatagggatggatattggcgaat

SEQ ID NO: 22033 - DNA, 459 bp, Arabidopsis thaliana
tactaatgcttgaaactcgctctctagtgaactatttgtaattgatcctatcaccagccctgctcccagataagttcctctgtcgtctcgcattattcagcccgctgtgcttggcaaatctttgatataagtggcatcatagttgcattttagtccagtgatcatcgctgacatgttatggcgtaattgctgcgggaacctttgtaagcttctgaatatgatcttctgcgtcttgccattcctttgcatcctgcaacatctcacacaagtggagtcattagttatgtgtcggtatttcagcgttgcacctgtaggtagagcattggagagtaggcaccaaaagaagtgtttgatttttggtgcggttttgattttccagtgagcttgttttaattcaacatttccagggggaggaagcacttgttcgccttcctgagcatgtgttgccagccaataccc

SEQ ID NO: 22034 - DNA, 710 bp, Arabidopsis thaliana
tacccttttagcccctacgttaaagtttgtttatttaaatacaagtccttgtgatttttatcactttctcacttcttcaacgacactgattcgttttcaaagcatttgcgttcttgatctttttcacgagggcgatttctgaagaacacgagaatttgaattctgggaaaagctttctcgaactttatctgagtaaattgacagagagaatcgaaaaagaaaatgtgtccctgcgtagagcgtcgtgctccacctggagtttactatactccgccgccggcgagaacaagtgatcatgtggcggcgatgccgatgacggagaggaggagaccaccgtattcttgttcttcgtcgtcggagagacgtgatccgtttcacattgttcataaagttccttctggtgattctccttacgtcagagccaaacacgcgcaggtataatcaattttcccgcgaaaacaagacaggggaatttttcttttgacctaatttaggaattctagattcttcctcatgtgataaaatctcttagaagcttttcaaattttgagtgatcttcttgaacctgtctatgattgaggttttctaacaaatggatattgtttatgtggaagaacagttgatagataaagatccgaacagagctatatcattgttttggactgcaataaacgctggagatcgagttgatagtgccttgaaggatatgg

SEQ ID NO: 22035 - DNA, 627 bp, Arabidopsis thaliana
cgatcaaaatatccatgtctcacttctttcccctaagtttttcattggttacttaaggtccaactatataaagacttttttactctcttctcttcttcagagaaaattcaaaaagaatctccaattttctcgggaaaatttctccattagtctcttctcttttccggcttggaatcgctttgcttcttaatctttaacaaacacgttccatagaaccccaaaaatttgatcatcggaaacattttctcggggaagtaaagaagattttcccgagaaaagaagattctcactatgcggcgtcgtgagagccgtggtgctaagggaggaggtttcttgactccaccaccgtcatggcacacgacgagaagagtttacattgcgatgccgatttcggagaggaaaagatcacctttgatcgagaatcaagaatcgtttagggttcgtactggtgattctccttacgtcagagccaaacatgctcaggtaatatcaatatagggtttttagtgaattgtattggtttatgtgtatgaacgtttgttcttgacatggaattgttttcaataacagttggtttctaaagacccgaatcgagctatctcgttgttttgggcggcgattaatgct

SEQ ID NO: 22036 - DNA, 1318 bp, Arabidopsis thaliana
  unsure (1)..(1318): unsure at all n locations
tagttattcttatgttagattagcggattatggtgggaagatggcggttttgtgggacaagttacctactactggcaataataacatggtgatttggtgtgcggtaatcacacttgaaaagcgccacaatgaaaacatttgggggagggttgagtggtttgatgctgtgcttacagtccctgagccttatgaattcgtgtgtgctcgttccgctaatgtttgatgaattgttgactcggtagtgaatcttgcaaatgtttaagctttgcttgttttgtgatgcgagactataaccaaatgtttcacactgtttttgttgaacaggttggggtgttcacattcgtagcaaggacggtaaaaagatgtgtactctggaagagagtttggtcgtgtagttacgagaaattttttgttttatttcgcttcgtttgcaaaggctttgctttgcttgcttgcttattacaatcttataaaccaaatgattatggcttttatgtgtgttttcatttaatattatcacaccaaaagaagataaacgcttattacagtattttgtgaaaaaaataaaaaaaattatcacatgctttttttcacacgcttatcacatgctttttttctttcacaaaactttattctgttatatacatacatgttaagagttaagaatgagacattctatccatggtcgcatcgtatcaagttgcattagtgcctcagtcttgaaagaaagcatgtgatgaaatcaaataatgatatgaggcccattgagatatataatggcttttgagaccaacttataaattgggcctagaagtgttaattagcccttataagatttgtggaaattctcacgcgaaattttagcggttaaagcacacgcgcttcggtagtgaagtgaagtcaaaacccctaacttttgtcctctgctgtcggaaaagaatacagaggttgatcgacgcctatactcgccaatgtcgtccccggaaaagaagaggaagacgacgaagaagccatcgccgacgccgcaatcgacaaccccaaatccttcacttccagatgatttagtagtgagctgcttagcacgcgtctcgagattgtattacccaactctctccttagtctccaagagcttccgctccttgattgcttcaccagatctctacaagacccgatctctgttaggtcgcactgagagttgtctctatgtgtgttacaggagaaagattctgaccctaacctcgttggtcactctctgtctgaaantaatcgaacttaccaatgatacactgagaagaagaaagaagagagaagaagaaga

SEQ ID NO: 22037 - DNA, 817 bp, Arabidopsis thaliana
gacattggagacaccaccataggagctcctcctctttgtctgattccttgtccagcaagaaaccaaaaagccatgagaacaaccaccaccacatgtcccataagtcaaaaccaaaaccgaagatgaaaactcagccgccaaaatccaacgacggttcacctgttgtgtcacagccaccacaagttcaacaaccaccaccaccacatgtccaaccaccaccaacacctcttccgctgcagccagttgaggactctcaacaattcaatgtgcttgattttggagctaagggtgatggaatgagtgatgacactcaggtacagactcaaaagattcataatccgttacaaaattcaatctagttgttcttgactaatcaagaattttaatctcgctttcatgagaattgtttctaaaaaataaccataatgtgaattacagttgagaaggtaacacgagacagaacaagaaacagagcataaaaaaagttttctctctgttctgtaaagtcataacttttttcttttttcctctcaatgttttaattaaattccccaataaactaacaaacgagcatagagagaaataacaacaaaaatacccgatttaagagtggaccatattctctgtttttttcctccgtaattgtgttttagtcttaaaccaaacaatgacgagtggtaacaattctgcaggcgtttgaagctgcatgggcatctgcctgcaaagtcgaggcctcaacgatgatcataccgcctgactacatcttcctcgttggcccgatttcattctcgggtccttattgtcaagcaaacattgt

SEQ ID NO: 22038 - DNA, 1013 bp, Arabidopsis thaliana
cttaccagcatatcgtgatccatacctctggaacaatgatctaacgactggtgtttgtttcgcatctggtggatctggacttgatccaatcactgcaagaacaacagtaaatttttcttagtttgtccaaaagattataacaacttttattttatctatagcaaattttaatagattatattttggtgtgattagggaagtatatgggtgtcagaccaggtcacagacttccaaaactacatcaccagactaaatggtgtagtaggaaatcaagaacaagcaaatgcagttatatcaaatgctgtttacctaatctccgcaggaaataatgatattgctatcacttattttactacgggggctagaagattacaatacactcttccagcctacaatgatcaattggtctcttggactcgtgatctcataaaggtacaaagttagattgttttacatatatataggacatagtaagagattaaaattttggtcaaattgtatgtgacatattctattgttccccctttttttttgttatttgaagagtttatatgatatgggtgcaagaaaatttgccgttatgggaacattaccgctaggttgtttaccaggagcaagagccttaacgagagcatgtgaattatttgtaaatcaaggagctgctatgttcaaccaacaattatctgccgacattgacaatcttggtgcaacatttccgggtgccaaattcgtgtacgtagatatgtacaatcctcttttgggtctcatcattaaccctcaagcttcaggtaataacatgattcataattcaagaagaatactcatgtgtatatatatacgttacatttacaattatattttccaaaaatgtagggttcattgatgtagctgatgcgtgttgttgtcgccaacgcacttaataccgtgcttggatgcgtctcgttacgtgttttgggatgtagcccatccgcccagaagtcatacgaaaccatcgctccacagattattgaaaa

SEQ ID NO: 22039 - DNA, 631 bp, Arabidopsis thaliana
taatcaaccggaagaagtagtgatgctccaagtaacgaacacatcaggaagaatctaattctgcacatagttcaaagaatctgataatcgtgtttatatgcgagataagaccaaatcttccttacccgaatttgaagagcctgatgaggacgagagcatcaaggccgtggcggctgaggatctcgtcctcggggacacggaaggcgcgtgggatccacgcaacggaaggaaggaaacgagggaggcaaagggatgagtgtagagacagaggacggtggtggtggcgatcggagaggcggcgagcatagtatacgacggcgttacggggctgcttcttgaggacggagaagagccagagtgcaacgacggcgagtcctatgttgatcgacgccgacgctaacaagctttctggcgtcatattttttcttttctctgactatgggaaacagagtcacatgatgtcatgtcatgtggcccttcttgtgctgcatgtaaacagaaagcctccacgccgcaattgtctccttgtttttttattacactcgaccaaaatagcagtgtgataattgaatttttgcatctccctgaaaaggaaatttctagtactactaaatttgtgttacacaaaatg

SEQ ID NO: 22040 - DNA, 784 bp, Arabidopsis thaliana
ttcatcatcttaagatttctagatttctataaatatgcatgtacgagtatgtcacacacgaaaagagtactcgcgcatacaaatagcctctgaatttagaaaagttctctctctctttatcaactgaaattggttcttttgtctggaatttaggcaagacgggttcacaagtgaaatcagcgtgggcggccgtttggcttataatgttatcattgggacttgcagctgctggtgcatacctcgtttacaaatatagattgagggtaagctttttattcatccttctgctatttctgttagaagcaaaagattaatgttttatgttttggttgcctgagatgtctcttaaaacattgttttatgtaacccgatatcgtcttggaattgtatcgattacttgggaaaattgttatgaacttgctatgttcatggatttacagcaatacatggactcagagatcagagccataatggcacagtacatgccattggacagccaacccgagatcccgaaccacgtgaatgatgaacgcgcctgagaaagcaaaacagtccatctatttattccccgggaaggacccaaggtgacacgttcttttaactgatgtggcccttaacgacgatgttttctcgcctctgtatctttgtaactcttttttttttttttaccattacagtgtatttgcatacaaaagaggttcgagtgactttgtgcttttttttctcacttgtgtccatgggacttctgtaataggaaaactctgatgtaagtagcttcggggga

SEQ ID NO: 22041 - DNA, 847 bp, Arabidopsis thaliana
cctaacacttactcacctatttcatatatccacacaacatttacacaatacccttattctccacgtagaatcaagagtacttcttttccttaaatctctacaaaaaaaaaatcgatctatatactaagagatcataaatatagattcatagacctatttaagaaacgacttaagaagctgttggatcatataccatataaaatagcaatggatatgataacgaagatggtgatggagagaccggtggtgatttacagcaagagctcttgctgtatgtctcacacgatcaagactttgctctgcgatttcggagcaaatccagcggtttacgagctggatgagatatctagagggagggagatcgagcaggcgttgttgcggctcgggtgtagccccgcagttccgggcgttttcattggtggagagttggtcggtggagccaacgaggtcatgagtctacatcttaacggatccttgattcccatgcttaagcgggctggtgcattgtgggtttgacttatcatgtttttaactagtttacttaacactaagttaagtacgcagaataattttaacacatctatgatcttggcatggtgatatgatgagtccacgtcggatcaataatcagtgtgttgtctttctttttttggttgtcttactttaagatatgtatcgactgatacgaacttctatgaaataaaaatatattgacctgcataaactaatatactaaatgaagaaaaataagattgcaaactaataatacttttttggagggctcggacaaaacattacgaaaaatcaatatttgactttacacaacagcaaaaacttgaaactagta

SEQ ID NO: 22042 - DNA, 679 bp, Arabidopsis thaliana
ttcaaactcaacccttactcaggatccctatgaaatggaatgctgctgctattttgctactatgtattcaacatttagccgggcactcccttagtgtcgatgatttacacaggtggcttcaagttataaaagccgcaattacaacagcctggtcaagtccgttgatgcttgctttggagaaggcaatgagtggaaaggaatcaagggggcctgcttgtacttttgaatttgatggtgaaagctctgggttacttggtcccggagaaagtcgttggccctttaccaatggctacgcatttgcaacatggatctatattgaatcatttgctgacacattaaatgctgcaactgcggcacgtgcaattgctgctgccgcagcagccaagtcagggaaaacatccgcaatgtcagctgcagcggctgcgagtgcgcttgctggtgaaggcactgctcatatgccacgtttgttcagctttttgtccgctgataatcagggaatagaagcatatttccacgctcaatttctggtggttgagagtggtagtgggaaaggaagaaagtcttcgctgcattttactcatgcatttaacctcaatgttggtattttattggtcttgagcatactgcaagcaaggctttctggggaaacagagagtgaactcgattatatattgatgga

SEQ ID NO: 22043 - DNA, 970 bp, Arabidopsis thaliana
tataaccggctctcgggcccattggaaagagcatcatcctaagctctctaccaggtttgaccaagcttatagccttggagaacatttgatttcgatcttgacgctttaaattacctctacaagtgtttgctttcctgtttaacattctgggtgcaatcgagcggagatgatggcttgttgcttgcgaaataaacggcgcatgaaaggtaaactctcatggaagtcaaagaagagagatttgtctcattcaggaaactgggcaccagaagatgacaatgatgaagggaaaatcgttttctttggaggaagtaactatacctttgatttggatgatttgttagctgcatctgcagaaattttggggaaaggcgctcatgttacaacctacaaagtagctgtggaagacacagccacggtagtagtgaagagattggaggaggtggttgttgggagaagagagtttgagcaacaaatggagatcgttggtagaatcaggcatgataatgtagccgagcttaaagcctactactattccaagatcgataagctcgctgtttacagttattacagtcaaggaaacctatttgagatgctgcacggtaagctatctttctgtattccgttgtctatgcttctttggtatgcagtatcgaaaaccaataactcaacttttgcaggagagagccaagtacctttagattgggagtcccgtttaagaatcgccattggtgcagcaagagggttggctataatccacgaagcagacgacgggaagtttgtccacggtaacatcaaatcctccaatatcttcacgaactcgcaatgctacggctgcatctgcgatctcggcctaacacacatcacgcaatctctcccgcagactaccttacgttcttcgggttaccacgcagctgagatcacagatgcaagacagtccacacagttctctgatgtatacagcttcggggtg

SEQ ID NO: 22044 - DNA, 1162 bp, Arabidopsis thaliana
cttgtcagcaccaagcacaaacaaaatcacagatggcccgctatgaagatgagttagcaagaaaaaggatgcaggcatgcgattctacatatactttttatttatttatttaacattgggaaattttattctctccaacaacttatgctgtgtatcttgttacaggctgagaatgaagcccagaggacaagaaaccaagaacttgtgaaaatgcaagaagaatcagcaattaggcgggaagtagctcgacgagctactgaggaagagattcaagcccagagacgacagacagagagggagaaagctgagattgaacgtgagacaatcagggtcaaagctatggcagaagctgaagggagagctcgtgaatcaaagctttctgaggatgtcaacaggagaatgcttgttgatcgtgcaaatgcagaaagagagaaatgggtttctgccatcaatactaccttcgatcatattggaggtcagacattagtgataaacagtatctctctatcgttttttttcattcattgtagaagctttcctgtggcagtttaccctggtagtaattagagtctagaagtatttataataggcatgtgactctcttaaatacttctatgactacacttttaaataaatgattgactctttacccgttttcctaggggggttgcgtaccattctaacagatcaaaataagctaattgttgctgttggaggtctaaccgctcttgcagctgggatctacacaacgaggtaaagactaaaaatggttgagaaaaagtgccactcatgagttcttgtcgttaaaggttgaggaactcagtcatcttatagattgcttgttgcagagaaggtgccaaggttatctggagctacgtagatagaatattaggacaaccttctctaattagagaatcatcgagaggaaagtacccttggtctggttctgcttctcgtgtcttgtccacattgcggggtggtggtaaggagtctacttccaaaactggaaaagggtttggtgatgttatcttgcgccctgctcttgaaaagagaatcgaacagctagctaatgcaactgccaacacaaaagcccaccaagcacctttccgaaatatacttttctacgggccaccaggaacagggaagacaatggctgcccgag

SEQ ID NO: 22045 - DNA, 664 bp, Arabidopsis thaliana
agcaaagaaaaaaacggacctgaagtctagtcttgacgacccaaagaggatttgtggcaatggtagttgcagctccagctcccgaagcagccaatacgttagctccaacgctgagtttgtgatctaattacaaatagagaagaaggtttgagttaaaggatcgcagaaaccgccacttaagcagctattaacaaggttttgagttgaaaagcacaaaccatttgaacaaagaaagctcttgagctggtcatacattgtaaaataaatctgcaaaagtccaataagacttattgaataagtagaataagtacaaagccgaattaaagaagatagatagctccaagaagaagaagtgaaaactcacggcccaattggagagaagagccatgacagtaggggaaagaccgcggtataagccacgcatcccttctctcttgaagatctgctcaagactgccaacaattagactacctgatcaaaaaccagatacgatgacatcagcaacggaatccaatttctgagaagatttaaagggaaagaaaaaggacaaacctttgatgtttgcatcaccgagcttaggcagcccatgaacctgaaacctcgtttttataacatcaagaggcacacaaacgtagccgaacaacccatatcagaaagtttgaac

SEQ ID NO: 22046 - DNA, 546 bp, Arabidopsis thaliana columbia
ctggttcgcgcatctctgatttcccggcagtggttaagcgtgttgtatccggccacacgcgtctgtaatggctgttgtggcggctgagagagctggtttgataggggagactagagggcaaggttcacttccagctctggagaacatttcgtttgggcaattgcaagcgttatctactgtacctgctgattctcttgatcttgagaggagtgatggatcgtcttcggcttatgttatctctccaccacctattatggatggagaaggagttgttaaacggtttggggatctggttcatgtcttgcctatgcattcaggtgtgttttttcttcctcttgatacgcgcatttatgttagaggttaggctttatgcagcatcagcttttgctggttggtagtattgtagtatatatcttgtgattggaatgagaattagtcaaaacaggtttgtatgccggtatctccttaacgtataagttcttatcttccttttgtctagtgcctggttcttagtttacattaatctgaacgcgactcaatttcata

SEQ ID NO: 22047 - DNA, 722 bp, Arabidopsis thaliana
  unsure (1)..(722): unsure at all n locations
ctaaagcaccccggttagacggtagcgatccgtacgaagagatgattccgaaatggcgtcactcaacgtgttcgaaggtgaacgtgtagaacgtggtgacgtaatttccgactgtccggaagcgccgcacgacattctgcgtctgcgtggtgtgcatgctgttactcgttacatcgttaacgaagtacaggacgtataccgtctgcagggcgttaagattaacgataaacacatcgaagttatcgttcgtcagatgctgcgtaaagctaccatcgttaacgcgggtagctccgacttcctggaaggcgaacaggttgaatactctcgcgtcaagatcgcaaaccgcgaactggaagcgaacggcaaagtgggtgcaacttactcccgcgatctgctgggtatcaccaaagcgtctctggcaaccgagtccttcatctccgcggcatcgttccaggagaccactcgcgtgctgaccgaagcagccgttgcgggcaaacgcgacgaactgcgcggcctgaaagagaacgttatcgtgggtcgtctgatcccggcaggtaccggttacgcgtaccaccaggatcgtatgcgtcgccgtgctgcgggtgaagctccggctgcaccgcaggtacntgcagaagacgcatctgccagcctggcagaactgctgaacgcaggtctgggcggttctgataacgagtaatcgttaatccgcaaataacgta

SEQ ID NO: 22048 - DNA, 859 bp, Arabidopsis thaliana
catcgaaagtatcgcctcctcctccgacgttattattgttcctcatcgatgcttctccacggttggttcctctctccggttgctcctatccaaaacacaaattaggtttaagtataaaaagataagtattagtagtagaggaagacgacgtcgtacgagggctagagagaggccagaagaagcgtaaacagatttcgttagaggaggagagaagagactagcagccgctgccgcttgagccatagcaccaccgggtaagacgttagttgcggcggtgtggttgccataacttaaaccggagagaagtcttgctccggtagagccaccaccgggtgtgttatcgaagagactaccgaagttcatcaaataaatacaagagaagaaactaaccagatttgacaaacaactagagaattaaaagattgatacttttcacgaaaagatggatcgagaactgaatcacacagaaacaacaaaagagggaagaagaagaaacccagaaaaattaaagaggaaggagtgtttattactgaaatggaggagagagaaagagaacgaaagcggaaatttgattcaacttctctctcatttgctcttcgttctcagtctctctctctctcttaaaaatcaatggggttttttttttggtgtgtgtgtctctctctcttattgtctttcagagagtgatgtggggaagaagaagatgatgaaaatgggtaaaccctagttttggggtaactgatgagagaagaagagtctaatattcacacttgcatgttgatattgactctctttttcccccttttcttttattttcttgtacttttttgtatattttaattttgagattttaaagaca

SEQ ID NO: 22049 - DNA, 1184 bp, Arabidopsis thaliana
ctgacgtcgaggggaccgaggaagagaaggcggtcgcttccgaggaagaggacgtcattgagatgatttctagtccgacaaacagcacaaggcggactaaccggtaggggcaagggaaaaggaaaaggaaaatggagcaagctaacgggaccttgcaccgcaagcaaccccatcgataaatgctggcgttgccagcctgattgggccagacgtcgcaagaagctcgttcactgtgtccgtgggtttggttacaggaccaccggaggcaaacgcggccgcatctatgtagtcacgagccccagagacgatgatatggtgaaccctagacctggaacactacgtcacgctgtgatccagaaagaacctctatggatcgtttttaagcacgatatgagcattcggttaagccaagagctgatgattactagtgacaagacaatcgatgctcgtggcgctaacgtgcacatcgcatatggtgctggtatcacgatgcagtacgtgcacaatatcatcatccatgggcttcacgtccaccacatcgtgaaaagcagtggtggtttgataagagattcgattaaccactttgggcatagaggagaggctgatggagatggtatctctatctttggggcaacaaacatttggcttgaccacatttctatgtctaaatgccaagatggacttatcgacgctataatgggttccaccgcaatcaccatctctaactctcatttcacccaccacaacgatgtgagcattccacaacgtaattaactcgaccgttatactattaatgacaacccaagttaaccaaaggatcttgttatgtttttgggttctgtctttaggtgatgttgcttggtgcacaaaacaacaacatggatgacaagaagatgcaagtcacagtggcttacaaccatttcggaaaaggacttgtgcagaggatgcctagggtccgatggggtttcgtccacgttgtcaacaatgactacactcattgggagctttacgcgatcggtggtagccaaggtcctaccattctcagccatggaaaccgtttcatcgctcctcctcacaaacaacactacagagaggtccaaaatgatttgagtgtgccatatatatatggcacaaatcaaagtactaatagaaacatgtgtagatataggtgacaagagggatta

SEQ ID NO: 22050 - DNA, 621 bp, Arabidopsis thaliana
ccaaattccagtttagttaattaagtatacaattcaaatctagtaaatctctacaaacgtggatgataatataatcattgtttgacctacagggtggctggtgatgttgccggaccactcatctagtggttggaaggaaaactcgaatcagctcttttgcagtaacctttttcctacaagtagggcatttgccctggcgagatattgccatctttatacatcccttgcagaagatgtgaccgcacttggttgacatctcctccgtaaagggacacatgcagattggacatgtaaactttggctcttctggtggaggagctggagcctttgatctagacactctctacacaagataaaagaaattgtgagcttagactaaatcgcataactgcacagtacatgattccagaaattcacatctctcttaccgaagacatgttgacttcatcatttacagaggcatgctcacagtcgatgacagattcactagaaggaatccttctgcgtttgttgcttatgttggcagggaatctagtcgtacctcctgcaaacacaaagtaaaatccatccatcaaactctctgtctctccctactacttgagacatgacattgaaccagaa

SEQ ID NO: 22051 - DNA, 922 bp, Arabidopsis thaliana
tacataggtttccttaacaaaatctcgatacaattttgcattatatattaagaaatattgatgattggacaggtagccacattcatgtatgccgccctgggctaggccggaaccctaaaatatggaaagatccattagcatacgaaccggagcgtcacctccaaggagacggaatcacaaaagaggttactctggtcgaaacagagatgcgttttgtctcatttagcactggtagacgtggctgcgtcggtgtcaaagtcgggacaattatgatggctatgatgttggctaggtttcttcaaggttttaactggaaactccatcgagatttcggaccgttaagcctcgaggaagatgatgcatcattgcttatggctaagcctcttcttttgtctgttgagccacgcttggcatcaaacctttatccaaaattccgtccttaaaaacaagacgccttgttttttctctgtgatgtgtttcgacgctttgtcgtttctgtattacttgacgtactgttgtttttagactatccattgcccgaaaacgctatattgttaaaatcgtgtgtcttgtttactcttttgtatctccgtaacttaatcatgaatatcaatcaataccatatgaggttaatgattaccgtgtttaattgaaatggtgtgaagaattaggttaactataccatatgaggttaatgattaccgtgtttataaattgaaatggcgtgaagaattagactacatgacaccaacaagaatgttttcctttatcaggataaacgtgttcacctacccaaggtattatttatttattcaaataatagatattggttatgtttcgcacacacacaacaacaacaaaaattagatgtagaaatatttcactggaattcacctttcaatgttttattgatgaaattgat

SEQ ID NO: 22052 - DNA, 832 bp, Arabidopsis thaliana columbia
aagcagcagtattttcatcagctgtaagtcccttgagaaggttccgttccatcagcttctttttatccaaaccagtggcttgaattccatcgatttttgtatccactttactacttgcatttgaagtatcccttgtaaccgtaacagtcaagtctctaactgtctcggaatagagaacttcggagtcttcttcagccagtactggctcagccattactttctgaacagccttgatggctctgaaagtcgcgacatcaacaaagaggttgtgaagaagaaacacttttctgtctctgacttgtctctcctctgctgttttgcaaggcatagatgcgataaaggcgaattcgttggaccatggaaccaagtcgtagctgccatctctcccttgaccaccaccatcccctccccatctctcatcctcaacagggagaggcggaaacgctgctggtgactgcgccgcagtaggcgggatgagccatgtgttagctctaaacccatatggaagatttccaaactgcaaataaatgaaatactcattaactgcacccaattcaaacatccactaaatcctcattcagatagagaaatataccttattgcgctccgaaaatgctttcagaagatcactgtaagcctaagcatgataaaagaataagattaacaatcacgttcaacacaaaatccagtaacaaataagaacatatgacttacattatcgaaggctctactgatttgtctaagcaaatcaacaagattgtgacatattattctttgtttcccaatgctgtaaaatccttttctgcaaccttcaatatgaacgagcttccca

SEQ ID NO: 22053 - DNA, 979 bp, Arabidopsis thaliana
tcacatcccaataacagcttgaaacctaataacgacattacctcggtgtaggctcttcttgagcaaataagtgcctcacaataccatgaaaactataattcccatcacctaataattaacacataaaaccacattaacaaaatcactaaattaatgcatacacctcaattagtatgtgctcttcaaaaagataattgttaaacttattaccaaattaagagcaattaatgacgtaagtaattaaatctgcaaatagttttcattaagcgctatgaacaaaaattagatagtgaagactaaaatggcgacggacctgggtggatatggtcggagtggccgcctctagcgttgatcgacgggaggaaaaagcagatcacagtcgaaattaggagactttggaagaatctgagcttgctcatctctaatgaaacacagatctctccttctcgttctcacttccttgctgattgattcgttaaagcaataccgggatttctgatttccaccattgttgggataggtgaaaggtacaatggggagggaaggaagaagggacattagagagtcagagatcgttgaccaaaacttgggctttagacagttacaaatattgggtcatagcctcgtgagttattggaactagtgggcctaatttaaattcgcttttagcccgttaaatgttagtaactcgattggcacataaataatgaaggagtgcatggtattggatgaagttaattaagatgaagcgacgttcttatttatcagatagttttacgcattcgacaacccaaccacaagtgcatgaactagataaaaacagagttgacaaaggaaaggtcgagatttatggttatttagctcatggaaatagcttcccgtatgccttcttccagaacggacatgaaactttgggtgtgtctggctgaaccattggaacgaatctctccttgtgttccagttaagacactcatctgac

SEQ ID NO: 22054 - DNA, 499 bp, Arabidopsis thaliana
tagtaaataatacgattaacagaaaaaaaaaaaggcaggctcagggctcacatagtcccagcaactttggtgctgatgtgtgttttctcctcttcgtcaagcctagccaatccgaaatcagatatcttgggagttaagtccttgtccaataaaatatttgtggccttgatgtctctatgtacaaacttcaacggtgattcctcatggagaaacgcgagaccctttgcgatcccgcagcaaatcttaaacctagtaggccagtccattggtatctgtttatgctttggacctaaacattgcaacaaaaacacattttacttagagccgaagcatcaaaaagccttcattagcaaaaggtgggaaataagaaaaaaaactcactgaataacgcgctagataaactgttattttccatgtattcgtacgccagtaatagctgagcccgctcgacgcagaaaccatgaagcttgacgagatttggatgttgaagacaagaaat

SEQ ID NO: 22055 - DNA, 1505 bp, Arabidopsis thaliana
agaaatagagaaagataactagttccaagaattaaaaaaattcaattgaaaatttgtgaattatcaatcattataggtggtatgaaaaaaaatagagaaagataaaaagaactcaattcatcgtctttggcatctgcactatctcaggagtcagaattaacgtaacttattaattgaaaaactctttaagaaattaatcataaaaaaaaataatacataaaaaaaataactctattatctaacttcagtcaaaacatataactttttttgaatgaatatgtaaaaatttgaaaataagttgtttgattctttttttttattgaccttagaacctagaatacgcctctttctactttattaaaattgaatttactaaaatttaaactcattagattaaattaaatagtagagcagttttcttcatttaatctatcgaatgagactaaaaagaaaagaggtatcctacacggagaacgagattagtaaaaaaaaagatttatttattttaactagattttaaacgataactagatttttaaaacttgtaattagcaatttctattatcgtttcctttcgaggttttaggtttttttctttcgagattatatagaaaatagagtgaaaaacccatcacccttgtagttagttaaagaaagaaaaaaacctttgaattgtgaattgaatacaacaaaacaatgcacgcattacaaatatttagtctttttttattatttttatttgttgttctttttaattgatccaatccaatccaaaactattgttctttttcttgtttctgcaaattaattccttaaaatgaaacaaaaagtaaaaggggggatcacattatcataaaaaaatctattctacaattatgcatatgcaatgaaaatgaaatttataaatttttcattcaattaacttgggaccatatgaaaatttgcttcatgaattattagaattagaaaccaacttcttggattttcattttatctaatctttagtttattttctagtccaaaacgaataaaggatcaaagcccctatagattacagtaatttgaaaaagtgggacacggttatacatcgacaagcaagaaaaaaagaaattatgtaacaccccatttctatactaattcaaattgcgttgctgtgtcagaagaaggatagctatactgattcggtagactctaaaaatacccttggtactttattgacgatctcacaaagatgcaatctcagtgaattttaatttacttattcatcttttacagaatcgattccctacgagaatatctggagttcagtatgtctggaagcacaggagaacgttcttttgctgatattattaccagtattcgatactgggtcattcatagcattactataccttccctattcattgcgggctggttattcgtcagcaccggtttagcttacgatgtgttcgggagccctcgtccaaacgagtattttacagagagccgacaaggattccattaat

SEQ ID NO: 22056 - DNA, 662 bp, Arabidopsis thaliana
ccacaatctcctctctctatgttcaatgcagctagaacaattggccgtcctcccttttcgcttttggattcggactttgctagacgtgtatttgatagcgatcctcttatgccacgccctccgtttgttagtcatcctagagaggttaggcagatacctatagaggttaaggatagcagtgggccatctggacgatctagtgatgctcctactattgaagatgtgacagaaacagctcatgttcagggtccagtaactacccaaggaactgttattattgatgaagagagtgatgatgatattccttttgcaccaatgggacgaagtaggcaagacagacctgctggttctgtagccaataataataatcaagattacaatgatatagaagaagaaatgatcagagctgccattgaggcctcaaagaaagaggctgaggtaagcttctgtaagaaaattggctgtattggggttttgtcttagtgaagtagcaaatttatgaggttttttatattttcttatagggatcaagtaaccctttacttgaagagaggccacttcacatggaagatgatgatgacatagcaatagctgttacaatgtcattgaaggtctgtggttgtctctctcttgtatgtttgctgccatctgtctttgatcac

SEQ ID NO: 22057 - DNA, 551 bp, Arabidopsis thaliana columbia
ggtgaagctagaatactatacattgtccaaactatatcttgtgttaagacgaccctcttgaaaatccttcttcgaggcctcaatggcagctctgatcatttcttcctctgcatcgttactatggacgggtgagtcagcatccctatgtgtcccaccatggacctgggatccatagcttggtgaatgcctagcataaccgtctccaaccgctccaagtccaggaggacgagtgtgatcatttccccaggtagagtgagcagggaacccagtgacttctccagtgtgagatgatggagaaggacttccagagagagcagagccactgagctgcctaaggatattccgtctgtaattgggatctagaagcaaagacggtctaaaagcccgagcagccgagagtatagatggaagtgcgccagggactggcctagactcgttaactggcctagtctcgctaccacgaacgtgattgttatcttccacaacattgtagtctgaacgagtgtctaagcttgagtcatcataactggaaggacaatccaaaagagaaa

SEQ ID NO: 22058 - DNA, 731 bp, Arabidopsis thaliana
gggtgcggccgaggaagaatcggctcaggagattcatttaccagctgatatcaattgggagatgcttgataaatccaagtttttcgttttaggcgctgctttgttttcaggggtatctggagctctttatcctgcggttttgatgaaaactcggcaacaagtgtgtcattcgcaaggttcttgtattaaaactgcgtttactcttgtgagacatgaaggtttaaggggattgtacagaggatttggaacttctttgatgggaactatccctgctcgtgctttgtacatgactgccttggaggttactaagagtaacgtaggctctgctgctgtcagcttggggttgacagaggctaaagctgctgctgttgctaatgcggttggaggtttgagtgctgcgatggctgcacagcttgtttggactcctgttgatgtggttagccaaaggttatggttcaaggaagtgctggtcttgttaatgcatcaaggtgtaattatgttaacgggtttgatgcatttagaaagatcgttcgcgctgatggaccgaagggtttatacagagggtttgggatatcgattctgacttatgcgccgtctaatgctgtttggtgggcgtcttactctgttgcacagcggatggtttggggtggaattgggtgttatgtctgtaagaaagacgaagaaagcgggaacaatagtaccacgatgaaaccagattctaaaacgataat

SEQ ID NO: 22059 - DNA, 594 bp, Arabidopsis thaliana
ctaaagaggaagccatcgccagcggtcaggtgcagatgattgtcggtacacacgccatcttccaggaacaggtgcagtttaacggcctggcgctggtgattatcgacgaacagcatcgttttggcgtgcatcagcgtctggcattgtgggagaaaggccagcagcagggcttccatccgcatcagttgatcatgaccgccacgccgatcccccgcacgctggcaatgactgcgtatgccgatctcgatacctcggtgatagatgagctgccgccagcgcgcacgccagtgactacggtcgctattcctgatacccgccgtaccgacatcattgaccgcgtgcaccacgcctgcataactgaaggtcgtcaggcatactgggtttgtacgttgattgaagagtcggaattgctggaagcgcaggcggcggaactacctgggaagagttgaaactggcgctaccagagttgaacgttggcctggtacacgggcggatgaaacctgccgagaaacaggcggtgatggcgtcgttttaacaaggtgagctacacctgctggttgccacaacggttattgaagtcggcgttgatgtgct

SEQ ID NO: 22060 - DNA, 940 bp, Arabidopsis thaliana
ctgcatcagctcctgaagagattgtgtttgttgtctccgtaatcaaaccattccaatctcgtaatctcttagcttctgtgcatttgttgagatgtgtctgtaccgttttcgcctttgcaatgtcttcacgatcagcttcgggacccgaatgtttgaaatgatatatcgatttctccacttctcctaacctatcgaaatttgtgagattcttaataacgttttttaagaaaaagtaataattgtgaggttttgagattacctgaggtacaagttacccaacctatgatgtgctctgtggtaatgaggctcaattctgattgcttctctgcattcaaaaaccgcgtcaaggattctccctagggcggtcaaagccgcgctcttgttgctacggtaagcagctttgtttggatcaattgcaatggctgcatcatacaatgctaaagcctctgcgaaattcccattcttgtaatcttcattccccatgatcttcaaagtttccggatccattcttgttgagattgctctacacaaagatcctgattgatcttgactctttgttgtcgtcgccgttgcagcccccattgtcgtcctcttcacgccatatccattgttattaccgtaatttacacccgcagttacaggtccagtctgattcaaattgccaagattaccatataacattatattgctagaagatgcacgaaccaatccattggttccttttgctttctgatgatccgtgatcatgctttcaagctcacccgataaaccaatggcttctcttggcactttcctctgtcctcctcctcctcgatatggatcacactattactattgttgttaaactacttcgttggtgattccgtaagccctaattgatggttattagggactgatttacgagggtttgatggactacggactctggttgtgatttggt

SEQ ID NO: 22061 - DNA, 1370 bp, Arabidopsis thaliana
cacttcgatgctatggttaaggaagttgactctcttgagattaacaaaacatgggatattgtcgatttaccagctggaaaagtggctattgggagtcaatgggtctacaaagcataatacaatgccgatggttctattgaacgttacaaggcttgtcttgtcgttcttgggaacaaacaggtagcaggcgaggactacaatgaaacttttgctcctgttgtcaaaatgacaacggtccgtactcttctttgccttgttgctgcaaatcaatgggaggtgttccaaatggatgtcaacaatgcttttcttcacggcgatcttgaagaagaggtttacatgcagctgcctccgggatttcgtcattctcaccctaacaaagtggctcgacttcgcaaatcgttatatggtctgaagcaagctcctcgttgttggttcaaaaagctttccgattcattgctcaagtttgggtttgttcagtcctatgatgattactctctcttctcctacactaaagaaaacattgagctgcgtgtgttgatttatgttgatgatcttctcatttgtgggaatgacggttacatgatacaaaaattcaaggactatttgagtcgttgcttctctatgaaagatttgggcaagctcaaatattttcttggtattgaagttagtcggggtcctgatggaatttttttgtcacaacgcaagtatgcgtctgacattgtctccgacaatgggcttcttggtactaaaccggctgcaactccgttggaacaaaatcataggcttgcaagtgatgatggtccgctccttgctgatccaaagccatatcgtcgcttagttgtgccgtttgatttacctcactcatacacgccctgatttgtgctattcagttcatgttttatctcagttcatgcagactcctagggaggctcattgggacgcggcacttcgtgtggttcgtttcttacaaggtacttcgggacaaggaatattgctttctgcaaactctgatcttaccctcacagttttttgtgactcggattgggcgtcttgtcctttgactaggcgttcccttagtgcatttgttgtattacttggcggttctcccatttcatggaaaaccaagaaacaagacacagtttctcactcttccgcagaagcagaatatcgtgctatggccgctgcacttcgagagattaaatggcttcgtcggttgttaaaagaattaggcatcgaacagcatgcacccactcgtcttttctgcgatacgaaggctgccattcacattgctgctaatccggtgtttcacgaacgcaccaaacacatcgaatcagattgtcactcggttcgggatacggttcgtgatggta

SEQ ID NO: 22062 - DNA, 1346 bp, Arabidopsis thaliana
tgttctgttagatgctgatttcaatggtagactcggtgattttgggttggctcggttgtatgatcacggctcggatcctcagaccactcacgttgttggaacattgggttacttagcacctgaacattcccggactggacgtgccactaccacgactgatgtctatgcgtttggtgcgtttcttttagaagttgtttccggtagacgacccatcgagttccatagtgcaagcgatgatacgttcttgcttgtggaatgggttttcagtttgtggctcagaggtaacataatggaagcgaaagatccgaagctcggttcttcaggttatgatcttgaagaggttgaaatggtattgaaactcggtctgttgtgttcgcattcagaccctcgggctagaccaagtatgaggcaggtcttacaatatctaagaggagacatggcactgcctgaattaacgcccttggatttgtcggcggggagcgtgatgaatctgggaggccgggacggttttagcggtattgcaatgactgatttttccactgtgtttaaagggtttaccggcggatcttccattgctgactctctactctccggtgggaggtgatgtttgatgttccaactctagcaatgttttatgtttatagtttttttaaaaaaggtttactaatacggatcatgtacatacatttttgcctttgtatggaatatataattgagttttttgtgatatcttataagaatttatagagtatgaagattatgattgcgatagtggattcagtatcaagaacagtctcgcaagtattattcatgacttaaacataataacggtacactatgatattggcaaagtgaacggagaagttgtagaacttgaagtccatgagtgtagatttgtattacagaaacagaacacagataatctctttaatagcgtcttgttgtcgctcagatatacataaacaagagctagagaaattctaaagcaaagctgatttgttgataactgcaaaatctaataatttggttgaacgagatcacggtgcaggaccaagaagaagtggaaccggggattcactcgtttcatcatgtcgtcttgcagcccaagcccttagaggaggttcaaagcggtccctaaccacatcaggagccagctcgtcgtcagaagggaggtagaccagacctctttctcttagaagggacggttcatcataacacacggtccaaagactatccactagctgtctttcttctctagctgcacaaagatcttcgtccgacatcacaattattcgtcttgttctctcctcaagaagctgtcttagattcacatccctctatcaagg

SEQ ID NO: 22063 - DNA, 452 bp, Arabidopsis thaliana
tctagtaacgaggatccccaaggaatgagatgcagggacattatttcgtggagtaccattattggagggtactgtcaagccggttttggagaagaaggttttaagtatttctcatggatgagacaatcagggacaaaaccaacagattttgctcttgctagtttgctgagtgtttcaggaaacatggcagttattgagggaggcaggcaagttcacgcgcttgctctttgttttggtttagaacagaactccacggttcgtagtagtctgattaatatgtactcgaaatgtggaagtatcaaagaagcttcaatgatattcggagaaacagatagagatgatattgtttcgctgacagctatgatcaatggatatgcagaacatggaaagagccaagaagctattgatctgtttgagaagagtctaaaggttggtttcagacccgactctgt

SEQ ID NO: 22064 - DNA, 639 bp, Arabidopsis thaliana
atcctgattctaatgttgttatttctttccttgctggatatttcaggacagtttcttcgctagttttgctcttggatggctcatcaccaatggtgcgggtcttgcgtcgtacccgattgacacggttagaagaagaatgatgatgacatcaggtgaagcggtgaagtacaagagctcatttgatgcgttctcacagatcgtgaagaaggaaggagccaagtctctgttcaagggtgcgggtgccaacatcctgcgtgccgttgcaggtgctggtgtgcttgctggctacgacaagctgcagttaatcgtcttcggcaagaagtatggatctggaggtgcctaagtaccaccaaatcccgcagtcattaagcttcggcttttgtttttttctccattttttttgcagtttcagatttcttttataaaaaagatgttgatgaaatcatttccccataaaattagagaggagcaaggggaaatattatctgttcgacgataaggtttttgttatatggaataaattttgtatgggagggagatttgactcctcgaaccaggctatgttttatatggtgaggatgtcctttttattttgttgctacggttgttgcggaaggaaacgcactatgttattgaaga

SEQ ID NO: 22065 - DNA, 484 bp, Arabidopsis thaliana
cctacatgtagtcatatcttgtgtttctttcatacacattcatgaggaaagaatataagatgcaatgagaaacactctacttacctaacagctttgagcaccgcaccaatgtaagcatctaagtactcaatccttggtgtgtccttttgttgcagctccaaatcttggttcattgttttacctattcagttgcattggcaagataattgagtagacaacaacaacaacaacaacaacaacaacaacaacaacaacaatggagagatcgagagatatagagaaagagagagaccattctcaagaatgtagactggaggattgccatagctctgctttatatactctaggatgccttccatagcccatggagaaacaacagacttgtccaaacaaaaacaaacgccacaactagtaaaaatggattgggaatacttaaagttataaagaatattaggcacttttcatctgaatttggtagcttgaa

SEQ ID NO: 22066 - DNA, 667 bp, Arabidopsis thaliana
atttagcatttatttttaatttttttttcttaaaaagttttcaactctttttttctttttgatttttttctatacatactaaattaaaatgacgttttgaaatataaccagattttggatcccaccatttaaccgtaatcattagcgattccacaaattcaacatgtttttgtacaaatgcgtcatcattactcgagaaaccggtcgagaacattgtccgtatctcgaatcaggtgttcacattatttcgtggagcacgattactcgagggtactctcaggcactcagccaggtttaggagaagaagtttttacgtatttctcatggatgagacaagcagggtcaaaaccaaatcctgctcttactagtttgctgagtgtttcaggaaccatggcagttcttgagcaaggcaggcaagttcatgcgcttgctctttatcttagtttagaacagaactctactattcgtagtgctctgattaatatgtactcaaaatgtggaagtatcgaagaagcttcaaagtattcgcagaaatagacagagatgatattgtttctttgatcaatggatatgcagaacatggaaagacctaaaaagctatagatctgtttgagaagagtctgaaggttgtctcagacccgactctgtaactttcatcagcattctc

SEQ ID NO: 22067 - DNA, 1152 bp, Arabidopsis thaliana
  unsure (1)..(1152): unsure at all n locations
attgtggttgctctgcttgcttcttttatgatttgctctgtttccgccaattttcaacgagacgtagagataacttggggagacggacgtggacagatcacaaacaacggcgatcttcttacactctctctcgacaaagcttcaggctcaggattccaatccaagaacgaatatttgttcggtaaaatcgacatgcagatcaaactcgttgccggaaactccgctggaactgtcaccgcttactatgtaagtccatttcctttagtgttttcttaaagttcacatattaagagtgattaggctaaatgttttttttgtttggttctacagttgaaatcccctggatctacatgggacgagattgactttgagttcttgggaaacctaagtggtgatccttacacacttcatactaatgtctttacgcaaggaaaaggcgatagagaacaacaattcaaactctggttcgatcccactagtgatttccacacttactctatcctctggaacccacaacgcatcatgtaagtccaaaattataaaaaataaatcacacttactcttttgaatctaatcttgtttgttttttctatctattcagattctccgtggatggaactcccataagagaattcaagaacatggaatctcaaggaactctgtttcctaagaaccagccaatgagaatgtactctagtctatggaacgctgaagaatgggccacaaggggtggtctcgtcaaaaccgactggtctaaagctcccttcactgcttcctaccgcggcttcaacgaagaagcttgcgtcgtgatcaacggccagtcttcatgccctaacgtgtcaggacaagggagtactggttcgtggttgtctcaggagctagactcgacgggtcaagaacagatgagatgggtacagaataactacatgatttacaattactgtacggacgctaaaaggttcctcaaggtcttcacgcgagtgcttagctgcgtaaagcttttaaacaaatgatccaaagccatgaaaagtaatactattctttgattcatcttataaagtatctgatgtttggttacactgttttttatttattctatgtaagtatatttgtattcgaatattgacaatcactttacanaataaacatttg

SEQ ID NO: 22068 - DNA, 553 bp, Arabidopsis thaliana
ctcttttcaatggaggtccttgcgagctcttcattatccccaatttcttttactaagcctaacaaaataaaccctaatttctcaatccaggtacttttctttcgtatagttgactcctttttaagtttctctcctgcaattccccaatttgtgtccgtttagctgtgtaatagaattttcaacctttgcaggtgaaattgtgggtaaaacaacctccaaagatttcaaaagctagcaaatttagttatgctcgtagtcgtagtaacatttcaaggagcaatgcagcaaacccaggagtcgtgttcgtctgtaatagatttctgtgtgttatcgaaagaaatgatcagaggaaattatctgggaaggttatgatgaaatcgtctgttaatttcagacagaatctctctgttgcattagttcggatcgtttctgttctgcttgtctcagccatttctgttgtaccactgattcacaccatcatgtaagttctgttttttttacatgtgagaaccatataaattcggggaatgcatttgattcatttgtgtggctt

SEQ ID NO: 22069 - DNA, 538 bp, Arabidopsis thaliana
cctacccgaagaccccgagattgatgaactaatgagtaactttgaattccttgaagaatatatgccagaaagcccagtttttggagatgcaactacactagagaacaacaacaacaacaacaacaacaacaacaacaacaacaacaacaacaacaacaacaacacaaatggtagacatatggataagcttatagaagaattgggtcttctcacatcagaaacagaacactagtaaaggattatgtttagtatccattgtaaagtctttctctactaacattatcgttaggactcagtagtacggttgcaactttgtgcagaaatctttccttggataatagaagagttgtatttattattaaaaagaaaatgccattttttctaatttattgtagaaagtgactactttgtccaatcatatttgtagtcctttttcgataagaaaaacagagttggaatttcccggggaagctcttttcaatggaggtccttgcgagcgtctcattaccccaatttcttttactaagcctaacaaaat

SEQ ID NO: 22070 - DNA, 498 bp, Arabidopsis thaliana columbia
gtctaagatcaggagctgaaatgccaaattaggtggaacatataacattctttagaagtagaaatcaacttctgagcttacaacatatcttaaaaagtctcctgaaacattattcttaaacaaaagtcttccactagtagcatattgttctctagatagatagatactttattaagaagataaaaaacatcttcttgcttaatccatggataggcgtgggacacaaaaatcaacaaggtaatctgttcgctttatgcccgtgtgtgtgccatccggagagtataactgaaaccacctgctcatagccactttcagaaatatgaacttcttgtaccataccttcacagttccaatagacttcccttggatcttctcgactccaacgatgatggcatctctaagtccgacatagctggctggctcacctgacgtgccacagtaaatgccctaccacacaaaaacacaaatattatagatcaaatgtctctctctctctcg

SEQ ID NO: 22071 - DNA, 566 bp, Arabidopsis thaliana
gttccaaaaatggcctgaaaatctataatcgaacccgattagacccgaaccaaaacagaacagatatttttgatttatccgattgggtcctaaacttctctatccgaagacccgtacctgatctggttttactcaaacccgaccacatacccccatctttagtattctaactttttcaggctcctagttctccaacttgtaaatatgcgtccgtctttctcttttcccacctctgtgccacttctatatatgcatctccccatgattcaagggatagtgataagatgtttttcgaccaaaaggatcaaaatttaatcggcagcgtcccatggttgattgttgactccaatgtttactttgttccatctttatggtttaatccaactttccaaaccgaactaacgaagctgtttccgcaaaaagaaaccgtctttcaccacttggctcggtatctttcatatcgtcacttggtactaccatgatcacttatccaaagcagatgagagactcgggattcaaattcgagtttttttgcgatcaaggtggatactaccacacgtcatggc

SEQ ID NO: 22072 - DNA, 630 bp, Arabidopsis thaliana
tggttttacttcgatttgtggaagaagacctgagatggaagatgctgtttcgactataccaagattccttcaatcttcctctggttcgatgttagatggtcggtttgatcctcaatccgccgctcatttcttccgtgtttacgacggccatggcggttctcaggtaaaagattggatcttttgattagggttgtttacagtttgcagaatctgatttggttgttgttgtgtaggtagcgaactattgtagagagaggatgcatttggctttggcggaggagatagctaaggagaaaccgatgctctgcgatggtgatacgtggctggagaagtggaagaaagctcttttcaactcgttcctgagagttgactcggagattgagtcagttgcgccggagacggttgggtcaacgtcggtggttgccgttgttttcccgtctcacatcttcgtcgctaactgcggtgactctagagccgttctttgccgcggcaaaactgcacttccattatccgttgaccataaagtaagcatatatagactcaagatctatagttggattggttgtgaacttgtgataggtttttagttttcaagatgttgagttagagaggtttatgaaaccatttctg

SEQ ID NO: 22073 - DNA, 517 bp, Arabidopsis thaliana
tagaggatcgcgatgagaattataatgcaagcaaatcagatggtgaatgccgatacgttgtgtggctcgctgattacgggcttggaaaccgactactcactcttgcttctgtgttcctctacgctctcttgactgatagaatcattcttgttgacaaccgcaaggatattggtgatctcttatgcgagccatttccaggtacttcatggttgcttcctctcgactttccattgatgaaatatgctgatggataccacaagggatactctcgttgttacggaacaatgttggaaaatcattccatcaactcgacttcattcccgccacatctatatatgcataaccttcatgattcaagggatagtgataagatgttcttctgccaaaaggatcaaagtttgattgacaaagtcccttggttgatatttagagccaatgtttactttgttccatctttatggtttaatcaactttccaaaccgaactaacgaagctgtttccgcagaaagaaaccgtg

SEQ ID NO: 22074 - DNA, 578 bp, Arabidopsis thaliana
cgactaagtttctctattgcttctttgtaatattctgtatctggaccacaacgtttgtgaagcatctcatagcttctgagcttagagactagatattcagaaggcttgtacggggatggcttgcggtacaagaaatatttatgatacctactcaagcaagaaccttcatcaaaatccgcagttaaaagccctcctataagtttatccaccggtttttcggtttcctttatgtctactacaacacaatgaaaacataaaaccaaaatgaggattcattgacttaacaataccacacaagatatggataattttcttacctttggttgtagcatcaagaagtttgttgttaaagttgtttgagtatgatagtataaatagtaaggaaccaaaggagactgctatcagaactttcatctttagccccaaagtcttaacaattttgccggagatctgaaattcttgatacatgttgacttgagtttgattgtgagatggttcacaaagagagtacaactttcatatagcttcatttctatgtgtcaatcatagatcagttaaatagacttttgaatacttta

SEQ ID NO: 22075 - DNA, 626 bp, Arabidopsis thaliana
ctctattttcctttaaacatatctagtatcatgaggacttgtcatatatatattggtctaatgagtaaatgtcacataaaccaatttttactcttccctttattatctaatttagtgatgtaatcctgtgttggttgttgttgttgtgttcatgtagtcttacaacctcatctctccactatgtcattccaatgggtattggggcggctggaaggtatatgtgattcagttaaaacttattcaatttttgtttggaaatggtcagattagtcatactatttacccttggcagtatacgggtttcaaacgaattgggagcgggtaatcccgaggttgcgaggctggcagtgtttgccggtatattcctttggttcctagaggctaccatttgtagcacacttctcttcatttgtagagatatcttcggctacgcctttagcaatagcaaagaagttgtggactatgtcacagagctatcgcactttgctttgtatccatttttggttgatggattttctgcagtgcttggtggtaataaaatcaaacccattaactagcaaatcaaataaaagaatcgatctacgcgactcaaaatgtgttttgtttgttatgacttttgaaaaggg

SEQ ID NO: 22076 - DNA, 1780 bp, Arabidopsis thaliana
caaacgtacctatagttgttctcatatcgattctctggttttacatggacaaactctttgtttcacttggacaagatcctgacatctccaaggtagctggttcttacgcggtttgtcttataccggcattgttagctcaagcggtgcaacaacctttgactcggtttctccagactcagggtttggttcttcctcttctctactgtgccataaccacccttttgttccatataccagtttgtttgattctggtttacgcgtttggtcttggaagcaatggagccgccttggctattggtttgtcttactggtttaacgtcttgattcttgctttatatgtgagattttcaagttcttgcgagaagactcgcggctttgtgtctgatgatttcgtgttgagtgtcaagcagttttttcagtatggaataccatcagcagcaatgacaacgtaaaaacattcatcttcttcatcgttggtgcattcttttctttcttggcttgatttgttttttgtttctatatgcagcatagaatggtcgttgtttgagctccttatcttatcttcaggactcctcccaaacccgaaactcgagacctctgttctttccatttggtaatctatctttctctctggatctttgtctccctttttacatatatgtctagtatatatcaggagggattgtcttaaatatataggtctagacgtctagtgagtaaatattggttaattaaattagatatagtttatcgaattcatatagacagaattgttacgctttactgatgcaatatttttggttgttgttgtttttttaataatagtcttacaacatcatctctccactgtgtcattccaatgggtatcggggctgctggaaggtatgattccgataaaaccgactaaatatttgtttgggaattttcagactagtcacaatgtttactttggcagcacacggatttcaaacgaattgggagcgggaaatccggaggttgctaggctggcagtgtttgccggtatttcctttggttcctagaggctaccatttgtagcacacttctgttcacttgcaaaaatatttttggctacgcgttcagcaatagcaaagaagttgtggactatgtcacggagctatcttcgctgctttgtctttcatttatggtcgatggattttcttcagtgcttgatggtattaagatcaaacccttcaattagtgaatgataaaaaatcctatctcgcgactcaaatatgacttttatgaaaaaggggttgctaggggaagtgggtggcaaaatattggagcttgggcaaatgtggtggcttactatctcctaggagctcctgttggatttttcttaggattttggtgtcacatgaatggtaaagggctatggattggtgtggtggttgggtctacggcgcaagggatcatactagctatagtcactgcttgcatgagttgggaggagcaggttaatatcaatctgaaatatttatgactctttgttttccgtactgaggttgcttacatcttgaatttgcaggctgccaaggcaagacagagaatagttgtaagaacttcttcatttggcaatggacttgcttgaagggttctttattcccatttttgagacattataatctaagtcacattataatcttttttcttcaattttggcattgatacaatagagttgtttataaaaaaatatgataaaattttaaacttaactagtatcgtgtatctgttttacctttctgttattaagagtctg

SEQ ID NO: 22077 - DNA, 1021 bp, Arabidopsis thaliana
gcattggtttgaataattaaccatgggactttgtcgataaaactttgatccttttggcagaagaacagcttatcactatccctagaatcatggatgttatggagatatagatgtggcggaattgaagtcgagttgatggcatgattttccaacattgtaccgtaacaacgagggtattccttattgtagccataagcataagtataattcagcattggaaagtcaagcggaagaaccatgaagtacctggaaatggctcacataagagatcactaacatccttgcggttgtcaacaagaatgattctctcagtcaagatagcgtagagaaacacggaagcaagagtaattaatctgtttccaagcccgtccctagctagccatacaatgtatctgcattcaccatttgattcgcttgcatagtactcatcacgactaagcttctctgttgcttctttgtaagccttggtatccggaccgcaacgtttgtgaagcatctcatagcttctaagctcagagacgagatattccgaaggcatgtatggagaaggcttgcggtacaagaaatatttatgatacctactcaagcaagaaccttcatcaaaatccgcagttaaaagccctcctataagtttatccaccggtctttcggattcctttatatctataacaagaaaatgatatgaactgaggattcattgggttaacaataaaacacaagatatggataattttcttacctttggttgtagcatcaagaagttggtcgttgaagtattttgagaatgatagtataattagtaagcaaccaaagacgaccgcgatcagaattttcatcttcaaccccaaagcctttgttggagatatgaaatttgtgttagttgttgactttcgtttgatcggttataagtgtgagatgattcaaaaagagtttacaacttttatatagcttgattataacttctattatcaaccacagatcatgtaaataagacttcgaatattttaatgtgaattgttga

SEQ ID NO: 22078 - DNA, 574 bp, Arabidopsis thaliana columbia
tgttcacagtgagaaattagccattgtgtttgctctgatgaacactaaggaggaagaagaagacagtaataataccataagaataacgaagaatcttaggatatgtggagactgtcatgttgcagctaagcttatctcacagataacttctcgagagataatcatcagagacactaatagatttcatgtgttccggttcggtgtttgctcttgtggtgactattggtgaaccaaaaattaataaatgttaactttacaaaaacgcagcgttttggtgaaagtgaaagttacactttttagacaatatctagttgggtttcgacgaatgagaatatgacacgtcatcaccggtaaggaaaattcaccaaatagatgatagcctaatctgcaaatctttgtccagcttctgagctcagagatagagagagcgagaggttagagataacagtagttttaccgatgattgagtcggttatggccgttcgtctctccaccggattttgctcgtcgacggcgttactccgtaagctctatttatgtctctgttcttcaattctatcttcattgagttttt

SEQ ID NO: 22079 - DNA, 539 bp, Arabidopsis thaliana columbia
gaagcagaacaccttttacttgctgtcaatgatgaaccgtgggacttcaaagaagcaaacaagtcaaaagaatggagagatgcttgtaaagaggaaattcaatcaatagagaagaatcgcacttggagtttggtcgatctccctgttggaagcaaagcaataggagtcaagtgggtttttaaactgaagcataactctgatggcagcataaataaatataaagcaagactagtggcaaaaggatacgttcaacgacatggtgtagactttgaagaagtatttgctccggtggctcgtattgaaacagttcgtctcataattgctttacagcctcaaatggttgggagatacatgatttggatgttaaaactgcattccttcatggggaattaagagaagatgtctacgtctcacaacctgaaggcttcacaaacaaagaaagcaaagagaaagtctacaaactgcacaaagctctctatggattacgtcaagcacccgggcttggacactaagctaaatgaaatctcaaagagttgaag

SEQ ID NO: 22080 - DNA, 441 bp, Arabidopsis thaliana
cctgttttgctgataatccggaaaatattctcgcctggttagggccggcaattggtccacgcgcgttcgaatgtggggggggaggttcgcgaggcgtttatggcagtagacgctaaagcaagtgcagctttcattcagcatggtgataagtatctggcggatatttatcagcttgcccggcagcgtctggcgaacgtgggtgttgagcaaattttcggcggcgaccgttgtacatatacggaaaatgagactttcttctcttatcgtcgcgacaagaccaccggtcgtatggcaagtttcatttggctgatataacctaaagaatcaagacgatccggtacgcgtgattttcttttcacattaatctggtcaataaccttgaataattgagggatgacctcatttaatctccagtagcaactttgatccgttatgggagga

SEQ ID NO: 22081 - DNA, 639 bp, Arabidopsis thaliana
gttgtggtggtgattatgggtatatatagcttggagaatcgtttcaagaggttcacctggaagttaactcagaattggtggtagggttctcaagacaacgatagatgctttgcatccgctatccttccttgtacgattgttcaatggttttatctcaaaaaactggattgtttggatttgtcacgtgtatagggaagctaaccgtcttgtagacaagttagccaactatgttttttctttgccattaggttttcattctttgaaggttgttcctgttgattgtgttactgtgctaagagattatgcgcttgggtccacgcgaccaaggcaagcgcccatatagtttttctttgaagtttcataataaatttttgggaaattttcttccgttgatctactaaaagaaaaataggctttccaacatgagagtaatcatagtcacattatgtgatgggccaatggatggaattagagctgagattgcaaaaggatataagaattgataagtgcgcccaagaaaatatctagaaagagaaaaatcattggagagaagttttattgagattattctcactaatgaagactgaggataaatgcaatatagctttccgtggaagcaacaaaaagtttggcaagaat

SEQ ID NO: 22082 - DNA, 391 bp, Arabidopsis thaliana columbia
cccatattctcttgcattgaaatgatcacgaacaggctgccatattggtaaaggacgttaattatttgttgttgaatacaaaacttattcaaaggttttctgaataattgtgtcagtcttttttctaataccatcattaaggactcgtaaagctctaacctaaaggaagttttaacttacttgcaaaatcttattcaacgcgttcatcaggcctttctttagatcgccagggtgcaactcgccgctctcatagtcaggagcaatgtcttcaaagcttttgtaggtcctaatatttggaagaaaattccacagctcaatgacttatgtaataggattatagcaatcgaaattggatttttcatgcagaaacgaagcatataaaggttttaga

SEQ ID NO: 22083 - DNA, 610 bp, Arabidopsis thaliana columbia
ttctcgtactcgaactctaaataagtaatacgagaattatcttgaccaatacgcagcgatttaacgccgtcgtaagaaccatcatcccaaacacgcccgtctgtaccaccttgggcatccagcttgtaaacaggcggagacgttgttagagagccatgtacaaagtaaactccaagcgcgtcgagagcattacccgaccgtccatgaaaccctacgatcttctttcctccatcctcaataacgaactttgtaccggtcgtaattccaagcaagtttggaccaaacagtggtgactttctaccctttgaggtcttgaagacgaggtttgtgatcacctctgtggcacatagagccactccgcgatagtttccttccaccgctatgatatgttcgtccggatattgaagtacaaactgtttatgaattaaacatcatttcttcaatcaagaaattaaaatttctaaccaaaagaatcaagaaactagaattcacgacaagaacttatacttgatcggagcttgtagtataatagtctgcgatagtgttgcagtgcgagcattagatatcggatgtagaaattcggaatgcgatgagaaggaaatgaagtgag

SEQ ID NO: 22084 - DNA, 499 bp, Arabidopsis thaliana columbia
taaaactggtcatttgaatgtgtctcttaggatgaaaactgcattttctttgtgttttgcagatcatttgtcactacttgaagcacgagccgatgcctcagtttcgtaacatgacgcggttacatgcgaaattctatgtttgtgatttggaaatgttgccatgcgttcttgagacctgtccaaatctcaaatcacttgtcttggtaaatgattttgctttaaaaaccacatgtttcattgtcactgtcatatgagacgtttattcaactgtttgggataattgacatatgcagaagctgaaaggtgcaatggaaaatgtagaaatcagtctatcatcatcagtgccgaagtgtttgcaatcaagccttgagaatgttgagattatacgaccaaactatggaagtggagaagagatgaaactatcaaaatatttccttgagaattcgctagtcctcaagaagtgtaagctatgcagagattgtcatagcgaggaacaaga

SEQ ID NO: 22085 - DNA, 508 bp, Arabidopsis thaliana
cattctctctctctctctcttcgccgtcctatttatattatctctcctcagctttcatttctccaattcattcattatcacattcctttactcactctctctctctctctaaaaacagagctcaacaataatgatccactaaaaaagattctcttttctcttcttctccggtgatttacttacttaacaatcatggcgtcgtcggagggattagcaagcgttgatccttggtcattccgtcaaaacttcaacatcgattcgtggctactctctgattccttctcacacgacagtgatatactcgctaaagctcttcacagatccatctccacttccaccgaatcatctcctctttctccttcatctttcttcgactcttcaaccgccgccgtcgatttttctcctcctcaaactctctccaacgtctctttcggctcagatccagaaatccccgccgctagtgctcttggtctcgggaaacgaaaacgtggtcctggtgtttccggtg

SEQ ID NO: 22086 - DNA, 805 bp, Arabidopsis thaliana
gaaaatacctcaaatctctgactccgagtttcatgttcaattgtgtttcttgacctaggagatataaccaatgatatcctttttagtttatagataatcacataaagtaaaaggagaatctactataacagaagtaatgaaaaaggaacaattcaaagatgaaaacaaacctttgggaccaatggcgataggttgtgaccaacgataatatgactacagcaactacaagattacagacaataatagtggaaatacttatgcgacttggacccttcttcttcttgctttgatttagaagagcctgcggttttatcttcgccattgcaccttagtttcgcagaaagcaaacgagggatacaacttgtctctgcaaaccataaatcaacagtaagtgacaagcaatccagaaaacaagtatacactacacaaaaactccaaattcgtatctgtaagactataattcaatttcaagttggtaaaatcaaaactgcaataagattaagttgttacccaactgaagaaaccctgatatcacgtattgaccagattaaaaatctagcatatttgaatgaataaacgcatgtgaaaatatcacaagggttcatacatagcttgaccggtaacttccgatacaccagatccagtacttttccaattatcgatcaaattgcaataaattgaacaaaagtggatatgagaaacggagcagcttatcatgttccaatcaaataataaacagatctttctttctatagatatccaaagacctgacagtaaaatcaaatgaattccaaggactttgatt

SEQ ID NO: 22087 - DNA, 542 bp, Arabidopsis thaliana
tcccaaagaaaatacaaaaattgaccaaagtttaattaatgcttcccaaaaacatatattcttcctaaaaacatatattcttcctttaaagtaagttcatatttttgtttttatgttttgcatagacatacgtggaggaggcatcgtatcttcaatcgacgctatacaaatgggaaggagacgcaaggacgttcgacaaaaagggaccgtacatcgagttggtgacgtcaccgaacaaccctgatgggatcatgagagagccggtggtgaatcgtagggagggtgggaaagtgatccacgacttggcgtattactggccacactacactcccatcactcgccgtcaagaccatgaccttatgctcttcaccttctccaaaatcaccggccacgctgggtcacgcattgggtgaggctaactaaacacttaaacaacgttgctgccttgtttgttttgtagacaacaactaaatcatgctcgttttgcacaactaaatcatgctcgtttcatatatgttgcaactactaaatcatgtttgttt

SEQ ID NO: 22088 - DNA, 1303 bp, Arabidopsis thaliana
tttgctttgaagaagcttcattagaatgttaatgtatttttatctataatcgtaagtcgtttttaaaaataaagttgatttgatgtgaatcaaagattcagtgggcgttgtttctgaaaagcaagattggagatctaaaagacacagtgacagacatgtttctcgaacacaacacaacacatcgatccatcatttttttttctttttgattttaacaattttttacaaaacacttttccttcttacatactacatgtgttgtagattcatgtgcaaagacatcagtaacatgctcatgtccccacttttattcctcccattcttaataatttcattcttgagattataaaagttttattcttattttgaatatagacatatgtggaggagacgacatatgttcggtcgggtatgtacaagtgggaaggagacgcatggggtttcgacaaaaagggtccgtacatcgagctagtgacgtcacctaataaccctgacggaaccatcagagagacggtggtgaaccgtccagacgacgacgaagccaaagtgatccatgactttgcttattactggccccactacactcccatcactcgccgtcaagaccatgacatcatgctcttcactttctccaagatcacaggccacgctgggtcccgtattgggttagatatttattcaaaacatgcttttttattacaacataatacagtatataaagattcatgtatgtaaactttgttcgatgatgatgaaggtgggcattggtgaaggacaaggaggtagctaagaagatggttgagtatattattgtgaactcgattggtgtgtctaaggagtcacaggttcgaacagctaagatactcaacgttctaaaggagacttgtaagagcgagtccgagtctgagaatttcttcaagtatggtcgtgagatgatgaagaatcggtgggagaagctacgtgaagttgtgaaagagagcgatgctttcactcttcccaagtaccctgaagcattttgcaactactttggaaaatcactcgaatcttaccctggtaattaaattttactaaattatacactagctaaacgacaaatgtttttgtaacggttggatataaatgaataagacgtaacggtcgatgtgtctttaatttggatgcagcgtttgcgtggctagggacgaaggaagagacggatctggtaagtgaattgaggagacacaaggtaatgagcagagctggagagcgttgtggatctgacaagaagcatgtccgagtcagcatgcttagtcgtgaagacgtt

SEQ ID NO: 22089 - DNA, 1671 bp, Arabidopsis thaliana
aataccctttactgtatatagttcttacagttttatacatattgttaagaactccatatatagtgtataaatggcattgaaaatagttttgagttgaaactcctaaatgatattaaatcttgagtttaacctaattaagcaaagtaataaaaactgattagccaaaacaaagaggttagttagttcaacagttaggttaatgtgcaaattgccgtaacaagattattaaataattcttaactttaattaacctctatccattattgcatttaaaagatactattaattaaaagccaccaataaaaatttaaactttattaaagtactaaagacggatatattaaacaaaacaattatgaaaaaaataagaaaaccaacttaatacaagttcaaattaacatccaaaagaaggaaatatacatgattttacaaatgtcttcattgagccaccacgttaaactaatatcatttttgaggttgattaaaaaattattcatgtaagtataaatgcaaaaaaaaactacatctctatatcaaaaaccaatcaattgtttactccattatggaagatgatccctaaaaaataatttcgttaatactcactctacaaagtacaaataatgaatactgacttttttcatacattccaaaaaaatactgaaaactgaaccatacacaaatccattgcattaagaaacaatccatcccatacgttcctctataaaacgcctctcacaacacaatctcatctcccaccaataaattaattacttttttaacaaagaaaactttcatttcattcactcttcccaaacagtaaaacacacatgcagacaatggaaggacgacaatataattaccaagacagcataaacgcgagctcctccatggtggtgcctcactcgccttggcactctccggttccttatctcttcggtggtttggccgccatgttggctctcatctgcgtcgctcttctcatcctcgcatgttcctactggagactctccggctccgctgagagagatcttgaggccggagatgatgccaaacccgacaatgacaccaacaaaactaagcacacagaaatgccggagaagtttctcgtcataatggccggtgatgtcagacctacttacttggctacgcagcgactcggtctgagcaaagctgtacttgcggcgatcataacgaagaagaaggaagaagagggtagtgatcaggtggtatagcagagcaccggaggttacggtgagccctccctcatattttgaaaacagagcattcgttacggagtactccggaatcgatccgtccggtctttttgtgtcggttcataattacgccaaccttacgtgagctgatgggatataaattagagttttatttatttcgtatggttttagtttttttttggttgtctcagttttcttcaaatttttcccgtttatggttcatgaaggaatatccggtacatgtaaattttaagagtttgaatagatgattgttttggactagcgattaaagatagaactgaagcttgacagacaaaataaataaaagatacaactaaaatcgtgcgtccttaattcagttttcgtgtatagagagacaaaaatgttttcccagtgagagatgtacagacatgatgcttacgaaagagggaggaga

SEQ ID NO: 22090 - DNA, 511 bp, Arabidopsis thaliana columbia
ggcttatggggaagatgcagataaatggatcaggagtgttgatgatgctgtacatgagctgtaccatgactatgctgaacagagtcactccctgctggatgcttatgtagtccatgggaacgatggcttttctgaaacagatatgtctcaagttcacttccatcatgaataccacaactcaaatgggctttcacatgatcaaatatttgaacaacctgaagatggaaatccactgaatgaaaaacctttggagggactatctggagaaggtcagcctacggggacagaatcggtgggaggcaataccacacagggagtagaacaagaaggccatttgggagatgctgggacacaggagaacaatattgtggaagggcagttggaagagagcaaccaatggatgggctgacacaaaagcctcttctgacagaagaaaatctgcaatccaatggagagctactacgagccaggagagcagctaacagatgagacaatggagggaacacatgcg

SEQ ID NO: 22091 - DNA, 544 bp, Arabidopsis thaliana
agtatttaactggtggtggtggggacttgtaaaccggaggaggggagtaatgcttaaccggtggtgggggagacttgtaaaccggaggaggggagtagtgcttaaccggtggtgggggagacttgtaaaccggaggaggggagtagtgcttaaccggtggtgggggagacttgtagaccggaggaggggagtagtgcttaaccggtggtgggggagacttgtaaaccggtggtgggggagacttgtaaaccggaggaggggagtagtacttaaccggtggtgggggagacttgtaaaccggaggaggcgagtagtgcttaaccggtggtggtggggacttgtaaacgggaggaggcgagtagtgcttaaccggtggtggtggggacttgtaaacaggaggaggagagtaatgcttaacaggtggtggaggggaagagtagaagtaatttgcggtggtttgagagacaaaagcaagggagaatgctaagacaaggaaagaggccattggtcccccattgtgttatgtgttttgctttgtgtttga

SEQ ID NO: 22092 - DNA, 562 bp, Arabidopsis thaliana columbia
gcctatctcaatcatattatcatgaaccctaacagcatcacggatttgaccagtacgacaatatccatccatcaacacaccgtacatatgctgatccgcaacaagtttcttttcctttagcaattcaaacacatgttccgcttcttccatcaaaccctttttgcagtaacccttaatcaacgaagtatacgtaacaacgttcctagaaacccctctctcagacatcaaccgcaacactcttgtcattccctcaacatctccgatcatagcatacccattgatcaaactattgtaagttaccacattcagctccaaacccaatgaactctccgtttctttcgcaaataccatggctttatccacattcccacttctacaataagcattaacaacaatactgcaagtaaacacatccggagaaacctcaaagctaatcatctgatcataaacatgtaaagccacaaagttttccctttcctgaccaaattgctcaacaagctattacaagacaacaaactaggaattcttccatagttacccatgttgtcaacacatgtaaagc

SEQ ID NO: 22093 - DNA, 564 bp, Arabidopsis thaliana columbia
  unsure (1)..(564): unsure at all n locations
nnnnnnnnnnnnnnnnnnnnnnnctaaaggctgaccgtactggtcggctaccagcagagcggcgtaaacctgatctggcgtcgcccgccagcgatgttgtgaatggtttcaccttctgcacatgccgcttctgccacaattcgcattttcgccgggacatcttctttaatatccagttgagcgagagttattggcaaacctaccgcatggctaagggcagctacggtttcgatttcctccaccggcgcattttccagaaccagctgcgtcacgtacncgaatgccactttttcaccgtgataatagtgatgcgcgtccgggatagcggtcaggccgttatgcactgcgtgcgccgcagccagaccaccactttcaaaaccaacaccgctcaaataggtgttcgcttcaatcacgcgctccagccgcggagtcactacatgctgttcggcagcaagcatcgctttttcgccttcttccagcagggtgttgtacacagttcagccagtgccagcgcacgctgggtgcacttgccgcccgccatggtggtcgcgccgctacgagagc

SEQ ID NO: 22094 - DNA, 565 bp, Arabidopsis thaliana columbia
agaaagagttgtgcatttcgatctcctctgattttttttgtggggttttgatatgtttgcagaatgaaaccgaacttttggaagatagtttggctctggctgggtttccactctctacagcttacagatttggctcaagcgaagatgaattcatggactccgatgacccgaccaccacccaaacatgtacaaggccttcctttacccctcatcgtcgtttcaccgactcaaacctcgctcgagctcaagccgggagcataaagcaagaggcgagaagacttggatggctccacaaactggtaattcttcagaacctctgtatttgaaacatttgagactattaggttactacattctggtgacaagataaaaaagagagaattacgttcactgtttatgtagtttctgtgtagaatcctaatgagccagttatgctgttcacgaaagcattggtccccgataaactggctgctgcgggaatcaccctccatcagatgcaagaagtggaagagctcggtttcaaggaagaatgggtagaggcggtcggattgtatttgatagatgg

SEQ ID NO: 22095 - DNA, 551 bp, Arabidopsis thaliana columbia
taagcttccagactatgtttccaaaagtaatataaataatgcttcactatgtggacaatgcagagactattttacaaatttgttcatgaaattccgcacataactaatttcattaggaataattttcgatgattaaagatagaggaggtggactttaaacctgttgaatgaacatcagtcatggagagagttaattgtaaaaacactttgactgttgccaagacaacagctccattggcatgctgcagtctgtcttccaacagattcataatgtcaaaaatatcattactatctgacggcacatattttactgccaactcaagtataagacattgtgcccattcattgaattccttgatcctgcagtgaaacaccacaatggtaaatacactacaacaacaagttatactgatagacagttgaaggaggagcttaagtacataccgattcaagaaataatatataactggcttgctgagcaaggactccttttcccggcatgcttcctcagagtggcttgcttctaaactccaaatttcttgaagtgcaga

SEQ ID NO: 22096 - DNA, 499 bp, Arabidopsis thaliana columbia
gtcatcgttgcctctttgtggagcttttggtctgtagagatcgttgggatgattaaactggtcttgaaagctctgaacctgctgctgcatcccgttataatccggacaaggaaccattaaacccgtcataccatagggtttagttggttggtagaaggaagtgactttataaggacaagtcatttggtgattctctcttaagttcctgtcaagaaatcccatatgtggttggctataaggacagagactgttctcacatgttaggagtgttggatgcattggcatcccaaaatcttcttcaaactttctcttgtaaacacagttgtagttgttttcaaattcaggatactgctgattggtccgatgagtgccaccaatcagttcaacatcatagtctgtagattcaggaaacaaaacatctgggtctccaccggttgcaggaacaagaaagttagaagtgttgttgttttctctagacatggctatttgatcaacaata

SEQ ID NO: 22097 - DNA, 880 bp, Arabidopsis thaliana
ctaagaagtcttccccgagttagcggttgggttgacgatcctcgtgttcaacttcacattggtgatggtaattaagcattcttctacttgttctctgttcacaaaacgtagtcaaaaatttgcttgtgttgatatcactttcctctggcagctgctgagttcctccgtaaatcccctgaagggaagtatgatgccatcattgttgattcttcagatcccgtaggtatgattcatctgcaaaactctttggatatctgagtgattcttattttgtttttctaaatcaaaactcggttcagacttcagctacaaactctcacgttttcactctatataatcataggtcctgctcttgcgcttgttgagaagcctttcttcgagacactggctagagcgttgaagcctgggggagttctttgtaacatggcagaaagtatgtggctccatactcatcttattgaagatatgatctccatttgccgtcaaacattcaaaagtgttcactatgcgtggagcagcgtccccacatatccaaggttaactctacttttcttctgattacattgtgtgatctcactgaaatcagaaacatgaattgagcaacatatcttcattgcagcggcgtgattggtttcgtcttgtgctctactgaaggaccagctgttgacttcaagaacccaatcaaccctattgagaaactagacggtgcgatgacccataaaagagaattgaagttctataactctgatgtaagtttaacacaactatgacttcctcatttactgttttagattaacttaaagcaaaatcctgatctatctctttactaaaacagatgcacagagccgcatttgctttgccacattcctgcggagagaag

SEQ ID NO: 22098 - DNA, 431 bp, Arabidopsis thaliana columbia
cacaacatcttgaggcttgggctttaggcttggttatgttgcagaccacttgccagctggagatggcgtaggttacagccagtagaccgctaggatcagggaattgagacgggtcaacacgaaccggtggcccgcatttgtactgaggattgagaacaccggtcgattttccaatgctgaggtgggtatagagctgttctgtttaggtcaggaggcaacttgaaaacctaacaaattgagagaaaacaaaaacttcaaaacccgaagatttctacgatctcataacatattttaaacgaaagagatgatttacctgcaattgaaacatagatctagatttcgaaggatccataataggtggcaagagagttcggtttttgcaacagaaaggtaactttcctgtcatgtgatcttccatcttctcaggaggc

SEQ ID NO: 22099 - DNA, 910 bp, Arabidopsis thaliana
cctacccaaaatgccctcagcctgatctcaccctcggactcaagcgtcacactgaccctggaaccattaccttgctgctacaagaccaagtcggtggattacaagccacacgtgacaatggcaagacatggattacggttcagcctgttgaaggagcgtttgtcgtcaatctcggcgaccacggccatgttagtactctatccatttattggcttttttgtttctctgtttttggttttgacttggtcaatcttgatttgtcttgatgaagtttttgagcaatgggaggttcaagaatgctgatcatcaggccgtggtgaactctaactcgagcagattatccatagccacgttccagaaccccgcgccggatgccacagtgtatccactgaaagtaagagaaggagagaaggcaatattggaggagccaatcacgtttgccgagatgtataagagaaagatgggaagagatttggagcttgctcgcctcaagaagctggctaaagaggagcgtgaccacaaagaagttgacaagcctgtcgaccaaatcttcgcttagaatctttgtgttcttgcttacttgttgttgcgttggttctgttttgtacgttggtactgaaaattatgctaggctcggtgtgttttgtgtttatttatgttctttcgaatcataaagaaataatgataattgatgcacttgtctatgacaaaaacatcatactccacctgtatttgacgcgttgggtttatgtcaaaaagcattaatacttcaactcctctctattcagtggcatacatacattgttggtaactgtcattgtctaaacactttgtactactaatcaattttttttgttcttcctacttctcctttatgatttcttcgattgttattcttttatgttgatgt

SEQ ID NO: 22100 - DNA, 684 bp, Arabidopsis thaliana
cctgtattcatgcataacccaatcagtccgctccccacgaggcgacttgccaaagtgataaaccagagttttgatctttcccacaacctcagaattgcacagaactggtctctccttccccgtggtcttccagtagccacactcagttgcacggtttgcccttaccccactagcatacttcttttccctggggcagaagaagtgccacttaagatccccacttcttataaaagacatatctgtaaagaacaagtctccgagtcagagaacttagatgcaaacacatgaacagaacaagagtgttttagaaatggataccaggtaaatcagggggttcaaacttgtaaatgtcaacttcagcaatagcatcgacaaggagctttttccccagtattttcctcttcaagtaatacctcacgagttcaacatcagtcggatggaaacgaaatccaggagcgagttgagttttccccattggcgaagaatccaaaggggaaaactttgaacaatcttctgtaaactcttcaccagtaaagtgagagtttagcaaagaaaacttagtcttcaagttcacagtaaacaggagcagcagaaacgaataccctttgatcaaatcaagcagaaaaaaaaaacagagaaacgagaaagaagagaggagaagaagaaagagagagaagtcgagga

SEQ ID NO: 22101 - DNA, 601 bp, Arabidopsis thaliana
attacatatatactagtaagataactgctttatctatggaaaacaggattgcatttggaagaattgcagtctcaggatggtcgatgtgctagaaatgaaacattgctatggaaatttcatacagaacagtttgctcaatggattaaaaaaaaaaggtttgtacatatctatttcatactctaacactctttctaattttttaaattaatttatgtatcttgttatatgaacattagatcccttctaactcagaagttcattcgatgaagctgaggtggttggcttttagaccgagactaactgcgcaaaaccataaagggtttatcattaaagggcatcgctttcacactgatgacgtaaagcggaagactcagaacagtggagtgacttatgaagctttaagcatgtgtagatctaaagcacgggatactagacaaattgctgacacagtgacttattatagagtgatcaaagaaaaaatatttctagactatcacatgttcatagtaccatttttcagatgcaattgggccactagaggatatggtatcaagcaagaggatggattccgcttgtgaccttcatatgaacaagcgcatat

SEQ ID NO: 22102 - DNA, 784 bp, Arabidopsis thaliana
cactattgtaccttttgggatagtgtacgattctgtaagaggaaatcattagtagcaatgtgtgggaccatagttgccggtgtcgatatctcaccacctcacgtgccacagcgcgagtatacttcatctccgcgagctgatcggccgtgatcagatggccagactgaggtgaccaaatcttggccacttcctccctcactttgctcagcactttcggatgagattctagaaacgtcaccgcccaaaggagtgatgacgtcgacgcgtcttgtgcggcaaagagaaaatcgaagagcaaaccgccgatggcttcgtcttcggagtgaagcggcggtggattaccggattctatctccgtgacgaatgcatgcatccaaaaatcgattaagcatgttggctcctctcctgtagccatcctctttttggattttcccgcacagacggagagcgtcttctccaggttcattaccgcccggcgagccttgttgaacgcaaagccgggcaggttgatcgggagcgccatagatccgagattgaacagattgtaatcagtacagaacgtgttcctagcttccttgtcaaggtagggtccaacgaaaaccgtttgagaagtctcaagattgagttcacggacaaggtctcgcatagaaaccggcttagttccgcggagaaactttcctccactgtcgtagatgacggagcatactattgttggagatcagagtaagtggagagtgccttgggggtgaagttaggagcaaggtgacggcgaacagttttgtga

SEQ ID NO: 22103 - DNA, 818 bp, Arabidopsis thaliana
ctctagagcccctcttgatcactaacagaagcctctatacaatctttctagacattttcctcaccaccctgcacctcaccaacaacctcctaagcatctctttcaccttccaatatctcaagaacatcttcataagcatcaatcatcagttctgcaattttttccttctttgctttcatagtttttggccgctttgtggtctgtcttgtctccacgcctcgctggcgttcactaggacgtactaactctcctcttgtcctaaataattaagatcctgaaaaaccatgaattaacagttagtcaaattttgacattcaaaataataccatatatactactctgccactatgatcccttccaatcatccctaacaaagaaactctcatcatcagaagattgattcccaaatcatcgtctaattggtctgataaaggtgcaccaacaaactcttcctttgtctccaactcgtgatagcctctcggaggtgccatcataacaacataccacggtgatgtgtcattctctctagattaaaatacttgtttagcttgtgatgggagaatatagggatcttgcatgtatgacgcttaattcatatggaggttcacaagcgtgaatccatcctcctgcttgacaccatatcatctatcggctcaattgcatctgaataatggtactgtgaacatgtgatactctagaaatattatttctttgaacactccataataggtaactatgtcagcagtttgtctagtatcccgtgttgtagatctacacatgccaaaagcttcataagtcactccactgttctgagttag

SEQ ID NO: 22104 - DNA, 541 bp, Arabidopsis thaliana columbia
tgttcgccaaaaagaacaagactggcaacacctgactcattttagaacatatctatccaaccactatatatgctaacatgaaacctatttcattgcttttgtgagtcatcccaatgtcagatatcatacatttgactatgatttgaataacattatagaggagacttttagaagatagagacaatagactaactgggacagaaaagcgaaacgcaaatgttacctcgtaagtcattgttttccatttctctccacatgtcttcccaatctgtacagaatgaagaacaaaacaactttagcaaaagaatcaaagtgaacataatagccaccatgttttactttgacatacaaaaccaacaaagtaatattctacaacctcgcgcatggacttgacatctggattctcctcttgatattgcttccggaaatcatccctttggagccaaaaagataagacaatatgaggcaagaggaaaatgaatacaacaaggtgtttcttcgtatgtattctaaagtaaccagaacacataacaacataaat

SEQ ID NO: 22105 - DNA, 361 bp, Arabidopsis thaliana columbia
cttccttcaatggatccttttagcagtttaacttgaagaagtttcagtgaatttcattttctatgtcccgaggaagccataagaaccgcgacacgactatgaacataagaagcatactgatgagaagtgtatatgtttttcttgatgatcttctatattctccaaacaacaatatcccccaaaatgtactcacaagtggaagtgcctgaaacatattcaaatcataataagtaaaacatatttcactcttaaatcatggaacagaggatttgtttattgtctaaacctgaacagcgtctgcagctgcatagcctgcggcttgaccacccatgaactgaagaccattgccaaatccacatag

SEQ ID NO: 22106 - DNA, 550 bp, Arabidopsis thaliana columbia
ctcagattaagattgtgatgtagcagtacctgtggctcaaaatcatctgccaaaagaacattagaagatttgacatcccggtgaattacttctggatcatgagtattatgcagatagtctaacgcctcggcaacacccactgccaccttatatctctccatccagccaaatttctttgcatcctttctattgcctgattcaagaaatgagaacaatgacgatggatctttctctagtatgagaatccagagggaatatcaaatgtagtttatttaccatgaaggttctcttcaaggcttcctcgtggtagataatcgtataccagcatcaaattattattctcgaaacagaaaccaaagagagatactatatttttgtgatgtacactggtaatgacttcaatttccagtataaattccttcaacacatccagacaaggtttcaatattttgacagctaattccctgccatctggtagatccctctataacataactattccaccttctccaccaagttctctggaacagaaacataaacaacaggatga

SEQ ID NO: 22107 - DNA, 564 bp, Arabidopsis thaliana columbia
  unsure (1)..(564): unsure at all n locations
cactacaacgtttggagtgatctgtagagtagtgtaaaggatgttgatggcttttgtgctcaaatggttctgtaactgtagcgcaccgtacatctatccttaattccttagattcataggagaaaccggtgaacagttgacggcaaatactacacctatgtaacaagtaggtgccataatttggggatagttcgagtggctggttgtggcacacatgacgtttctttaaaggaagcttggcacatttttcgtggattatgaaatcgcatctctttctcgcgcaagtnagaacggttctgaacaaatctggaagacacatgcggtacaaactacactttctggtagattccagccacggtaaattcgtaagttatgcttatggccgtaatggtctatcgtgttgtcatcaatcaccttgaatggcgcagtttcctcttcttcgggtgtccttccagttcgatcatgtcccatacatcccttctggttgcgcatcttgaatgaacaaaataatcaaaacatttggagcaagaataagccccgtagacccatccacatttttacgac

SEQ ID NO: 22108 - DNA, 517 bp, Arabidopsis thaliana columbia
attctcttggataccctcagttttataatatatgaattttatgaagaattcttcctacaacatttgttttttcttgacaattagcttcttaacccataccatctaggcaaacaacatgtttaaattttatataattagaacgagaatatctttcaacatctgtttgtgcgacaaagagaataaaccagaccaatcacattggttgtttttaaaaaattagatcaaataataacacgacgtcttaaaaaatgcctcatctcgattgtaacctcataaaaccgtagacaaatggattaattcttaaaaacggtgggaaacgaaaacttaaaaaaacacagaagaaaaaagaacacacaacactctactgatagcttacgccttcaccgttgacaacctctcctacgcgatacgcaacatagtctccattcttgacttcttctagtattcgtgaagctgcctctggactaaccaccataaccatccctatccccaggttaaacgtccttctcatctcact

SEQ ID NO: 22109 - DNA, 570 bp, Arabidopsis thaliana columbia
ttcgacaagtttctctaaggaatttgcataagaatacattagttttgcttaaccacttgaagacattttacacaccttcaaggtagaagaattaggacccacaagccgctgccttcttttaacaaatctttcctgcaaaaataagtctatgtaaggacgagatgacaatgcacgcaagatacatatcgacataaactaattttcctcatgctgaaataatttaaagatgtcacgaaacgaagtattctaggtttatagtggaatgtagtaacaacgttataaggtgctattggttatctttacataagccaacatggaaagggaccaaaatgcaagcacaactgtgagtgataattgagccccgagactaagattgaactgtaccttatttctaaccaagttaccgatcttgatgatatcacattgcacctcatcttcgagaatcttaattgcctgtgatacaagtgaagaaaagctataaattagcataaacacctaaatatccgaaatttacagacttctaattacagtttattctaactaagctcttgaagtgaggctgaaaaaata

SEQ ID NO: 22110 - DNA, 449 bp, Arabidopsis thaliana columbia
tctgatgatttttgcgatttgccattttaaaattttacatttgagactgctcaatctcagtctcagacccaaatcaaatttagatttgtgaatgtacttctcacagaagccacaccacttttaatttagtgctcaggaatgaatcgcttggatttttgtcctttataattacaaaatagagagcgacaaaacgctgcgtttccaaaggctagatttcttggcacggggtctaagtgagaagttgaggccaaacatttccttggatgccaaatccatgtccacgaaccccatgagctttcccacaactgaggcgctctctcggacatgatccatatctttgctctctgaccagagacgatgtgccagttggagccgtctgtgctttgtattcagcccaataccccatctcaagaacacgttctctctctcctctttcgtcagtttcttct

SEQ ID NO: 22111 - DNA, 604 bp, Arabidopsis thaliana columbia
ttcggagatgtttcaaggaaagacaatgggagtgtgccataactgattgaaatttaaacgtacatatattcacctccgcggacagcattctctgcgcccttcctctcttcttcggcctctttctctctctctttccagttttcgtatttctgatcgtctgttggtaattcatggcggcatatagggcaagagttatgctcgtcctgccataaaacaatatgagcataagctttatgttcttacttactagtaagcttgaaagaatgggatttttttttttataccagccaaggctttaggcaaggagggtgaaatgtgtgcttgcatggcaattcctgcatcttgtcgccaataactagattctccttgcagatgcaacattctgcctctgctccaaactttttaagcaattcctcggtgaaaataatgactgggagtttctctacaacttctttacttgccggtggagctcttggtggtccaccatcatctagtatctgcatagaacacatcatatatcacttttcaatcatgaagctaagaaaaagacgctaccaatacaatattagaggttgaggttaacactcttgatacagatgagtga

SEQ ID NO: 22112 - DNA, 1221 bp, Arabidopsis thaliana
tggatgcaatctcacatagaagatggattgaaagaactaaagaagccagttctcttcacagagtttggcctatcaaaccagaacaaggactacgaaccatcgcagcgagataagttctacagaatcatcttcgacgtggtttacaaatcagccaaaagaaagaagtcaggtgcaggcacattagtgtggcagctattcatggaaggcatggaaacattcaacgatgactttgggattgttccacatgaacaagattccatttacaaattgatgatagaacaatcttgcagattgggtaaagtcacaggacgtcttaaggaacaaaagttgaaagaactttgttctcacagacattgagagaatcacatgtaaactgtcttttttctctacagtgaaatctgattctcatttttgttgtatacaagaatcaactcagtgagtaaaaatatcttgatgcattcaagttcattggtcagagttcatagataaatccatatttataagcacaaatacaaaaaaacaaactaagtactcaacaattctaaaccctaagagaaattattgaagagactaaatatgaaaactaattagagctacgcttagccagtcttggagatgacctcgttgaacttgtcttgttaacttttacgatcttcttcttctcaatcaatctcttcttctccacaaactcagatttaatcgatttcttgttagcttcaacaagtttagtcttgctttcttcagcgactctatcaaaatcatcagagagttttctcctgattctaaccacaccttcatcttcagatccgacttcctcatcatcagaatcgttcagatctaagtacctccttcgtttcaccacaatcggagcagaaggaggagactcagaaccagatctcttcttcttccttccagattcgagtttcacaggggtggatttctcaagctgtgcacggagcttgttgacgtttccttcgatccggccttggagacggagacgcgtgaagttgagaccacccattgaccagtgagcgtctctcgcccatgagagaagaggatctagcacagagaggggaggatcaacacggtaatcattgaacttaggattatcgaagaaacgaggacgaggaagcccgtttccgtagaacgacaccggtctaatggcgatacttttcttcactggcgtcatcattatgttaattttaaacgagattgaaaaaa

SEQ ID NO: 22113 - DNA, 531 bp, Arabidopsis thaliana columbia
tacagctatgaaatccacattttcatcgacatatttttatatgtaattaggttcgttatgagaaacagttaaatttgagatgataaaattacagcaacctctagtgcagttccagcaggcaccatggcttctttcactgccttctccagagctattaattcaggttgcccactctagagaaagaaaaacaaagatgaacatttaggtcaatgggggaaacaatgaaattattggcatcagaagtcagtaaaacttaatattgagtgcaaaaaacttcatgtacaataataatcagctcgagacgcaaatgcaaatcagctaaatcaaatacaagaatccagaacttgaatagaaatcttatcctacatatataatatcggatgttgaagcaggtaaatcataaacaacacaaaattcgtgaagactggttaaaggtttataaaattactcacaggaaagatattataaacaactcgatgctcaatatcaagtggctcgcacgtctcttggcatgaaggcctatgtgttgaa

SEQ ID NO: 22114 - DNA, 1754 bp, Arabidopsis thaliana
gtacagattgccgttacaaagcccatagatgatagaagcccataagggtagatccgtaaatgtctctttcgtaaaccctaattttcacactccttcaaaaaccttggagctcttcttcaagcgcctcctcgtttcggaacttcgatcgtagaaaccttgaaaatccgagacatccacaatgccgccaaagttggatccgagtcagatcgttgacgtgtacgtccgagtaaccgggggagaagtcggagcagcgagttctctagctcccaaaatcggtccgctaggtctcgcaccaaagaagatcggagaagatatcgcgaaagaaaccgcaaaggaatggaaaggattacgtgtaaccgtcaagctcacagtgcagaatcgtcaggcgaaagtgacggtggttccatcagcagcagcactcgtcatcaaggcgttgaaagagccggagagagataggaagaaggtgaagaacattaagcataacgggaacatctcgtttgatgatgtgactgagattgctaggatcatgagacctagatctattgctaaggaattgagtggaacagtgagggagattctgggaacttgtgtgtctgttggttgtactgtggatgggaaagatcctaaagatattcaacaggagattcaagatggtgaagttgagattcctgagaactgaagaatttggaaatgatggtgtgtttgtttcctttgccttttgagattttagtttcttcttcttatgttttgtttagaacaacgacaagtcagttttggattgttattgctgcttttttatctaatctcaattttatgcttatgcttagtttctttcaattttatacgaaatgcttgaacttgccttaggaaattgaatctgcgtttagtatcgtatcttgctgataatctagaagaacattgattcgtgattcgtctctcttggaatgtttgtgaagctaaattgtagaaatgaagaagaacaatggcaatgcttgtagttcattcatctgtattcgctaaattgtgtttgcctctcttaaattggtttctttgttcttcatctcccattcaacacattgtgtagggtatataatcgaagaaaaagttgtctttctcgattttttttctcaatacaccaaacttacatacgttgcaaagatgaattgaaaaacatttcactcgatttaatatggaatcacacagttagaaatagaaaataggaagaagctaagatacgagtggaaaagaggatatgtttctacataattgtaggcacactttttttctttcgtggctaagtttaaacgttggctgcacttctgaatgaaccgagggacttggagcctgagcgccttagaacgaattggtgataaaatgcagctatcgtagctccaatgaatggtcccacccagaatatccactgtaattatgtaagaccaaaaacactttagtatttttcctccgtccataatttgattaattttaaataattaagaaatagaaacgtacgtggtcatcccatggcttgctcttgttaaagattacggcggctccgaaactcctagtcgggttgataccggttccggtgatcggaatagtggccaaatgtaccataaacaccgcaaacccaatcggaagtggcgccaaaacctttcgtttcataattcataacccaaagtattagttaatgatatcatgtaattaactaacgatcttataactgataaaaatatatactacctggaacgtgggag

SEQ ID NO: 22115 - DNA, 1851 bp, Arabidopsis thaliana columbia
gtgttgagccgctagagctttgataaaggacatcgcgatgtcctgatctctgctcaaaaggtccttgattaacgcacatggagctcggatttgggatctgaagttgcaaagtagggagcatcctctgtctggtatgttcggaatgtcctcatcgatcatctcgaccctcgaaaagtctggcatggattccgagcatcggaggttgaaggccataactgcgaaagaaaagaacggtattgttagtgaggaatgaagaaaaccctagagaggaaatttatagggaggtctcttagctttcagagatgcgattccatgtaaagccggagtgattcgcggaagtattcacgtcgccttgttcgccctgcattcaaagagtatctccaaaacgaatatttgatgaatcaaggaaagttgaaaagtttccttaaataaaaatggaagtccaataagtaagtccttgcgaaaataaaaagaaagttttgagtctcagagaacatttagggatggggctcaggaacaggctccttcatcgccggttcggggttcgaagtggacgcctcgtttttaacatccacgtcgggttcattcttcacgcgcttccaggggttgctgtcctcctcttcgtcgtcaacgtcttcactggcagacgggatcacttggaccggagcgtttacaggaccagggacttggcctcgagcacggagatacatccagagcatgtgcaggatcttcgccacactgtcaaagttcctctactcccattaaaaagggtcgctctccattgcccttaccttcctctcgatacgggcaattcgggcctcgagtgtttgcctcttaaggcccaaacgttgcctttcatcgcataagcggtgatgcttgtcgacgacctagaatatgaactagttaaaagcgagtaaagttcgtcccgaaaaagagaaggaaagaggatttaccttatccataaagtcatacgcctcctttttgtctttcgaggggaagtggaagcaggcgtgaggaaagagaacacaggcgggctcgaagccgtcgctggacagaaacaatggacttccgggatcgagggggcagacggtggaggctccttcgttttccattctagaggtgttattcaagtaaatgctcttatttatgctcttcgttttccatatttttgagagagttgagaaaatttatgctcttatttatagtgatttagggttttactcgaaaccacaaagttaataattgtggcgtgtccgaatgagtttatccatttttggaaatcgaggaaaaggcaattattgccttagaagcgtgacacttttccagatttccaagggcaaaatggcaactgtcgcatttaagataagtgagccattaaatgcaggataaatagtaaaggcttagagcctggaaaataaatcgaactgactaaacccgagttggggagttcgcggattcgagtccgcatttttagggataggtctgatcaacctacgaatcccataacttgacccacatggttaaacaaaaaactctatttaaaaaagatggactttgcaaatccatacttaaatttagcacaaagaaaaaccctcttgggatcatattcttaagagaaaggtttaaatgcctcctcaggcaaagtatttgtttaagcctacttaggcaggtaaaataattcgggaaacagtaaacaacttttgagtttaagggacaatccccactaagtggacatagccactacaggttttcgggcatcagggtctgcggcagttgtctcagtctcgtccggctcgccagtagcaggctgctcgctaggaaccacggattctgaaccatcatcgtcgtcga

SEQ ID NO: 22116 - DNA, 3032 bp, Arabidopsis thaliana
agttcttaatacagtgaaaagattccttctttcccttaatctatttgttgtgtttatgatttcatactcaattatgttgtttgcttcaattaatatgtctgagtaatctgcttgttaggaatagggtttctcattagggattcatatggtttagtagattgccccttctggtaggttatctgtagaattctttatctttagttatgtttaatgctagatctagagtaattaactagatcttaaatccaggcagtagatatgcccaccatatgtattttgtagttggatctattatttgatgaacctggtttttaggtgtgtaataaaaatagggctatctactaaggtgaacaatcgaactcgttaagaatgcatatttaggttaataatctctcggcttctccggttattcttacctatatatatggggagttttgcggaacgcgaccggttattccataattagagtttgagtttaagaaaggttcgataacaacctacctttcattagatctactcaccaatagtttcctgagaataccatgttcctagatctttttctaatcgtttacaacacaatcaacctaatgtgttcttactttgttttcttactatttcaatcatcacctgctagcttaatcttgatattcaactcattgtttgaacaaaagaactttgtgaattcgatccttaaatactgcatttgatctcttattggagagagtagttttagggtaatttcactacaagaaaacaatcgttttggtagggaaaaattactcgctaatccctcgcaaacagccatacgcgagggacttgcgaagaaatcaagttcctcgcaaatcgcttctcgcaaatggtaaaaagtcgcaattccctcgcaaattttgcgagcaactgttttcctcgcaaaacacacgcaactacagttctagtacttccctcgcaacagttgcgagggatttgcgattcttttctttctgcctagcaaatccatcgcaaatattgcgatggatttgcaagtattttgcaactgatttcctaatatattaaggcttgattagtggataattagagtctaattacctggttaactcacaaggacacaacagaaaacaagtgagaaaacaagttcaacacaagacaaaagaattcaaacacaactagacaacgctaacagtgactatcaagtacacaacacaaccacacttgcaatagaaagcaattcaaacacaacactacacaaagtataatgaataagcggtcaagatttcagacaacacaataagttgtcaataagatttcagacaacactataagatttcagacacaactagacaacgctaacagtgattatcaagtacacaacacaaccacacttgcaatagaaaggaattcaaacacaacactacacaaagcataatgaataagctgtcaagatttcagacaacacaataagatttcagacataaaagcaattcaaacacaacactacacaaagtataagatttcagacaacagaaagagcacataaaatttacctcagtaaaaatcttgttcttggcatgaacagaaagtccacttgatctagtgctctccggattgtcccctgaacctatatgagactcttcctcttcaatcctagatgtcacttgcttgtagatctcctctgacttcccatcgatgaagcttccatccacttttttgtgtgtctcatctagcagctcaaagaaatcaggagttttttctccagtcttctcacactgaaacacaaagagataaacaagatgtctgtatgtaattctagattaagtaatggtaaggagagaagaatacttatcttacccgttttcttgcacgagctttgtatgaggtctggcctgaacggtgtttatagatgcctttgccatccggatcatgatacctagcatttctgctgttgttactcttttttctgactttggatcttgccaaaacagtactagacctttccacacatcaggatcaatccattttggcttggcttcatcacccttctccttccaatttcccttccaccgtgacacttgatcagtcatcctagactttagctttgcttcaaacacaacccttactcttttgttaattgaacggtcccagttatatacttgctacaaaagagaagctaacatcagaaatgaaaccatacacaaaactagcataaacatcaaaagagcacagaacttaccgcaaacgtttcataccatcgatcgattgtagcctttgatgtttgtgaccaattggcatgaggttctttgaaatctctttcaaagatgctgcggactgttgctgcaactgcagcatcatcgtcaaacctacaagaagaccaaccagcccacacataaggatttctatgtctttaaacttctaagatatcacaatgctaagtacaaccaagctgttctatttgttgaaacttctaaggcactacaacctaattccattacgctctaaggtactacaaagttctaaggcactacaacctaagctgttctaggacaatgaatttaaccttacgagagagttcccggaggacgctttgggtctagccttgtcaagccagcacgaccaggactatcaagaagctcctccagtgtgagattgttgagacgctcagcttgagaatcaaaatgattgacagaaggctgagtggttggcgttggaggcgatggtggatggcgtgaaccttgaacccctgaaatattcccagcactgacaggagaattgacatgcaacgggtctcgctgctgtgacctatatcgtggataagtattctccgacgatggcatcttgcaaaaaaaacaaaacccagagtttagatccgtaaactagaacagattagatctggaaaacaatgtcagatcggagatgaagaagaagttagatcggagagaagcagttagatcggagaagaaaacaaacaaaacccagagtttagatccgtaactaggacagattagatctggaaaacaatgtcagatcggagatgaaga

SEQ ID NO: 22117 - DNA, 2449 bp, Arabidopsis thaliana
aaaaacaaatgtataatagtcatttctgtactcgcaggagagtggcgcttatcgtagtttcaatcgtcatgcttgtggtgacttttcttggtctcggtaatgttttcatctttgactacatgtttctcaactatcaactaatgtattgaccttagtgatcttgttatcatttcttctcctgcagtttcttcgatttgtactgcagacacatgtgtggcaatgaacgaatgggttgagagaccatcaagcaatacggctctggacgagatattgccttgtacagacaatgccacagctcaaaaatccttgatgcgtacgagagaaatgcctgcgggccgacccgtatatccgatgggctttgcgggccgggcttggacactgataattttgtctgcggtcctaaacgggccaacccgtcgcggcccgaaaaaagaaagcccactgcgaggcgggctagatgggcgcgggccggcccgtctgacacctctactcatcagttcctaggtcattattcgcttatctcccttcatcaggtgactgggcttatctggcccaagtacccattcgcgtatgtgggctcgtcagctgcgtaggtcctctacttggtgggcttggtgggcttttgtgggctggcttggtatttttgcaggtggattcctggaggggaatccagccccaacatttgccccccagcccattgagtgagtagaggaactcgatgagcggacatataggtcaggtaagatgataaatgtgataagatcagtcggttttgaggataaactcaacaatttcgatttaatttcagattccttaaccgaaagatttcgagtagatacgcgagataagtcgctgctgatgtggacggctgagatggagcgtctcttcagcgcacgcgcatctgacggtccagatcaggcgcgaagaagggatctctgcgatctcaaaaattgtggtgatgatggctttaaataacttcccacctctccacttgacgtcacgtcaactcacacgactctaaaggtaacttctctcctcctttattatttactgcgctttgttttgtagaggtagaaaaatctcgtcttttttttcttattgctatctccttcgtttctcttctattccctcttactcgatctgccttctttgctcttttctttcatctctctcgtccttctctgtcgaaatcgaaagatgatcgacttcgaagattcccagaataaaagcaaccacagttacgacaacgatgaaatttcgttcgagacgaggtcggcggcgttaccgccgcgagtacaaagacgcgtcataaccctaggcagaatgggtccaattcgtctgccgtcaaccagagccgacaaggcgaagaagaaaaaggctgccaagcaaggaggaggcactccgatgacgaacagcgacctggtcgacctccggaggagatgccaggttctggtggaggtaaatatgatactcccaaggctgccgctgcatcctgagaacatgtcggtcgggtggtgttgcgcttatgccaatttcttcgagaaatgtggcctatttttcctgattccggtgtgtatcctcgagatgctctactgtcatcggcctcgcctttccccagatgtgcccaaactttgtccgccatgtacaggcgttattcacccgggctcgggaagtaaacagagaattcagctgccatgacctacttcagctctgccaggtcaagaccaatgctaggagtgaccaagggacgtactacataagtgcacgtcccggatctctggtcctagttggtttgaaagcctgtcgagaaaccaattggcgatccaagtacttctttttcagagtagatcgtcattcagttggcagttttgatcccgcgaggataacaaggacctggtctaccaacctgggtcagatggagacctgagcttcttgatttttctttgttgtttgtgtcgaatccttgactgcttttgctaaacgttagtactgaaactaattgcttgtttttgatgatttgcagcaaggaccaaggaagttactctctcggagacggaacttgagctgttaacccttctccgacgtggtcagactgactggtccattttcagcagaaatcacatcgtagctgctcttgccgtagctccagcagttcccgtagttccagcagttcccgcaatcgttcctccagcaccactgctagattcgatcgaagaggtcccgcggattgaaccagttcccgaggctgatctgcctatagatacgagttccgttatattttctttggtttaaaaaatgtacgagttatcgagacagctgcgcaactcgaattgctaactaacaaatgtcgtgctctatttgttcagttcctcgagactccagctccacttcagaactcccgctcatcagaagaatgagacgtccaagccttcgtgtttaacgagccaat

SEQ ID NO: 22118 - DNA, 3155 bp, Arabidopsis thaliana
tctcacacaccaactttcgcactctctcatctccatcgtcgtcattgaattcaagcttcaagtgtcgtttaatcactcgcctccaagtcacaaccactcgattgcggcaactcacctcttcaccaaagccaccaccatcttctcttcttccgtgtgtccacttcactcgatccctcataataaacttcttcatcgcctcttcactcgatcgcgtcttctcttctcacattcgcaaccgaggaatcattcagctcacctccgcctctcaaccaccacaatcactcgaatcaccgctcctccattttcacttaacctctttcaaaccgcatcaccatatctcctcctcttcaagctcaccactcgacctacgcatcactcttaccacgaaacgaacttcactcggtcgtacgaaatcacttgatcaaccgaaagaaaagaaaaaaaaaaaaaaattaaacgaaggtttactcgattacatcactcgaccggtttactgtgttggtttgtgtttttggttttgttgagactaacttattaacgtttatctttgagtttcaattgtttacaggtttgatcatgagtaactacagtcgagaatcctctatggatcctgattataatgtggatgaagctgagtcctggtcctctagaccggagagagaggaacatgtttacgagagcttcagggatgaatttcaacgctcctctgctcgacgtaatcagagaagagcagaaatcaccagagggaagagagcgatgcccagtagatatgagctgattgatgaggacatcaaaactgagtatgagccaaagtcatggtgcaagaagacgaagctactgaataaacccgaataggttacagtggaggagtatatcagattctttgagatgaatgacttctggggaacgaggtatccgtgctatgagactttagcccagctggggttactagaggacgtgcagcatctgttcgagaagtgtcatctggagacactcatgtcttacccttaccctgcctataaggaggagacaatccagtttctttccacgctgcaagtggagatgtatgaggcactcacagactttgagctgaataccatggggttaggcttcttgacgttctcagtgaatgaacagcggtatcagctttcgatcaagaagttggaaaaactgtttggtttccctagtggaaagcgaactaaacccagatttgacatagaagagcttaaggatttatgggccactatagggaacaatctaccgctaaactcggcgcggtccaagagcaaccaaatccggagtcctgtgatctgctacttttagagatgggttgtcaccgtcttttactccagggagtctacaggcaccgtgtctaacacggacatggagatgataaattatgtgcttactgggattctccgccggacgaaagggaagaatgtcttgagaggcgatctcaacaacgcaccaccagtaatgcctctgttgatccatctgtgtggatacaggaagtgggcgttgaggaacggaaagaagaaggtgagaggagcactatgcgtgggtggcgttgtgacgccaattctggaagcttgtggagtaccgctcaaggaaccagggttagcaccgaggatgatggacttagatcatttgtgcagatgtgagttcttggagtttgacatggctgacgactttcaccgctacaggttcgagcattcatcgattagaatcgccaacattcttctcccctgcattgacgctactaggattctcaagggcaggaacattgacttcaagcctgcgcttgaagatctttatttcgagggcagtccgccaactgtggagatcagtcacaccgaaggagctacaacagaagatgttgatgagtcggatgatatagatgaggcagagtttgacacgagcatgtatcatttcagtgtgcatatatctcctgcgagggaaagcaagagtttgagggaagctcacaagaacaacagcaagctgcagaagtggtgcaagaaacaggataagttactcgccaagttcctcagggctatcaagtttctgaaggacaagatcagctgctcctcttccactacagctatcccgcagggacatcttcctcaggacatgccttcgaggagatatgacgcgcccgaaccaagtcagcgcaggcctgagcctagagagcaggagattccgcatgtccctgcgaggcattcatcattcgagcctcgtgaatctgggaggaagaggaggaccacactcactcgatctagcagtaggagcagacgacttctgcagtttcgtagtttacgcgaccgcggggctggccgcagcagaaggagagaggtcgagtatccttagagcggtgatggccgccagagagctgatgaggtcgagtacccacctgctggagctgatacggaacaaggtggttcgtctatggcgtgggagcaatcacaggcagccattgacgagcaactacgttcattcttcgactgaggtaagcgcctcacttcaccattgtattatatcatccgctgtgatttgtttctttattttgtttcagtgattggatttgtcctgagtactctcttccaagtttattcgcacagtggactgtgtgatttaagtttgggggagggctcaggaagtgtgtgttgcattgtatatattcttgagtctgcattcatctaaggcatagaaaaaccaaaaaaattttgaaaaatttcagaaaatgatttcacaaaaaaaaagagtgttcatgtagttgcattacatgtattatcgagtctagagtgtttcgtttaggattgttgcatatgcatatgggataatgatgagatagccttgtaagcattttggttcaccaaataagctcagtgccctcgttgtcagttgtttgatgcgtagtcattgaaattgcagtaaaactgcaccatgcctagattgctctgctcgaccacactgtcatgatgtgataccattcccgtatcaatttgaacctgaatctgatctttaattatcatgtctgcatcaaatttgaactcatggataccctaaaatacgtggattttcttattcgatttggatcactcttgttaatacaagtagctgactcgccttattagagcagttaaccgaacccaaaccta

SEQ ID NO: 22119 - DNA, 2173 bp, Arabidopsis thaliana
agtcaaagaactagtgagttcgatgaaaatggaagtggaaagcgcacgaagcaactgattgtatctcttgtgtatggaggtttactcgggacacaaactcacgacttgttaggaatatcactagagtgtttacaaacaaatttgatggtcccttctacagctggacatgtgtacctcaagagagacaagagaaatacttcatcgagtttgctgttaagtgttctttcagcccttcttatatatacgctaacacttcttttttttactgacattaccttttctatttgtagaaaacacaccattgggatcctttgatcacatggactgttcagttttacttcaatgagatttgtttaaggcgaatgaaaggcatggttagcactgcaagaactagtcaaaataaacctaaatggatcggaaaaactctatggaaaacaatgactgcgtactgggacactgaagaagctcaagaaagaagtcaaatctgttcaaatgctcgtatgtctgaccgtaacggtctaggtcctcacatacccttctcacggtcgaagtcatatcatcaaatccgagacgaattggtaagtcttctctctgtttactcctttgcaactttaatctgatgtttctctacttttctatgacttgttttttttttcattacaggaagagcaattgggcaaaactgtcaatattggtgacgttttcatcaaaacacatacaaaacctgatgggacgtatgttgatcgaaaggcggagaagattgcggagttatataagaagaatttgcaactgaggcagtctgagttcgaggctgaagcttcagctgtttcagatggcacttcgcgggcacgggagctcacagctgaggattgtacaaccatatttcttcaggtaacgttttatgtttcccaatttagtgttttcgagttgtctttttcattctctaatctcagcttttatcatactttgcagtccactgagagggattcgagaggcgttccttatggagtaggaagcctcaaagagtctcttgtcaatggcaagcggaagcaagcaggtgactcaacttcttttgtagctttgcaagaacaattacaggaagctcaacgcaagatagaagagcaggtctcttacaatcataggcgtgaatctaagatttctttgcgtgaagctgagaattcccgagctgcagatgagcagaagaagaagcttgagcacttgtccttagtggataagtttttgcgcgaaaatgatccttggttcctcaatttcctcgaatctcattcagctaaggagacaaccatagatcctatctcaccctctccagctgcctctccctcttcatctgcttcataggtctgaatcttaactccttcctcaagactcaatatcacggctcaacgtatttatatatgtgtacttgtgttgcttgtacttatgctgaacaaagttctaagttgtagtgaatcgaacatgtttttgtaatttgggttttgtacttttctgaaatgacaataaatttgtgttcatgcttcttgtattgtgtttatgcttcttgtaattttttgttttctcaggaaggtttccatctttagaacaatcatataggtgttctaataacaacaatagtcgcaatttagtcatcaaaaatgtaaccaagcagtcggtttttgataacaatttagtcactaaaatttctgactaattgatatttcagtcgcaaatcagtcttaaatatagtgacaacatagtcgtaaattttaacgactaattacctacaacgactacataaccctcaagttaatcgttaatttgtcgtccaatagtcgctaaatttaacgactaaaatgtcactaaaaaagcgattactttaacttagtcgtaacttagtcgctctttggcgactaaaatacgactaccgtatttaccgactctcgattagcgactaaatttaatagtcgtttatttgtcgtaaagtggtgttaaccgactacagagtgactactactgaagtcggtaaatggtaattttcttgtagtgttgtttaacactgctttgtaatgttatggtttgtacgaattcattatccttctcatcaacggtactgaattttatctaattttaatgcttatattctcataattttctaagccaatatgatatgtctataatt

SEQ ID NO: 22120 - DNA, 2262 bp, Arabidopsis thaliana
cagcctcataaactgaagctctagacaatcacgtgcctccggtggaaaatacttagactcaaactccttcttaaacatttcccaggtgataggctggtcgcggtatcgtgaaacaacactatcccaccatgctcgaccatcctcatccaaaaagtttacctctatctggcccttaaagtcttccgatcacctggaagtttcaaaattcatttccagattcctcaaccatttatctgctaaaacagtattctgctctcctttaaacttccgaacacctaaatccttcatcatcataaccagctttaagaacttggccgaaggagattcgacacgatggctttcgaggatctgttgttggtgttgttgttgttgaatcatatgagtcaacaaggtctgaatcattcccaacgtctgttgagtctctagcacactttgaatattacgacctcccccatttccttcattaacttctcttggcagcgatggatttgggtgtgcagtgggttgattcacaggaacatgtggtctcgtccctgagtgggaccctttggatgtgctatagtgcacagaccttggaaaggagtattctggtttggttccaggaacatcccaatcaggcgctgcatacatattggggtaatagtatccctcatctccttcccctccagcgtatgttattccctcataaactggtgagaaattcatcgactcactcctctccactctttgaccagacatctgcatccattcaaccaaggtcaacttaacccatctacctaataatggtgaacagaccgaattaccctaaatgccttttgcgcgagtcctgctagcatcattaaccatgctttaataccacaaattgtaacgcccccgagacgctctatgaccggacaagtcacgggcgcctcgaaaacgccacattgagattgatcatcaatatccaactgaggttcgggaacccatcccaacccttggccggtgtattgacgaccactctcccacttaaaacattgtttaggcttgccaacccttacgatatttaagtgttgtgccgattcagactaagtcattatcattcattactcgcaaatttgtacaagaaacctgatttatttcataagtatagatattttacaatatgttaccaaacatttataagttttatggccaaggcctagtgccaaaagcacggtacataatagaaacatacttgttttacaaaaggcacaaaactactccaagtttcctattgtccaccacgcgctctaatcctcactatgggttttctgcaaaataagtagaatcatgagtaatctaagattactcagtgaactcgggattccctgcaacagacattagtttaccccaacccaaatacccaacatggaacacacaacaaagcatggcaacgtaaggtagcttgccgaagcaaactacaaaaatatgcaaatgcattaagactccagttttagtaagttttaaagggcccgatatgctttcttcaaacccaacaccaaacacacacactcccgtgatctcccgcgttacaaccacaaaggtatgcaaccggagcatcactaccaaacgttacaccgtcgtgtatacactcggccagggtagctttccccgtctcttcgagttctttgcacttcatggtgataaagtaacatcgttacaagaccccacgatagcatggttcactacgaaggtcagacaaatcacgatcttggcacgcttatggtctttgcctcctaccacaaacacatcgtaccaagaccctaaagtttaagatattatgaaaaatatggctaaatcaaataatagaatcatcaatatcccaacacaacctcccaaccataaacaatagcataagaatctaaagatcacatatgcaatccaatataaccattcacacaattcatataactcacgaaatcaatcaagaatgcataagaatatgattttgaaacttaaacaattttctagaactcactcagtaaccaacaggatgcgtgcaatgattcggaaagaaattttggctacaggaccttaacttgaatcggacgaacggtctttaactcggcagcctctcactttcgttcactttctcttcacaaatcatttcgggtcgagttgggcttgaataggcaaagcaagggcgtgtcagcatgtacacatgtcaaacgcttgggcgagtcagcaatccacgtgtcatccgccatgatgaccgctcacagctttagaagatgagtgacatgt

SEQ ID NO: 22121 - DNA, 1988 bp, Arabidopsis thaliana
gtattaacgtttatttttgagttttgtccgttttcaggtttcatcatgagtaactacagcggagaatcctctatggaccctgattacaatgtagatgaagctgagtcctgatccgctagaccgagagagcaacatgtttaccagagcttcagggatgaattcgaacgctctgcagcctgacgtaatcagagaagagctgaaatcaccagaggaaagagggcgatgtcaagtagatatgagctgattgatgaggatatcgagactgagtatgagccagagtcatggtgcagggagacgaagctgctgaacaaacccgacgaggttacagtggaggagtatatcaggttctttgagatgaatgatttctggggaacgcggtatccgtgctatgagactttagcctagctggggttactggaggacgtgcagcatctgttcgagaagtgtcatctggagacactcatgtcttacccttaccctgcctataaggaggagacaatcgagtttctttccacgctgcaagtggagatgtatgaggcactcacggactttgggctggataccatggggttaggcttcttgacgttctcagtgaatgaacagcggtatcagctttcgatcaagaagttggaagaactgtttggtttcccttgtggaaagggaaccaaacccagatttgacagagaagagcttaaggatttgtggaccactatagggaacaatctaccgctaaactcggcgcggtttaagggcaaccaaatccgaagtcctgtgatctgctactttcagcgatcggtcgccaacgtcttttactccagggagtctacagacaccgtgtctaacacggacatggagatgatagattatgcgcttacagggattctccgccggacgaaggggaagaatgtcttgagaggcgatctcaacaacgcaccaccagtaatgcctctgttgatccatctgtgtggatacaggaagtgggcgttgacgaacgggaagaagaaggtgagaggagcactatgcgtgggtggcgttgtgtcgccaattctggaagcttgtggagtaccgctcaaggaaccaggtttagcaccgaggatgatggacttggatcatttgcgcagatgtgagttcttggagtttgacatggctggcgactttcaccgctacaggttcgagcattcatcgattaaaatcgccaacattcttctcacctgcattgacgctactaggattctcgagggcaggaacattgacttcaagcctgcgcttgaagaactttatttcgagggtagtccgccaactgaggagatcagtcataccgaaggagctacaacagaagatattcatgagacggatgatatacatgaggcggagtttgacacgagcatgtatcatttcagtgagcatatacctgctgcgagggaaagcaggagtttaagcgaagctcacaggaacaacagcaagctgcagaagtggtgcatgaaataggacaagttgctcgccaagtgcctcagggctatcaagtttatgaaaaacaagctcagctgctcctcttccactacagctattccgcagggacatctccctcaggacatgcctttgaggagatatgacgcgcccgagccaagtcggcgcaggcctgagcctagagagcaggagattccatatgtccctgcgaggcattcatcattcgagcctcgtgaatctgggaggaagaggaggaccacgctcactcgatctagcaggaggagcagacgacttctgcagtctcgtagtttacgcgacgcggtgctgaccgcagcacaagaagagaggtcgagtatcctcagagttttgctggccgccacagtgctgatgaggtcgaatacccacctgctagagctgatacagaacagggcagttcgtctatggcctgggagcaatcacaggcagccattgacgaccaacttcgttcattcttcgactgaggtaagcgcctcacttcacca

SEQ ID NO: 22122 - DNA, 2241 bp, Arabidopsis thaliana
taaacggattggattatcttggcttgatgagcgttcaccgaaaacttggatgagtaatatgcgaagagagttgtttgtgtccccctacctggcgcgccaattgttgattctgaaaatcacacaataaatttgtttaaagggggtaaacaaatttacttaactctctcgctatttagtgaccaaagattcaatgaaaagaagaacaaggttgcttagagacaaagttagggttttgcccaagaacaatgaagaaaactagggtttttagtattaaatttcggatccttagaatagaggacaaacccctctatttatacactattaagacggttaaaagagttgttaaacttttatttcttcgaggattgaatcttctaatttcctttatctccaaagacttcctattttcaaaggagaaaacttctttttcttcgaattaggaagtcggctagacggtctccctacttcgggctaaagttggcaaatgacctccttattttggcccattaacaggctaaaccgggataccccggtttgattgaaatctcagtctaattcgtagttcctctggtttaagccggtattgtcggaggtgctaattccggcaccaacaccataccgcattgtgtttggacttgatccccgttggcagtccggtgacgaaatccatcgttatgtggtcccacttccattccggtataggtaggttttgtaacaacccacttggtacttgatgctccgctttgaccagttgacaagtcgggcacttggccacccatctggccacgtctttcttcattcctacccaatggtagtaccttttaaggtcgcggtacatcttgttcgacccaggatggattgagaacttcgattgatgcgcctctcttaggatctcctcctttaatgccctatcgttcggcacacatactcgaccgttcaccatgattgtaccattgttcgaggtttggtactcggtcttgttgtttagtgcccatccttttatctcttcgtcccgttcctgagccagccggatcctactaagcaggtcggcctgatcggcggctcccaaccctaagggttcaacttccttagacaaggcattcaaatgcaatatccccatcatgttaaccaagttcatttggttcctttccgcttccacttccgagcgcctcctactaagggcatcggcgacttggttggccttgtccggatggtatgctatgtccaactcgtaatccgccacaagtttcatccaccttctttgccttagattcaactccggctgggtgaatatgtactttacgcttttgtggtcagtatagatttgaaccttagcaccatacaaatatgatcgccaaatcttcaacgcaaatactaacgcggccatttccaaatcatgcgtagggtagttcttctcgtatttccgcaattgcctcgatgcgtatgcgataacactccccttttgcatcaatacgcatcctagtcccattatggacgcgtccgtgtacaccgtatatggctcaccttcctctggtaagaccaacactggtgcattagtcaacatggcctttaactccaagaaacttttctcgcactcctccgaccagttgactgcggtgtcttttccggtcagtccagtcatgggttgggccatgctcgcgaaactcattacgaaccttcggtaataccccgctagtccatgaaaactcctaatctcggtggcattccttggtcgtggccactcctggatcgaccgaattttctccggatcaactgatactccttggtctgagataatatggccaagaaaaccaacgctcctttgccaaaacaagcatttacataactttgcaaatagctcatgttctcttagccgttccagcaccgcccttagatgtttttggtgagcttcccaagattttgagtaaacaaggatatcatcaatgaagatgataacaaactcgtctaggaaatcccggaacacactgttcatcattttcatgaaggctgctggcgcattggtcaatccgaatggcatgaccacaaactcataatggtcgtacctcgtccggaaagttgttttccttacattctttggctcaatgggaatttggtgatatccgaggccaagtcgatttttgaaaacactgtgcgcctccaagttgatccacaactcatctatccggggtaaatgatatttgttttcacgtaactttattcaatcccaatagtcgatgtata

SEQ ID NO: 22123 - DNA, 751 bp, Arabidopsis thaliana
ttgattccatacgatctccaagtcttgtcgttgcagaatctctaagaagctaacgaaaatggtcagtactcatttctcaatctttaatctcgtttcgattctcttgtttagaacattagagactgccttaatttcttttccatcgtcgaatctgatagtttatgtggcgaaaaacaaagaacatatcaaattaggtttcaagctttgtcttttcttagggcaatcattaggttttaagagttttgaattaggatttcttgatttgattccttcaccacaagtccacaagtgagataattgactgattctggtaaaaaaatctgtgtaaatttcaggtccttcaaaacgatattgatctgcttaaccctcctgctgagctcgagaagaggaagcacaagctcaagcgtcttgttcaatcacccaattcgtttttcatggtaagaactattctttgttaattccttcatttcttgaaagttcaaaccttttagctgcctattcactttgaatcttcttgtcaattagatttggtttctgattacatcttttgtatgttatgtggttgatgtaggatgtcaagtgtcaaggctgctttaacatgtaagctttttttttaaagtctgaatctgtaaatgtttttggttataaatctatatgaaataactaagaaatgatgggtttggatttggtgcagtacgactgtgttcagcactctcagaccgttgtgatgtgtggaactgcagactttgct

SEQ ID NO: 22124 - DNA, 2074 bp, Arabidopsis thaliana
ggcaagcaaagactaagtttgggggagttgataagtgtgtattttgcatgttttgagcatccatttgtcatcactttagcatcatatcatcactgttttataccatttctcatcatttgtcatcactttacatgtttaggatagatttgcatgcatgttgcatatttgcgttgatttcaggtgatttggagctgttgacgagctatctggaagaagcggacctgatcatgtcaaaccactcgaccccgaggtcgagtaggagcttcaagatctcaacagatcactcgaccccctggtcgagtagaggacatcactacttcaccacatcactcgaccccgaggtcgagtgtcttcatcccatcacctgaccatcactcgatcacatcactcgaccccgaggtcgagtgtcttcaccttcatcgccagaccactactcgatctcgccactctaccttgaagtcgagtatctccatcacaaccactcgactacatactcgatggcaagcttcagagtcttcttcatcccgcactcaaccagacactcgagcacaaggaagaaaagaagactccagctattcactcgacctcccactcgactacgtgggttgagtacagttcttaatccgtcccaatacttcgtcgttttaagtattagggtttcggaatatttggctataagtagcatgtacttcacattttcgcagacaagtttttatctagttttattccgcagaccttgtgttctagaccttttgtaatccggatttctctttatctattcagtattcagtatttagtttctgttcttgatttcgtttactgttgttcattctgttatcatcctgctgttacacagttgttatcatgttttcaagttgttcaacgtttatgctttctgttatgatgtctgagtagtgaataggtttctgaggatgggttagagtagtgtagaattctcagtatgctaggtggttgagtattgattgatagatcccttctggattagttgttcttaatgcctattgctttctgatcaactggaatttgagcccagacatttccgcgcccaataggtgttcgatgaaatgtctgaaccactaattccagagattcgtggccatgtacaaggtattggttgcagggagcgttttggctttaacttgttcattcgtaatgcctgttaggttagctctcgtcaatggtgattgagtctgggactaggttaacttgagggtctctgttgcggtagcacttagatttggttaatgaacttgttgtctagggataatttattgagcatgtcaatcacttgtaaactgaggaaacgaaactacacaattcccccatccttgggaattctttatctgattgaattctttgtttactctattgttgtttactgcatcttgttatttgtcgcttaatttctacaattctttcttgttactcgacctaatactcgaccacccagttgtctggcaacagactgtgcagtcgagtatctgtattttattttctgtctgttactcgacctgtcactcaacctcacccagtgctctgcaaagagctgtgttggtcgagtgttttactgtttctatttgattttctgttttctgcatgttcacttaagactgctagaacacaccaaaacctgttattgcttggcttgacttagtgacttctgatcacatcttgattgttagcatcatacccattgggattgacagcctagaatactacaacgacatgattggtgttataggataattgaccaaaaaaaacctactatcagtttgcaggaagagacattgggaagaccgttccatattggtgaggtgttcatccagacacacactaagtcggatggcacatatgttgatcggtaggcggagaagattgctcaaacttatgggcagaatgtgagatcaaagctgtctgaactggaggctacagcttctactgtctctaatggcacttcacgaccttgggatctcacagtagatgagtataaagccatctttctcgaggtaagatattgtcatctagcagctgccgatgatattacaacagttgg

SEQ ID NO: 22125 - DNA, 2442 bp, Arabidopsis thaliana
ggatgtaatgcttcgggaagcatccattcgccccctatataagggaggacgcccaaggcatctcacaataatctcacatcatctcacaacatccaaaacaccataaatcattcttaaaggagtcccaacacatcctagagttgttggtcggaaagcgggtgcggctcggcgagtataactcgaccgaactgatgcgcatgctacctcccggtccaacggttcgatggagtgtagaggatggagagggtagacagttcgtcttaaagacgaatcggatctggtagaccgatcgttggaacggatcggccagagcgatcgtcagacggatcggattggccagacggatcggacagaccgatcgtcggacgggtcggatgggacaggccgatcgtctgacggaaccggtcggacagaccgatcgtcggatgggatggatcgagaaaagtgttcgaggaagcacaaggataagtgcatctgaacacacccaagggtcgcccatggatgcaatcttaccgataaagggagaaagcaccaagaatgggtaaggaacgtgattcaccatataggatcaacatcgcggtcgccttcatgtatctatctcctcagccatggtgaaaccgatcagagatcggtaagaccaaagggtgactcgacggataaccaacgggaaagtccacggtgggaaccgatggacaaaacggatgttggacccgcgagcaaacctaaggccgacggaagaaagatttcatgggctagcctacgatgatccagtggatgcggacccttgggtgtgataaggatatcgttcggaccgcatggatggatcattaagctgaaagctttatcgaccaccatggaccggacgggtaaacggttagtaaaccgtgggcggtcgtaatgttaaacgaccggaacggaaacatggatggttcgataagccgagggctcaatcgtccaccatgtagccggaggggcgtacgttttggagaacgaatggaccaataagccaagagcttgattcggccatcgtgaaccaagggaatcgtacgatccccgatctctattgttgtacttagaccagtggggttggttggttgtatggctaagtaacgatagggattggttcatcaattcacgaccgatgacgagtcgttgaacgaatggagtaaggcgataaacgggctaaggaatcaaatccgcatattggccaaagtatgtaacgatctagcttatttgttaagatagacgtttggtaattgaccgtgaaagtaggataaaggaatatgcgattgtttggcttagaatggttagcgaacatatgcatgtcttgaccgagtaaaggatcgatctaagtctaagggacaaagacgatgaaaccggtacaagagttggttagaactaaaccaaggttagaaagactttcgttgtgtaataagagagcgattatagaattaaacctcgtaaaggcaattctatgttgaatcgcgaaaaattaagaggttcggccgagaagaggcgcgaacttgagtacacggtcgccggacgccgagacgtccgggactgggtctcacaggtggctcaagtaatttgatttttggtttttagtttcaaactcaagccaaagaagaaattatcttaattggagagtacgagcccttggtttctttaagattgtgatttgttttgcaatttaaatctttgttttgacataaactttgagattcagttctctaagaaacttctttttcttcaacaatggcggcaaaaagagacaagaaagaaatggacacaacgcataactgaagcaaagacaatctacaagatatgaataaggactataatcttatacatatatgtaaccacatgttgttgtatatggcgtaaagtaatagtaacaaatgaggaaaagataggctatagacagtagtagacattgtttgttatctcttttcctctcagttttgttccttttgtgataaatagcgaaaaaccctttcccatgtttttttagtgagattatttacactttatttctcgtctcttttgatttttaaggcaattttatggctcaaggtctgagatatatatgatcatggacaagtatctcagtctcagtctatattacctaaagaaattcatcgtatcgtatttaagaaattcatctcatataactgaagatccaaaccattaaatataataacatgctatatcaccattatttatgagtgccataaaccctaaaacctcactaatctcattcttcctcgccggcaaaagaacaaaaaatcaaaactttggaaggaatggcggacatggatgatgaaatcacgaggcttttcaaggtgcgtcgcacggtgcttcagatgttgagggatcgaggttactctatagaagaatcgaacttgaacttgaaatgagaagatattttcaaagcttttgtag

SEQ ID NO: 22126 - DNA, 609 bp, Arabidopsis thaliana columbia
tgttctcattttatttcattcataccctactagcttaatcttgacattaaactcattgttttaacaaaataactttgtggaaatcaatccttaaatactgcaactgatctcttttttgagagagtagttcttagggtaatttgaaccgtatcaaatttggcgccgttgccaaagttcttgggaatcaccattgagtttagtttagagatttcgtctagtttttactttcactttgttactcacgctgtactcttggggatttcaacaggccttacctgttttatgctaatcgatcaatgatcgtacccccacccttccagaggaacgattttgagctgaagcctagctactttgctttagtaggccagcatcctttccatggcttatctcatgagcagccaatggaccatatcgagcgctttgaggaccttgttctaagcatcaaggctaatggagtctcagagaactacctactgtgcaagttttcccttattcacttgctggagaaccgcttcttggcggaaacaacttaaagcaggtccctcaagacttggagaagcacaagatagcttcttgacaatttctcgatgatgtaagcttaggagtgag

SEQ ID NO: 22127 - DNA, 547 bp, Arabidopsis thaliana columbia
tgacaagaaaaaaacagtagagcagagaagctaaaagtttaacctttggacttgaaggcgcaacatagttccaagctttagtgcatgccgtttatgcgatctgctcacgaaagaaccttcaccatctctctgattagagataaaacgttatagtctgttttaacaaagtcggaagaaaggaataaagtaacattcaagacctatcagtcatacataccactctgtatttgaactcttcccggatatcaacgtctgtaatgacagcagcagagaaaccaagaacaataacatggattgactctggagaaatcttcacaattttcccttctgcataaaaacaaagaagagaaaatcaccaaccataaacacataaaggctcactcacaagaaactaaaaagtagcagagatcaatacaaagtttaatagagatcttctaacctacaaaactcttgggcttaggatcaaataagagtagtctagtgttactctgacgccaaagtaaggatgaagtcctgtaaggattttagcttgtttgctttcacagta

SEQ ID NO: 22128 - DNA, 508 bp, Arabidopsis thaliana columbia
ggattacacaccttgaagacagtcgcaattctcagcctctttgcgtacaacatcgagtacagcatcaataagctcagctccttcagtgtaatgccctttagcccagttgtttccagcaccagattgcccgaaaacaaagttgtcaggcctgaagatttgaccataaggtccagttctgacactgtccatagtaccaggctcaagatccatgagaattgcacggggaacatatcttccgcaggatgcctcgttatagtaaacattgacacgctccaactgcagatcagagtttccaacgtaacgaccagtgggatcaataccatgctcatcacatacaacttcccagaacttggaaccaatctggttcccacattgaccaccttgaatgtgaaggatttctctcatcttctattttatctgaaatcaacattacatgaacaaaacagtaaacaacggattttgaaagcaaaagaatctgtatcagatccaaatgaaattatatcgaatg

SEQ ID NO: 22129 - DNA, 622 bp, Arabidopsis thaliana columbia
ccaacactcaaacgtacaagccaaggcatgaaactgagtattagacacacaagccaatcaaactttaataagtctcactaggctaaagattgagtctttaacaaaaagatataatttagaagcttaccgtcttgataggttcttcaggacgtcccgtggcacaatcaattacagtgtgaatcccgaccaaagtcgccggaattgtctccggtttactaagatccgcctaagaccacacaaaactccggttttagttctcttttggacaaatttaaatactttgagtaactttaaaggaagatgtgaatacgtacattgactacggtggcgccccaatcacggaggaaatcggcgggactggtcttggtcggaccaaacacctaacatcatacccttcatctaaagctctccggacgatttgtcttccaaagttccagtggctccaaccaccaagatgctcgtgggtcggactggtgtcccggagcaagattaacgctgcagactgcatgtaacggaactctattgatcgttccggttaaggatgaggatgaggagatgggaagacgggattgtatttcggtgtgaagacgtcgcaagcagacgccggagaggaggataagag

SEQ ID NO: 22130 - DNA, 581 bp, Arabidopsis thaliana columbia
  unsure (1)..(581): unsure at all n locations
gccagtgtgctctaaaggatcctttcaccttaaccctgatcacggtggtgttgctggcctctttctttccggccagagggaatttcgtccccttctttgaaaatctgaccaccgcagctattgccctgctgttctttatgcacggcgcgaagttgtcgcgtgaggcgattattgctggcggtggtcactggcgactgcatttgtgggtaatgtgcagcaccttcgtgctgtttccgattctgggtgtactgtttgcctggtggaaaccggtaaatgtcgacccgatgctctactccggttttctctacttgtgcattctcccggctaccgtgcagtctgcaatcgccttcacgtcaatggcgggcggtaacgtcgcggcacggtattgttctgcgtcggcatccagcctgctggggattttcctttcaccattgctggttggtctggtgatgaatgttcacggtgcagggggcagccttgagcaggtcggtaaaattatgctgcaactgctgctgccgtttgtgttggggcatcttcccggccgtggattggtgactgggtgtcggcaataanaaatggat

SEQ ID NO: 22131 - DNA, 516 bp, Arabidopsis thaliana columbia
acacagatgtatcctgaccgggtatgcttgagcactgtctttgaagaagaagaagttgaagaagaggaagaaaaagtgatagtcgaggataaaagcatctgcttgataacaacaccaatgcctagtttgaactctgaaggtttgggtaaagagaactgcttcaacggtgcagatgacaaggaatcagcctcgtctagaaggttgagaattcaaaacattttcaccctttgtggcaatcagagagagctgtctcaacacagtggacaggaggaggatcaagccaatattgcatcacctgataagaaagacaatcagttcttttctattacgaataaggccgaagcactagcagtagaagaagcaaaggaaaacaatatctcagtcgatcaaagggaaaacggtcagctagatatctatgttaaatgggaaacagctgctgataaccctcgaaagctcataacaacactgagagttacaaaggatgcaacactagctgacttgaggaagcttattgag

SEQ ID NO: 22132 - DNA, 655 bp, Arabidopsis thaliana columbia
  unsure (1)..(655): unsure at all n locations
cggaacaaacttcggacgcacgtctgctcatttcgttaccactcgttactatgacgattcgccacttgacgaatttggtacatccagaacccaaaagttaagccataccagctttgggtcgtaatcacaagttgacggttattttataggtttggagaaagctccaaaatacggtcacctaaaacatgtgcacagagcacttagattgtgcaagaaggcacttttttggggtcaacttcgcgcncagacacttggtcccgataccgaggtaacctaaaccaaaaattatgttatccggtttttgtaaaccggagcttaacgattcaatactggttttgcaggttaggtactacgagcagccagggacaaaagtgtgtgcggctttcttatcgaacaataacacaagagatactaatacgattaaattcaaaggtcaagattacgttttaccgtctcgttctatcagcatcttaccggattgtaaaacagtcgtttacaatactgcacaggtgagtagaaataaccggttcgatttggttaaagaaaccataatgtttgatttaccgcattgttctgaacagattgtagcctacacagttggtagagatttgcaagtcagagaagcaagcaaaggtctcaatttgagatgttagtg

SEQ ID NO: 22133 - DNA, 483 bp, Arabidopsis thaliana columbia
cgactctacctgcacgtttgatgtcttgatgaccaaaaacggttggggccatgcttccaactaacttattgaagtaatcaggagtatttctcatctgctgaatttcatctaactcttctgcctgcaaagtttaaataatcatgtaagagaaaaaccaggatgctgcggtatattaactcttaaggacttataggtagtttatttcaagcctcaccgtgaactgctgttgatcatcttcgttagaatcattttggcggttcctcatgtcagtgttcctactaccatcagcaatctagaaagaaaaaaacattgatattgatcaactggtatcacttaagttatggcttgacagatactaaaaagttgacaaacctgcactgaattagcgataaaggcaagccgatacgaaagatctctaactcctagagccttgagaccttgaacaccttcatgtccagcagtagagcttttctgctgtgatga

SEQ ID NO: 22134 - DNA, 539 bp, Arabidopsis thaliana columbia
caaaagcttcgacactgtcgtgttgattctcgccagatcggtattcacagcactcgctagactcaaatccgtcttctcctccgccgcagccactgggtacatggttccgaccgtcgtgtcttctctccctcgttctctctcttcttcttcttcctctatgaatcttgttcaccctagcccaaacgacgaagagagagacaagacgacgacgtcttctgcgtttcttgaagaaagctcaagactattgaaaccaccggagacaactctcggcggacgtggtgtggcgcttcactacgcgaatctgatagtagtaatggagaagatgataaagcaacctcagcttgtaggtcttgacgcgagagacgatctgtattcaatgttaccggcaagtgtgagatcgtcacttaggtcaaggctaaaaggagttggtttcacggcgacggacggtggtttagcgacggagtggaaggcggctttaggtcggatcttacggtggttgttacattggcgcagaatatgattaggtggcacagtgagag

SEQ ID NO: 22135 - DNA, 538 bp, Arabidopsis thaliana columbia
ctctcctccttgcattctcaccaggatgaacaaaaggacattcagtccaatcatgtgaataagccctagaacatggcttaaccttaaagctaaacatcctaaaatcatcagttccataaacaccttcgttaatatcaggaagtgatgcatcagctggatacttagtcacaacactcttcagttcctcctcctcttcttccataaccgaaccatgaatcccggtcagtaaaacctcaaccgcctttctactctggttaggaacaaaccgagaatctttagccaacaaatcaaccggtttgttcccattagcgtcaacacaattaggtgaagcagaagcatcaagcaagatcttgatgatctcaacgatagaaacagaacagccagaaactgcacagtgaagagcagtgactttctcgtcactgcaaactctgttcacatcggatcttcctgtggcaattatgtaattcaacacttccatgcttccatacatagcagcaaccataagtggtgttctttcttcaaaacccatcttcttaga

SEQ ID NO: 22136 - DNA, 550 bp, Arabidopsis thaliana columbia
tcgactcagagagtatccttctccattcttcatcccgtgataacgtgtcaccacttggccatcttggtcatagtcaatgttcatactccttatatgagtttcagtaaaagtaacatacacctttcttacaccgtcgaaattaggaccatcatcccaatattcgcctccggttatgccaccctggagttctgatttggtaggagcagtctttacatatgcaccaagagatcggaggctacgccaagcagatccatggaagccaacgatgacttttccatcgactccaagtgaaaacttagtacccttttgatatccaataaattctgaagtcttgaggttggttttgaattggagtgcttgcatcacaccggtcttccagtcgtagtaaccctcaacagatacaatttgttcatactggagatggtcaatctcaaactgcaaagcaaatatggcaaattacgagaagatgtaagtatttgatttattacatatataatcataataataatgaagttttggttgtaactaaaatctaattttggctagattt

SEQ ID NO: 22137 - DNA, 557 bp, Arabidopsis thaliana columbia
gatgctataaaagaaatttctgacttggatgaatgtattcgttacaaggcacttacgaaaatttatcatttgggaatacaagacgttttcgtgagcatgtcggtggaagagaggctaggatggattcaaaccattatggaataatttgagcttaatttttattttctttgtttttaaagtttttaatttggattcaccaaaattattatgaataaattctttatcttattcccaaacttcaaaactctagaaaacttgaaataaaaaaataaaaaactggtcaaagttttgttagatttcgattagattataaaatcatttgttatagagttcatatctattagaaaaccaaatgacatcatatatcactgaaaatagacttccacgacagaatgaatagtgattcagtttaaatgaactcagatgttttaaaatctgataaacttcaactctaatggagttgacttcaacttcactaaccaataacaccacctaaacttataaaattcagaaaaataatcataaaccggaaacaaagctaattatggatggaagag

SEQ ID NO: 22138 - DNA, 514 bp, Arabidopsis thaliana columbia
  unsure (1)..(514): unsure at all n locations
ttcaaaaattaaaattaatagatactgtatcaatatatttagttccattttaaaaaacatgtacataccagaatcttttatttttaaaaaatgggatttaataaataatttctgttattattttattttttaaactactagctatcttaattcatagaatgattnttttagataattaatatgatatttagtttcgtgcatgcatgtttcatctaatataaaaggtatttagtaagccaattgattaacaagaaccattaaactacattataggagttaaattaacaaaagataatataagagccctatattagcaattatgaagatattttggatcacgagttgcaatttcttgtaaattgattttgggaagaccgaggagacgagagacctactatgggataatcacggcgacaacaacaatggctttctctcctaatcctctctctctaagcgtccccgatcctgctttcgaatcttggcttcgagattccggttacctcgagctcctcga

SEQ ID NO: 22139 - DNA, 752 bp, Arabidopsis thaliana
  unsure (1)..(752): unsure at all n locations
gttgcagaaggaatgagagcagcaaacctagaagagaatgttaagattgaaaatgtacatgatgaagaagcacctatgagaattgttaagaactggaagaggccagaagacaggatcccaacagagagagatccaactaaagttgttatatcaccaattactggagagctgattcccattaacgagatgtctgagcacatgaggatttctcttattgatcctaagttcaaagaacagaaggatcggatgtttgctaagattcgtgagaccactcttgcacaagatgatgagattgctaaaaacatagtcgggttggcccgcctgcgtcctgatatctttggaacaaccgaagaagaagtctcaaatgctgtaaaagcagagattgagaagaagaaagatgagcagcccaagcaagtgatatgggatggtcacacaggaagtattggtcgcacagcaaaccaagccttgagtcagaacgctaatggagaggagcaaggtgatggcgtttacggagatcccaatagcttccctggtccagctgctcttccacctcctcgaccaggtgtcccaatagtccgaccattgccaccacctcctaatctcgccttgaacctccctcgtcctcccccttctgctcagtaccccggtgcaccaaggccactaggtgttcagatgatgcagcncatgcatcaacaacaccagctcacaatgccagggccacaggacaccagcagatgatgatgaccgaccac

SEQ ID NO: 22140 - DNA, 562 bp, Arabidopsis thaliana
atgcatgaataaagaaagcccacagagaccaaccagattgttgcatgcagatgcaacatgtggatccttctctccaaaaccttccttagcttcctgtattgccgaaccgaaaagtctctcagccggctcgagtttcccctataagatagagcaaattatctagcaagataaacatagcttgttcaaagaaataaaacacatattaagcttcattattctcaaacatcaacctgaaagaaataatctcttccactatcagtaaacaccctccacttagatgtgtgtatattagatacaaccgacccgtcctcaattttttctagcccagtattgccactctcatccatattatctccagatttcgacttcatagactcatcctctgccaatacagtgttcccacaaaacccaaggattgctgaaaaggaataaaccatatcatattatatacagaaaaagaatgagaaattcgaatcataacgtcacaaagacatcaacattgagcacacatacacaccagcttgtccagataagataatcaaagccgagaatcaagagatgc

SEQ ID NO: 22141 - DNA, 1051 bp, Arabidopsis thaliana
gtgttggctgctaagaatctgggagatgaagcttacaataactttctggatcatacattcttgggagatcgaaaaacaaccatcagagagtatttaagcagcacagggtctggtatcatggaagaagaaccaccggaggctctaaagtctagatatggaggttgatcaaaaaccaacaaaaaaaagttaaactgatttttatcaagcttcaaacgttataaataaaaacgaacttataggttgtgtaatgtttaatttgttatcgaagctagttataaaattaagaaaacaaaaatcaacaaatgtcccacatcgggagttttagaggagggtagcgtttctttggcctatataagagaatgagttttgtcatattatgtaacccgtttctgtcagaggtgaaggatgatccgtcaatgatcgtttagagacggcggatcgtgccgacacagaatttgacgaacatgattttcaaggcgagtgggccttgccttactttggttgggcctgccgtcaatttttggaagcctcgatctctcaatcgaggttctgccaaaccaaaagtggatactttaaattgaacaggatcaaaccaattaaactgaaccatatgaaccaaatttgatgtcagtcgttaccaaatccaagtgggggcttctgtttgagaattagatcatcacaataaaggtcttctgagtgttgatcagccaagaattctgctagtccactaatactctttctacatttgaagaaaaaacaagtaaactctgtgtataataaatatttataatgtacagttgatgaggatgatgaagctgagggagctcatgacgagtgtgaatcacactcgagctcagtaattaagagttccatcatctttttatacattggcatataatgatcgtttatcattgttctcgatagcctaatctttctgtacagttctcttggcgtctcatatatccttacacgctccaccgtcgtcgttcccactaccaccacttcgtcacgctctgtttcagactctgtctcagttactgacactatgtgc

SEQ ID NO: 22142 - DNA, 2753 bp, Arabidopsis thaliana
actccttatcatcaatagacgagcgggcacgtggaatctccaatagggtgtaaaagcaattttagagaaactgtggaagtacaaggaaagattggtctgctaagctcaatgacacactatgggcttacagaacagccttcaagacccctattggcacgactcctttcaacctcctctatggaaaatcctgtcatttgcctgttgaactcgagtataaagccatgtgggcagttaagctcctgaacttcgacattaaaaccgccgaggagaagcggttaatccaactgaacgatctcaacaagattcgcttagaagcctatgagagttccaaaatctacaaggagcgaaccaagtctttccatgataagaagatagtctcaagagattttaaggttggtgatcaagtgttgctgttcaactctcgcctgaggctttttccaggcaagctcaagtctagatggtctggtcctttctctgttactgcagtccgaccttatggtgctatcacgctagctggaaagaatggagacttcacagtcaatggccagcggctcaagaaatacatgatagatcagtttattccagaaggaacctctgttcctttggaggagcctttaaacgcctaatgagtatgaggagtcaagctagagacctaaaacaagctcacttgggaggaagtcccaagcctacctttgtacatatctttcattttccttgttgtttttgatgcatcttgttagtgttttcaggagataagtttgaagagttgctggaaatagattctggctttgaaggaacagcaatacactcgaccacagagcaatcaaactcgacattgttctggcttcttcacaccaggaaatcactcgaccacaccctatagagaccgaatgacgatgtggtcgagtatagcgaatgatgtagtcacgacttctccagtcccgtagcttacgcgaccgcggtgctggccgcagcagaagaagagaggtcgagtatcatcatagcggtgctggccgcgacgaaggagaaaagtcgagtaccccagggggaagctgagacacaacagggagattcttcgatggcctgggagcaatcacaggcagctattgacgaccaactccgctccttcttccactgaggtatgcacatcacttcaccactgtaatatacaatctcttgtttttattttgtttttgtgatgtgttttgtcctgagtactctcttccaagtttggtcacacagtggactgtgtgatttaagtttgggggagggctcaggaagtgtgtattgcattgtatataatcttgagtctgcattcatcaaaggcatagaaaaaaccaaaaaaaatgaaaaatttcataaaatgatttcacaaaaatagagtgttcatgtagttgcattacatttaggatcgagtttagagtgtttcatttaggattgttgcatatgcataggggataatgatgagatagccttgtaagcattttggttcaccagataaactcactgtggtcgagtagaacattctagtagaacaatctaggcatggtgcacttttacttcaatttcattgactacgcatcagacaatgcttacaaaagtaaccggtggtgtgccgtgctactcactatgcttaatagtattcatcccaactctcttgtaaatccctagaactaagcaagcattataatcaggtttgataagttcacctaagtaatggaacctagcacgcatctaaatactaggctcatctaaaatagttccagtattagatacctatggtgggcatacctaataacctaaaatcaagttctagctatttactctagaactaactagaactagcattaagaataatcaaagataaagaattctaaatatattatcctaacgggggttttgatctactaattcatccaaatccctaatgagaatccctaaacccaacaagagaactactcaagcatgatcatagaagaataaaacatgattgaataagaaatcaataatgaaattaaaaagagaaaagagtttagaagaatcttctctaaagggagtctccacaggattttgctcccaaaaataaaagagataatgagagttaggtctaaactagactttggagccattcttcccatctactggacccccaggtcgagtaacctcagctcaggccactcgatgacgccactcgacccgctggtcgagtatcacttcgccacaccacctgaccacactcggccgttcactctaccacgttactcgaccccctggtcgagtatcatcactcaccaccaacaccatcactcgaccgggcactcgatcacatcttcatagtctactcaaatttgtactcaaccaaacaagctgagcacaaggaaaagaagaggagaagacgaagtatttggaagcggcatggacctccatcggatcacgaaacccatctcggcccattatcactctatgggccgggcgattaggttattggcccgtctactatcatttatttcgttttgtataaatagatgtcttagggttttgtcgtgagacatctatttgacattgagtttttgcttcggttttattttctgtgttactctgttgcgccgcttttgcttctgcaacctgtaattcgagatttttccaagttattcagattccgcatttgatttcatctgtcatcttgtttctctactctttatctctttacttatgcaatattatcatttatctgcgtttatgtctttgagcat

SEQ ID NO: 22143 - DNA, 2301 bp, Arabidopsis thaliana
tcccatgttgtgtcaaattagggtttagttgagaaatgagctttgtgagattgattagattaagaaaatgtctgaattgattctttgtagtgtctcgtgttgtgttggtctgaaagttttgttcttaggatttaagttacgtgttttgttcttagggtttagttgggtaatgatctttgtgacgtgttgtgttggtctgaaagtccttgatattatagatgttactttgcagccacaatctattctcatgtttgaagagtcttgttgtgttggtcttattttgttgtttgcgagaacaggtagtttaagttgtgttttgatcttagggtttagttgagtaatgagctttgtgagattgattagattgagaaaatgtctgaaatgattctttgttgtgtctcgtgttgtgttggtctgaaagtctgaaagttttgttcttaggatttaagttatgtgttttgttattagggtttagttgggtaatgatctttgtgacgtgttgtgttggtctgaaagtctttgatattatagatgttactttgcagccacaatctattctgttgtttgaagagtcttgttgtgttggtcttattttgttgtttgcgagaacatgttttgttaagttgtgttttgatcttagggtttagttgagtaatgagctttgtgagattgattagattgagaaaatgtctgaattgattctttgttttagtctcgtgttgtgttggtctttggtctttgatattttgatgttctttgcagccacaatctattgcaatgtgtttgaagagccttgtcgtctaggtctctactctacttgttgtttgcgagaacaactgcttgtggctgcaaagtatcgtgtctgtcattgtgtaagtttagttctagatgatactttgcagccacaatctatgttctgctctatatgatctgtttgtactttgcagccacaatttatgttttcctagtctttggtctgatatttagatattttctgccatatataactgcttgtttttcttgtgtatggaggtttaatcgggacacaaactcacgacttgttaggaatatcactagagtgtttacaaacaagtttgatggtccctactacagctggacatgtgtgcctcaagagagacaagagaaatacttcctcgagtttgctgttaagtgttctttcagcccttcttttatatagttgattacacttcttttttttactgacattaccttttctatttgtagaaaacacaccattgggatcctttgatcacagggactgttcagttttacttcaacgagatctgtttaaggcgaatgaaaggcatggttagcactgtaagaactagtcgaaagaaacctaaatggattgggaaaactctatggaaggaaatgactgcgtactgggacactgaagaagctcaggaaagaagtcaaatctattcaaatgcccgtatgtctgaccgtaatggtctaggtcctcacatacacttcttagggtctaagtcatatcatcaaatccgggacgaattggcaagtcttctctctgtttactcctttgcaactttaactcgatgtttcaatgtacttttctatgacttgttttttttttcattacaggaagaccaattgggcaaaactgtcagtattggtgacgttttcattaaaacacatacaaaacctgatgggacgtatgttgatcgaaaggcagagaagattgcagagttatatcagaagaatttgcagctgaggcagtctgagctcgaggctgaagcttctgctgtttcagatggcacttcgcgggtacgggagctcacagctgaggaatgtacaaccatatttcttcaggtaacgttttatgtttcccaatttagtgtttttgagttgtctttttcagtctctaatctcagcttttatcatactatgcagtccactgagagggattcaagaggcgttccttatggagtaggaagcctcaaagagtctcttgtcaatggcaagcggaagcaagcaggtgactcaacttcttttgtggctttgcaagaacaattacttgaagctcaacgcaagatagaagagcaggtctcttacaatcagaggcgtgaagctgagaattcccgagctgcagatgagcagaagaagaagcttgagcacttgtccttagaggagaagtttttgcgcaaaaatgatcctcggttcctcaatttcctcgaatctcattcagctaaggagacaaccacagatcctgatctcacctctccagcatgctctccctcttcatcagcttcataggtctgaatc

SEQ ID NO: 22144 - DNA, 2660 bp, Arabidopsis thaliana columbia
tagaggagatttgaagctaaaccggtactaggtgggtacttattatatgggttgggaagagtttaaaagagaaaaagggttgaattcattgtttacaagaaaagggaaaaggattctaggagaagtaagctaaagaagttagaaaaagtctagtaaagggtttgagattgttaaagaaaaagattggattattgttagctaatgaagaagagtaaaaagccctaagcttaatagagattcaaaacagaaccttagcactaaagaaagccaaacccgctagaagtatcaaagaaaaaaagaaagcttctcctagagttaagagaaaaagaaaagaatgggttaagaaagagttcaaaagattatgaatgcaaaagggaagagttaagttcttaattgggatgggagattggattgccattagatcgtcattgattacactttgggtagatgggatcttatctctgtatgcataacttgggacttaactttagcattctactaaagcttaatcattcttgagagatcccctgttacttaagcctattctgtaagggaccatctttgtttcttaaccttcaccttagccaaatgagttcattgatgatgcattgcttgattcacgttccagaactaatgaatgttaaagggattggtagatttgaaagcatgtgtaggtcgagtataagagacggattgattgataacaaggcatggctaacgtttttgagtaaaattcaatcatatcgcatcttagactaccaactgggacattgattttatactttgcatgattaggatagctttgcatacatattgcatttttgagttgttttcaggtgatttgagctgtttgcgagcaaattggaagaaacgagctagaaccagaagacatactcgaccaccaggtcgtgtgcatccagcaccatactcgaccaccaagtcgagtgactttggagccattcttcccatctactcgaccccctggtcgagtatcctcagctcaggctactcgatgacgccactcgacccccttgtcgagtatcacttcgccacaccacctgaccacactcggtttcactctaccaagttactcgaccccctggtcgagtatcatcactcaccaccatcaccatcactcgaccggacactcgatcacgtcttcacagtctactcaaatccgcactcaaccagacaagctgagcacaaggaagaaaagaggagaagacaaagtgtttggaagcggcctggacctccatcggatcacgaagcccatctcggcccattatcactctatgggccgggcgattaggttattggcccgtctactatcattttatttcgtttggtataaatagatgtgttagggttctgtcctaaatcatctagtcgacattgcgtttttgcttcagttttattttcagttttactctgctacgccgcttttgcttctgcaacctgtagttcgcgatttttccaagttattgagattccgcgtttgatttcattagtcatcttgtttctctactctttatctctttacttatgcaatattatcgtttacctgcgtttatgtctttgagcatgctgtctgagtagtgacttagaattcttagggatgggatagagtagttgtggaatccgtagtctgtagaatggttaagttttagaattgattgaatccttttaggactagttgcgtttactgcttatttctttctgatcaactggaattcgatcccaagcattcccgcacccagaaggtgttcgatggaatgcttgatccactagttcctgagatatgcgtctctatcccaagggattggccgtttagagcgtttattgactttatcagtctgttcgtattgcctgcatagttagattccgttaatgggaattagtctgggctagctttgcttgaggatttctatcacgggagtgaattggtctgttgttgaacctgttgtctagggatagcttgattgcgcttgttaaccattcgaataggctaggacaccactctactcgattaccccatccttaggaaattctcgtctatcttatttctctgttttatcgttatcgcttaatcgttttcattacctgtttcttagtttttacaatcactcgaccaacttactcgaccacacccagtgtctggcaacagactgtgcagtcgagtatagctgtttcatatcctgtctattactcgacctgttactcgaccacatcctacttctggcatcaacctgttgtggtcgagtgattttagtaattctgttattgcttctgttttctgcctgttcgcttaggactgttagaaaccccaaaactgttattgcttggcttgacttagtgacttctgatcacatctcatctgtttgcatcacacccatttggattgacacctaaaatactacaacgacatgattggtgtttgaggaataattgactaaaaatatattatcaatttggcgccgttgccaattgggtgtttgtttgctatatttgagatttcagaatatttaagatcaagttctttttcatttttttctgaaagttactaactttgtgttatttttgtttgtctgttttgattcaggtactacgaatcactagcttcaccagttggtactcgttgtatgcaaacacgggcacgagga

SEQ ID NO: 22145 - DNA, 2558 bp, Arabidopsis thaliana
ctccatgcttcccacttggactccaactcctcgattcgcaactataccgtctattgctagctgcctaccttctgaaggagataccgccgtgtttacagagaggactattaaaaacctttccaaattgcgtccaatcaagacatccaccatattggcgtgcgagtctgctgaacaggtttgtgcagttgttgttgtacgtacattggtataaaaaaatgaagtacatacactctgaaattaacaatgatcgtctatgtaggtggatatcacatatattgtggacccagcagacagtaattgcccaaaatcttttgtatggaggaaagaaaaagaggacccaagagttgataacattttaaggatgttgaaatctgagcaggagtggaataaaaaaatgtgggttggaggcgatgatgcgcctaagaagcaagtccggccctcagcaactggagagagaggtaaccatatcttttcatcgtataacttatatcagaattaggttcctctaagagtagtaatgcatgatttaaccgtttaatatagttattttgaagaggcaaagacgggtgtcagatcctgttgaaaacaaaaaaaggaaaattagtcactctgatgatggtgaaggtggacccagtggtggtgatggtgaaggtggaccaagtggtggtgatggtgaaggtggaccaagtggtggtgatggtgaaggtggaccaagtggtggtgatggtgaaggtggacccaatggtgctgatggtgaaggtggacccaatggtgctgatggtgaagttggagacgaagcgttcgataagtatgcgggcgaattgaggagtttcttcaagaggcaaacacaacttttggataaaaagtttgaagatttaaaagtatttgtccgtgaagagatacgtgctgctctacagtcccaggaccgaaaggaagaaggcccacgatcatctcacaaatctgattcaccatctgagaaggttgagagggtgaccaaaactgttgagaaggtgaacaaaagggttgagaaggcgaacaaaagagttgagaaggcagctgaacaggtacagagaaaatctgtaaagaaatccaccaaaccaagaaaatttgttccaagaagatcttccaggttgaacaatactcccaagaaggctgcaactggtagtcttcctgttgaggtacgtctacagcatgtaccttgtgtaaatacaatcgaaaaaaggtttttattatgtgtacgtacaaccaaatacttaggaatgcgttatattggtgtttattcacaggaggtaccaggcaatgatggggatggcgaagtttcagcaaaacagaccgtctctgactatgatatggaaaacatatatttgggtggagcatcatcaactgaagaggtaactcacttgtgtaatagtcatgttataatttatgccttattatacgtacaaaaagaaatattactgaccaattgtatggttttgatttcgaaggaggaaggaaggaactcggagattgaagaagattcttccaagttacaccaaaatgtctctgactctgtaatggaagacaatgtcgatcatgttccatcaccatctcaccaggtaacttgtgttcttattatttcattattgtatgtacaaaatattttatgttctttatgttcttacttttgacataacagcccgaacaaggcattcctgatggtggtaactttgaagaactcctgcctgacccaatactgtctgacccagccattgagaaaatgtcagatgatgtatcttcctcgtcccatcaggtacaggagtacgtactactaattatagtgtacgtacagatgatttctaatttgtattgtttgcatttgtataggacgttgcgaaaggccttggtggtaatcgtgaagaagacgttgttgctcctgagtcacaacagttggaggagccacaatcaccggaggtcaaggttaggcaagaagttgcttttaaagttacagaagatggcaatcccagtgtacgtacaatgtttttgaaatctgtttcgcacctttgaatgttttgctgtgagtttgactaatagatggacatccatctccatataatgaggtcaggctgaaacaatttgtggggatggagaggaagctttgaaggaggataaatctccaaccgttgtagatgaagccttggaggtatgtgttactattttgctctttgtaacgcttatttgccaattagagatataaccaattatttggttactaaatatgaaggacactgcgttacctgaagcgaatctcagtgacccgtcttcaccaaccgtagttgttagcaaggtaagttcctaactaactataacattaaagtcggagatatcatttgatgtttgttatattgttttcattaggtgcttactcaattgaaggacgatattctcgcagaaaatgtatctaaaattcctgagaaggttgccgtccctgaagaggtaatttattagctaactattaataacattactgtcggagttataatttgaagtttgttaaattgtctggcggccgttactag

SEQ ID NO: 22146 - DNA, 2747 bp, Arabidopsis thaliana
catcatcgacgaagcaaaatccggcaattgtgggaggaggagttgagaaccaatcccgaccataagtccggttttagaggcaatggaagaagagagtgaagaagaagagaaagaagaagaagagaacgaataagaagggaatggcgccggaggagagtccttgtccgatgagaatatggaggatgagattgcagtggaaaatcgagtggaaaatccggcggctatggtaagtatttgaatgatgtgaaactggtaggacatgataatactattgtttctgggtaatactgtcattacttggatataactatgtgtatgaattctgggtaacattggtagtactaagattggtattatgtgtatgatttctgggtaatattgtcattactaggatataactatgcgtttctgggtaatactgtcattactaggaaataactacgtgtatgatttctgggtaatactgtcattactaggatataactatgtgtatgattctaggtaacattggtagtaatatgaatgaatgtctgttgcaggagatcgatgaggaaacagaagcaataccaccgctgagtatgtatttcccgccctcggaatatgtgaagaaaatcaagctttcaactcggtgctatattcacgaagtattgactatattcgataagttgcggcctgcaatgagcaagtccaagagggcaaggtttgagaaccatcagagttcccaacacatcttccacatgccaagagacccaaatcaccgacttattgggatgtggatgctcctttttcgcacggcgcacattgaaaggaagatagaagcgttgttcatcgtcaatgacgttccaatttgatatggtatatcggaacacgcattgatatcgggcttcaattgcaagaactatacacttgggtataaaaatcagggaaatttggatttcaagaagaagcatttcaaaaatactgttatgaaacgcgaagacatgagagagaagctcataggaatatgatataaccctatttttactgcttttagctatgatttaggtataatttttagagtctatttgttattctagagtcttttctatttcttttcaggtctttacatgtttgggattcatttggagacaatggagcattctggaggaaaatagagaatttatgctgctgaagaaattcggagactaaaaaccgcgtaggtgtcaaacgacaccaatcctggtgtcgagcgacatcaatacatgacggcaattcgaagacgtaacttattgatgttttgaagatctccaaattcggcccaaactttcgcctatgtttaatgaaggcccaacacgtttttaagacatatatatttttaaggtcaatgttgagaccctaagcttgaagaggctaatctccttatctcttttgtactttgggagcaaaaccctgtggagactccttttggagaagatcttccttactctttctcttgctattattgatttcttattcagactttgatttgtgtttctactatcatgtctgagtaatcaccttattgggtttaaggagtctcaatagggatttagatggattagtagatcgaaaaccgcttaggattattcttagagttcttcatcttgattattcttattgctagttttagattgatcacttagaatttgatattagataataggtatgcccaccataggtacttgttatttaaactatcatagatgagcctaggcatttaagaaataatagatggctcctagaaggggtctggtttagatactaggtgaactaatcaaacttgataataatggatgttttagtataggatttctcggattctccggttatcttagccctaagtatagagagtttcgcggaacaccaccgattattctaaaatcatagtttgagttcgagaacggtgcgataacaatcctaatattagctagatctgcaatttatctatttcccaagacaattccttagacccgacactttaatctccagaatatacaactcattttattgctttactgtcttttacattcatatactttgtctagcttaattgaaatcatcataagtctattgtgtgaacatcgagagctcagtggaattcgacccttaagtgctaacgacgatctgtctatttgaaatagtggtcttaggattaatttgacctacatcaaatttgacgtcgttgtcaaagttctctttgcttcaccactagactaggtgtcgatttaagtctagactcttcttttctttcattactaattcagtttttttttttgttttctgttttcttctgtttcaggagcttcaggaattaaattgcaacaccaagatgttgatagtaatacctgatgttgcaggagtgttaaggttcagagctggtcaggcatacaatgaggatggtcagaaaatcgatgagtagggaaacctgctacctgattttgccgagggtgacgatcgacaccaccagggtgttgctcgacaccaagccggatacagagctgcagctgttgtagatggacgtgccattcaacttgatgactacaacaggcctgctatgttctaggttagtcattcaagctattctactcaccaagcccacccttcacccacttctacgagtaggatggaatgcatgctagaacagattctcaagagccaagtgacaccccagcacaggctgagccagagttccttattagagctggttttcgtgttgagttcactactga

SEQ ID NO: 22147 - DNA, 2594 bp, Arabidopsis thaliana
ggaacgtctgggatcggattccagttaatcagaaagaaataagcagtaaacacaactaatttagaagggattcaataactctacacttaaccaacagattcgaccaggggttccacaactactctatcccatcctcagaaatcctaatcactactcagacaacatgcttaaagacaataacatagaaacgattgaagattgcatacttaagatattaaagggaatgaaacaaagatgaacaagcaaatgaaagcaaaatctgaataacttagaagaaaaatggaaatacaaagttgtaggaatgaaaagtggctgctgaataatagtgcaaaattcgtgtctctcaaagtgcatgtctcagggcgaaacccttaaagacttatttatactaagataagaaagcgggcttcgagccacttaacagcccatggacgacgtgatcaagagtgtcggctcaaagtgggcttcctgatggccttcgaatgggcttcgaatgggcctcctcttctgcctagctctagatgcagcaagcaatggtaacttcaacacacgttacccagctaatgctacagccctgatagagaaccttgcttgcagcaacagcaccaagaatgctgattttgagaggaagaagattgctagagctatttcaggaaatcagatcgcagaggtgaatgctaagctggattcagttcatacttgctcacatggaagaagcatgtctaatttgctgctgaggaagaaactattgagcctgaccatgagtcagaggaatgagtcttctacatagatggtgagggatacaggaagtttgggcagccacatggcaacttcagtggcaacaggtttacagggaaccaggtttcctccaactacactccaaagcctgctttctagaagacttttcctcaaagcagcttttagaggaactttaacgcccgcgatcctcaataggatcgctggctaggacttggtccgagagaagaaggtggagtctcggacaagtgagaaggagctggccataagctcggacaaaggagaaatcatgcaggctaagctaggatcgtaaagaaatcagttgggtcagctcgcccaaagctcaagctcagctggaaggagtgacggttactcaggtcgagtgacagtccagctcgggcagctggacgagtgacggttgagctcgaggtagctggacgagtgacggacgagctcgaggtagctggacgagtgatggacgagctcgaggtaactggacgagtgacggactagctgggcggttatgggcgaagagatacaactcttcggaaaggcgcaactcttcggaaaggtgcaactctttggaaaggtgcaaggaacggatgtgttgattcgggaagcatccactcaccacaacacaccgaaaacacaagaaactcaccattaaaactctctccctcttgggagaataaatagtcttaggattcggtagccgggctgtggccgacaataaagaaggagggtcggatcgacctaacctcgagaaggaaggtaagggatcctagactttgagtctaagggttctaggatgtgagttagtagccggatccttgaaaggatcgactagagggctgggtagtttccgggtcatgtgcatcctacacaagactcggtccgggtagggatcggctgagccgggacgcggctcggcggaggaccggcgggtcttaactgacctgccgagaatcggccagactgatgcgcgatcttcccctctctgaattctctccacggatccgagtagtgtatggcatatagagcattgcatggacttgcatatgattaagtaaatgagattacttatggctctatgactttcaggaacgaatggtgatcgtgggaaggacttggcttaagcgcgagagactcaaggccaggatgatgggtggtgatagttcggatagtctagggatcgattatattacttgtaatagcttatatgcaaactcataggttgtatcgaatcctttgcttaatcaataaagtatttgattggttgtttactctattcgcgtcatatattgaatcacggaatcatatggaacggattagactaggaaagaacctcataaacggttagggccgagtcacttagtggcttgggtcgagagaactcgtccggactttaggcagtctggattggggcctttcaagttggtatcagagcatgcttggttctaggactaggtgttgggttaaggggtatcaccccttgtcggcttgagaatctcgcgatagttgttctcgaacatatctcaaggctgggcacgagacacttcatgggcagtacggacccgattgtggccgatgagtggaggagtagactcaagaggaacttcaagtctacccgctgccctgaggattaccaaagggacattgcggtccacataaacagttagggccgagtcacttagtggcttgggtcgagagaactcgtccggactttaggcagtccggatcggggcctttcatcacccatcctagtactactctcgtccaaggacccttaactgcggagttctgatgggatccgttgcattagtgctggtatgatcgca

SEQ ID NO: 22148 - DNA, 2501 bp, Arabidopsis thaliana
cagccctcatttggttcctccatgagacttgtcgctctacccgcacaatctccttcgtattcccaggggcgtttaagtgagcagtgaaacctcatttgccaaatccttaatgaaccgtagtctatcccgacagcggccaacctctccaaaaacatttccacaacgccatttccaaccccaccaagctgccaatgcaaaaactgtggaccaaacactgcctctcacctcaccgtggtctcccagatttacatacaaccactcaagaatagacttctcaaagaaaaggcgccgtttgctcaccgggacaagccgtagccatattccttccattgcagggcaatctctgagaacatggataatagactcttccgctcccttacaaacttgacagatgctcgtggtactcaaatgtcgacgatgcctttcttgattcgtcataatggcttgttgtgctactaaccagaggaagagtctcactctctcaggcgcagtcacgttccatacttggtcaaagaatctcttcatatcttgtctcggcgcctcatctctagtaagaaaagaataggcggtgctcactttgaatctcccatcttgactctccccccacgatattctgtctctagctcccgttatatcatctaaaacaaccgattgtaattgtaatctgttataagaagatatatatggagctatcgccgccatatcccaaccgatcccatttctccaaagatccctagctcgcattcctttccaacccgccggaagctcctgaaccaacaactcagctagaggaatatttgttagccacttatccatccaaaacagaatctcccgaccatctccaatcacccaacttaagcccgggattaccacctctctcatacccaacgctacacttctccaagtcgatgagcagacgcttctaactttagtccaagcaccatcccgaacatcttgtactctgtacttacatctcatgattctcgcccataagctatgatgatcctgaattagacgccatcctagcttagagagaagagctttattcatatcctgagctttcctaattcctagcccaccttcactcctaggtttacaaactcttttccaggaaataagatgctgcttcctttgagttacagagctgccccataagaacgatctagacactttgtctaacccatccaacgttgatttcggcaaagcaatggtgctcatggtgtgaaccggaatcgacgaaagcactgccttggtgagtgtaactctccccgcaagactaaggaatctgcccttccaaccagccagccttgttgtcaatttttccaagatatcaccgaaagtgtccttattaattctcctctgaaggaccggcattccaaggtattttccaagctctctagttgagctaatcccactttcatcgcttatcaacttccccaagtcccgagacacattttcagagaagaagatcttcgatttctctaggctaactttttgaccagaagcaacacagaaacgttccagaactcgtcttatcacccgaatctgagccacagatgcttccgcaaaaaggattagatcatccgcgaaacagatatgtgaaagctttggtccaccctgagagagactaatgggtttccaatctttccgagcaatagaatgctctataagatggcatagtcactccatgcaaagcacaaaaagatacggtgacagtggatcaccctgacgcaacccccgttttggtctaaacgcttctgttcgctcaccattccacaataaactcattgatggctcagtaacacactgcatgatccatacaatccacttctctggaagcctaactgcccgtagagtatctccaaaaattcccagcgaatccgatcatatgccttttctaaatccaatttcaagagcatccaacccttacgcccttttttcctcctcatcgaatgaacagcttcttgcataatcactatattatcagctgccaatctacccgaaataaaactagcctgagccggcctgataagcttcgatataacccgcttcaaccgcatcaccaaagttttagtaattgttttgaataaaacattacataaactaatggggcgaaactgtgttatcctttccggtttcagaactttagctatcaacaccacgattgcatcattcgtaccttctggaagtttcccggaagcgaagaagtccaacacaaaccgactaacagaatcacctactatatcccaacaatcctgataaaaaacaggttgaaagccgtcacgccctggagccttatacttccccatgcttcgaattgatgtctcaacctccaagggattaaacggcttgctcaaattagacatgaaaggccccgatccggactgcctaaagtccggacgagttctctcgacccaagccactaagtgactcggccctacccgtttatgaggttcttcctagtctaatccgtttcatatgattccgtgattcaatatatg

SEQ ID NO: 22149 - DNA, 2375 bp, Arabidopsis thaliana
ggctaaatgaatatggacttaactaagtttacttgatgaattgagatatgatttgggggcgttacactcaggcctccaccgttttcacttaactaggaacttagctacaaacttcgcctcgaaactaggacacctggagatatgatgaccgtagcttttgtgcaactcgcagtattcctgctcgtttcctgcgggttggtccttcgtccaagtataagattctcgtctatgacctcggccgcagcctcgtcatcgacctcggccgcagcctcgtcatcgacctcggccgcagcctcgtccttgacctcggggtgtatcggtgtgataattgtgggctccaaagaagttttgtaccttgtggtgtacgaacgtcccgcctagagcaccctttttgtggctcgaagcgctaggttaggacttttcgccatgaggcgtttgcttcggcggctcctgcctattcgacagcagttccaattcttcttcatgggaaacataatccgaggctcagtgcaaagcgtcccagattgtttgtggtttggacatatttaactcctttcgcaattcgaacttgtaccaccgcgccttctttagagcagagagagttgcgacatcattcattcccttgactctagctagggtgaatcggaactttgtgaggaaatccctaaatgactcgttcggctgttgagacaacaactaaaggtcgacatcagacgtgcccagatcgattagcaccgagtattgattgaggaagagcgtcgatagctcctgaaaactgtcgacaaaatttgattcgagtcttgagaaccaatctaaggctggtcctttcaaatgctcaacaaactggtgacagagaccggcgtctctttcctcaggcctgaacttggcttgggccacataaattatgaaagacttcaaatgcccgttcgggtcggatgacccgttgaagtactcgatccttaactttcctggttctaaaattatcacgttggagatcttgcgagtgaaaggagtgttgtggaactcttctagaatgcgatcgatgtttagggctgaggagactgcgttatgcatctgagacctcatgagcttcatatcggtttccgccttggctaaggagagcttgatagtgtttatttcttgctccctagcatattcatcagcctatcgaacgttttcttctgaatcctcaccgttagagactttgatctggtcggcctcggcagcttcagctcgtggaataggaaattgcgggttggttcctccatttgatttgtcgcgttatggtctcccaaaactgccagttctgctcagttttctccgattgccggcgcggtccggcggaaaggcctcgtcttgttgccaggcatcttgaacacgagtcgcgtttgattgaggtccactgctgctcgtcgatcgtgaagatgctgtgcgccgaatcaggtagtcttgacctgtcctagggaggtagccgccttgagctactgtgccaaagaccggttcgcctattcctgatcgtccacctttttctggagttgtgccatcatgtttctcaattctgctaggactgcgggagtggtggcctcaggagcgttcgtctggattggaggaattaagtttccctctgcgtcaacgattgtagcggggatctggttattggtcattgttgattgatcggctggttctgtgttctctgagtaagagaaatctctacccatccttctagcgccaaattgtaagagtcgaaactaatcgaaattgttttagggttccttcaaagaacggatctttacgagactctcaaagaacaacagaattgtttgattactgtagacggtgttctttatattattattgaagtgatgatgatttgatcgtacaagtgtttagaaaagtaaaaaataggtgttttgccaaagtcagagcgttttgatagcataaagttgagagcgtttttgtgtgtgtccttttgttgtcccttgaggcgctttatataggaccttggtaaaccgcctctcgcgatattctcggaatatttcatgttatctacgagtcggcaataggggatcttttctacatggaaatcttccttattcttcgggagtttcaggaaacttccatattcgataatatccccggagattctttgatatccttcaccggatttctcggaaatgatatcttgacctttcgctgaattcgtacaagtattctcctcgggtggatattccaccttgggctcggaccgaatgtcacgctttccagactgagcccaaacgatccccgagatagttaaactcggctcgggtgtgttttctggaataacatttgaggtgcatagtgagaagagtaagtgttcccttggtctagagtcg

SEQ ID NO: 22150 - DNA, 2926 bp, Arabidopsis thaliana
gtatctgtccactccacctgtattatccaaacctgaggcggatgagaagctctatctatacgtttcggtctcaggccatgcggttagtggagtcttaatctgggaagattggggagagcaaaaaccaatttactacataagcaaatccatgacagatccggagaccaggtatacgatgatggaaaagcttgcacttgcagtggtaacctcagctcggaagcttcgtccgtattttcaatcccacccaatcgaagtgttatcaaattaaccgcttcgaacaattctccatagcccaaaccaatccggaagattggcgaagtgggcagtggagttaagtgagtatgatatagagtacaagagccgagtcgcgatgaaggctcaagttcttgctgattttttaaaagaattaccggtacttggaggacaggagcagccggaaaatcagtcttggaagttacatgttgctggatcatcatcaaaaaatggatccggggtgggaatcaagttagaatctcccacttcggaaatccttgagcagtcattccgattattattcaccgcatctaacaatgaagcagagtatgaagcgttaattgccggactcaggttggcacaaggagttggaggcgatgaagtggtcgcatattgtgattcgcagctggttgttaaccagttcaatggtgactatgaagccaaagattcacgaatgaaggcatatcttgaggtggtcaaagacttggctaaaaattttaagaagttcgaactcattcgcataccacgaggagaaaacataactgcggacgcacttgcggctctagcgtcaacatcagatcccgaagtcaagagaatcattccggtataatgtatttcagaaaggaccattaaggaagaaaaggaaacactcgtcgttacaaggtctcgagccgcagcccaagatcgcggtgaacctgcgatcgaagtaccacctgtcaaaagacgaaagtcaaaaggagcaaccgtacctaagcctgttgtgcaagaagataataggctcgaagaaaatgttgaaccagtaacagaactcgccccgaaaaacactatcgaagcagaggctgaaccatgggttgacgaagacatccttcgagccgaatgaacatcccgaacaggaagctcaaatatttcacgaaatcgaccaaattccggctaaagattgggggctgattggagggagccaataaaacattacattgttacagagagctcccaaagaatagatggcaggctaggaaaatgagaatcgttagcgcgaaattttatctatcgaaggattctttgtatagacgaggtgtaagcgatccctatttactttacatctttgggcccgaagttgagatcgttatgagcgaagtgcacgaaggtttgtgtggaagtcattcctcgggtagggctatggctttcaagattaagaggatgggatactattggcctactatgatcacggactgtgttaagtatgctcagcgatgcaaacgttgccaactccacgcacctctcatccatcaacctttagagttattttcttcgatctctgccccatacccgttcatgtgatggtcgatggatatcattggaccattgcacaggtcaactcgaggtgtacagtatctcttggtcctaaatgattacttttcgaagtggattgaagctgaagcatatgtaaacatcgaagattcggcggtaaaaactttcatttggaagaatatcatatgtaggcacggcgtcccatacgagatagttacggacaacagaccacaatttatctcacatgaattcgaagctttttgctcggattgggggattaaagttagttattccacaacgcgatatccacaagggaacggtcaggtcgagggtgcgaacaagacaattctaagcaatcttaagaaacgattgagtcatttgaaaggaggctcgtatgacgaacttcagccggttctatgggcatatcgcacaactcctaggcgctcgaccggagaaaccccgttctcattggtgtacggaatggaggcagttgtcccaactgagcttaatgtaccaggacttcgtcgaacagaagctcctttaaacgaagaagagaattctgcgatgctggacgattcgctagataccatcaacaagaggcaagattgatccaaattcaaaattatcaataagcagcagctcggtattacaattcaaaaatcaaaagcagacctttctttgtgggtgattatgttttgaaacgtgtgttcgataacaagaaagaagaaggagcaggcaaacttggcattaattgggaaggtccttacattgttaccgaggtggtccggaatggtgtttatagattgaaagacttggaagacagaccagtccaacgtccttggaacgtggtgaacttgaagaaattttatgtttaaaaatgatacgcatttttgtacatgaactacggtgtggcttgatcccgaaatgggtacgtaggcagctcgaaaacaagttcagctattaataaaatttgttttattcattttgaagaatagttgattatacgaacgaatcaaggaaaggagttcgactatgcgaacgtacaaagcaggaagcaaggttacatttattcaaagggaaaatgaggaaaagatgccaaaatcttggacacacttcaggttaggaaatccttctcgtcttgcacaacacttcgaccccttggttggcgagatcgagaatgggcatcatacaatccgggatacgtgcgaattcagcgattccgagttcgatccagtctctgtggtgagagttgagggtgtgtactcccttgatatcatggtgattctccgtagcatctgattgatcttctttcgaagtttcttcttttccgttgaacgtctttggtgttgaccgcgagactttgatg

SEQ ID NO: 22151 - DNA, 463 bp, Arabidopsis thaliana columbia
tgtgttgatatagtcggaaaacctcaaacatgatggagattgtttccaaatcgtcttcctcggctattatcatgtccagctcttcaaaagccttgtttaggatcatctcaatttcgctctcgaagtaatacgagatgccaaggctgataagcaaatggattaaacgaatcttgtccttgttgctgttgtgagaagagatgagcctgtctctcacgtatggcttcatcacggattcaatctctctcgctatgtcgatcaaattcctacgaagatacacaaataaatgatcatgaattatcttctttaaatagagaagaaaaacgattgataaaaacgagtcatgttctctgccgcaacgtcgtgaatgggtccctgaacatttttcttttgatccgatacttacggaatcgtcaaccgaaactgagaggaagtaatctccccgatggagggtgtaaagagtatc

SEQ ID NO: 22152 - DNA, 513 bp, Arabidopsis thaliana columbia
tcaacggagcttacaatgatactcataacaagacagcttatttgtgtgtggctcaaccacaaaatttctctactaagtgacttatgtcgcttttgagaatgtgatatcagtaaccagttacaggaagcataatgtagcaacatatctcagacttaacattagttgagttctccatttggttcgacatatcgactaataaaaggcatttgatagcagatactctaaaatcttctaaccacagaacagaacaatttacaatgatggcttcggtcgcatgatgacacttgtataaacctataaaagtcatgctaatgatgcaaacacacctcgtcaatgtcgaccttatacgttgttacatcaggatatttattactgagctccaatatcacaggagagataagcctgcctagagccaaaccatacaaaaattaataacgccacacgtagaaaagatttactatccagaagctttcatggaactaaaacttacaagggccacaccatgcggcagtg

SEQ ID NO: 22153 - DNA, 387 bp, Arabidopsis thaliana columbia
taaatcaaacattacctatcgtgggatagacttagtagctcaacttttccatattgtaaaaaaaaaaaaaaaagcgaattcaaagtatgattgcaaatcaaatcacccaaaacgtgccactgataccagaaatcgtacataaaatcttcaaatctatgaactataaatgtaccttctgaagagccaacttgtactccataagctcaatataggagcgcagcaacttgtcattattagcattgatttcagcaagttcagcttctagctctccaagctttacctaacaagccagaaggaagaaaaaagtatatccgtgagaaaacgaaaagcatggcatggaaatgagaagcatggatccccatgattacctcaacatcatccaagtca

SEQ ID NO: 22154 - DNA, 534 bp, Arabidopsis thaliana columbia
gtattgtctaggatatagttaggaatttagtggagagtgtctctccttagtcaagtcttatagcgaattggaatgagaagcagttttataacatcgtacttataacattccaaggctcacgctttttgtgttccagtaatctaattgaatctgatcatgttactaaccttccagccagaccttcttgatttcctccgtctccaactgtgatataaacaggcgctgacttatctggaactgggtaacgatctccgcttgacacgttataccgcacatttgatattcggtactgagatggagaaacaaaacaaagattttactaaacacaatgaaacatatatattctatgcggacgttatggtaatacgaaagtaccgatctctcgtaggcatgaacatgcccagcaaagattacatcaactttgtgttggacaaaccactcctcaaaagctgctcgcatgctttcaccctccatgaaatgtgcttcattactgttgtatattgggacgtgcatcaaaacaattagccaaggtgt

SEQ ID NO: 22155 - DNA, 876 bp, Arabidopsis thaliana
tagaccggttttacactcgtttgtctcggagcgagttgataagatggttgatatgggtctcgtcgacgaggttcgccgcatcttcgatccgtcttcgtcggattactccgctggaattcgccgagccattggagttccagagctcgacgaatttctccgttcggagatgcggaattatccggcggagacgacggagagacttcttgaaacggcgatcgagaagattaaagagaacacttgtttgcttgcgtgtagacaattgcagaagattcaaaggctttacaagcagtggaagtggaacatgcaccgtgtcgacgcgacggaggtttttctccgacgaggagaagaagctgatgaggcttgggataactcagtggctcatccgagcgcactcgccgtcgaaaagttccttagttacagcgatgaccaccatttggaaggcgccaatattctcctaccggagatctctgccgttccgcctcttccagccgccgtggcgatctgttcccggtgaggtaaaacaggaacaaatcaatgtatacgacgatgacgaaagaagggaagtttaaagaaaagaaaaaccataatagtgccacgtggcgagattggtcggaaagaggattaagccatgatattgccacgtggcgagattggtcgctgtcttggagaagatgatgaccttttaattctgttacttaaagaaagtgtgttacggttaaacggaaaaaacagttttgagggaagtgagctgcacgcgcggggcggacgcagataattttcccttattttattttccgggtatagtactttagggctagggtgtcgtgcggaatagtgtacggtttatacggtggactagtcaggtttaagagagag

SEQ ID NO: 22156 - DNA, 524 bp, Arabidopsis thaliana columbia
atggtttaaacacattgttcatggcagcctgaaaagtggctggagcatttgtgagcccaaaggcgattacaaagaattcataatggccctccaatgttctaaacacagtttttatgatatcttccttcttcatcaatatctgatgatagcccgagcgcagatcaatcttagaaaaaataactgctccatgtaattcatctaagagttgctcaatcactggaatagggaacttatctggaatagtaaccctatttaaagccctgtaatcaacacagaatctccaagacatgtccttcttcttcaccaacaagacaggacttgaaaaaggactagtactgtgttgaataattccagatgctaacatatcagctaccatcttttccatcacttcctttgtcgaatgcgggtatctataaggtctcaccgttatagattacaccctggcaacagagtaatcgaatgctccattccgcggactggaggtaatcaacaggaacccaaacacagactcaaaagctggaaga

SEQ ID NO: 22157 - DNA, 650 bp, Arabidopsis thaliana
cctcctcctccttccaccgccgtagagtatcaacctcaccaccgtcatcatccaccaccaccaccacctcctccaccaccacgtagtcctaactcagcttctcctccaccaatctcttcctcttacatgctcttatctctctccggtactaataacaacaacaacaacttagcttctttctccgatcttaacttctccgccggaaacaaccaccaccaccaccaccaacatactcttcacggatctcgtaaaagattccgaacaaaattcagccagtttcagaaagagaagatgcatgaattcgccgaacgtgttggttggaagatgcaaaaacgtgacgaagacgatgttcgtgatttttgccggcagatcggagttgataaaagtgttctcaaagtttggatgcataacaacaaaaacacctttaaccgccgtgatatcgccggaaacgagatccggcaaatcgataacggcggaggaaaccacactccgattctcgccggcgagattaataaccataacaatggacaccacggtgtcggaggaggaggagagcttcaccagagtgttagtagcggcggtggtggcggaggatttgatagtgatagcggcggagctaacggtggtaacgttaacggatcatcgtcgtc

SEQ ID NO: 22158 - DNA, 521 bp, Arabidopsis thaliana
ggatgatcatctttaatagcatttgcaaaatctatactatcataatgtgctattaatgcacactttttgtagtgaatgttttgcatgcttgggagcatggttgtggttttcatgaatagtcttattgatatactttctatccattttctcttatctattcccaagttatcttcagcatctactatctctttatacagtactgttgatgttatggattattcgcttttagtcggagtggacgaggaacacaaagtgcttgttataggaatcatcgactttctgataaactacacgttgggcaaaaaattgagttttcacccaaggcttcatgtataaaccctcctatgcagtacaagaaagaaggttttcaaatatctctagtgaaaacaaagttaggctggatatgaatttgctagagaaagacttgatttttgttgaaagaaaagtcaatcagcttccggaagccttctaatctctttgctaggtttggaagtttcaatcgtatgacaatattctagagt

SEQ ID NO: 22159 - DNA, 564 bp, Arabidopsis thaliana columbia
tccgacaagaagccttgactcctcagccaaaaggcccaactcacttccgatgacgagaaccctcctcgctggtttgtcaactgctctactaacccaaacaacatagctagtcctcattatacatcagggtgtacccttcagtctcttgactagctctcttggttatgtcggattctgactaagtttattcaagaatccaaacactcttttcctaccgaatcgccagagaactatcgcctggggtacttctggtttactagatctattttaagggatgcatactgaccttcctgcatgttcccaaatcgtttgtctaattccttggaatcatcactgcggtagcgaagctaggtatatcatagcttcctttgggttgttcgaaggtggttcttgttccatagaaatccctaaaaggtaaaaaatttgtttttatttctttataattttgtttttgacgaatgcttccttcaccttcttagagtccctgattccctcagggatggagacagaagggaacatatttagaagcttcaagatccgtaaggggcttactttcggggtttg

SEQ ID NO: 22160 - DNA, 458 bp, Arabidopsis thaliana columbia
  unsure (1)..(458): unsure at all n locations
nnnnnnnnnnnnnnnnnnnnnnctaaaggctttggcagtatctagggtgtttccgccaccgataccgtgaattgcgccacactgcgcagtctccgcgatgacacgcagacggtcgatctcattttgcgaacattcaccgccaaacggtgcaatttctactaccagtccagcatctttatagcttttctcgacagtggattgagcataacctctaacacatttgtcacccaccgctagccagcgttctgccagcggcttcaggtattcgcccagacgattagtcacatcagcgccctggatgtattcacacggtgattgaataacgcggtccaaaactgcgcccttagagatgagtagtgccaaatgcggcattccagtcgtgttcgaacttctctatagctgactctaccgcaggggtgtagagcatttgttgcgcgacatctaacggcagcgtgatg

SEQ ID NO: 22161 - DNA, 668 bp, Arabidopsis thaliana
ctcaccaactggcccttccgtctgtagttgcggcactcccttatgtaatgccctgtcttaccacagcggtagcacagcttttggtcatcacgcgtccctctcgtctacctttgtcctgtctccgagcaatgctgggtgccgtgactcatacagccacacctctcacatgtcccctttgctttccagcattcgcccaagtgcctctttccccaatgagagcattcgtcccgacttcccgacgatttcttcatatcgtcgagttggtcgaacttccttttcttttcattcttcggattaccacccttcgggcggatcctttcctcctcatcgagattcgcctcgatcaatgccgccctttcaaccagttccgagaccgtgttgaaggtacggatcgagcaaagagtcctcaactcaacccgaaggcctctgaggaatcgacggacttgcaccgcttcgtcctcgagttctctccccacgtagcgcctgagtttgttgaactcctcctcgtactcacggacggtacgacgaccctggacaagatccaggaagttactctcaagtcggtcccatgcctcggacggaaagtacatcctgttgaactcgtcctcaaagtccttgaaggtctcgacacgctcacccttgcgtttataaacagcaagccaccagtt

SEQ ID NO: 22162 - DNA, 1024 bp, Arabidopsis thaliana
  unsure (1)..(1024): unsure at all n locations
atctttttgttgagactgtgtaaacattgaagagacaatgctgttaacaaatcgggttttctggtagtcgttgatcttgatgacttgtttccagtactcagcaacttcgggtaagccgttcattcgcagatgtagactaagttgagaatatctttctggaaacaagatcctccgaacccaacactagagttcaagaacttgggaccaatacgagagtctttgcccacagcataagagacctctgagacattggcgccagttgcctcacagagagcggacattgcattgactgatgagattctctgggctaggaaggcattagctgcaagcttggaaagctcggcagaccatagattggtggtgaggattctctcttcagggacccattgggcataaatgtctttcaaggctttgacggctgcaaagccttcagttgtttcacgaccaccgatgaggacacggtcaggcatgaaaaggtcttcaatagcggttccttcagcaaggaactcagggtttgacagaatctggaatttgattcctttgctgttgtgtgtaagaatcttctcaattgcctctgcggttttgacaggaacagttgatttctcaacaacaatcttgtcggaaaccgaaacatcggcaatcatacgagcagcgctctcccagtaagtcaaatccgcagctttgccagctccaagaccacgggtcttagtaggggtgttgacagacacaaaaacaatgtcagcctctctcacatgtttctcaacatcggtgctgaagaagagattctttccacggcactgcttaacgacatcatcaagaccaggctcatagatcggtaactgatcactgttccaggcattgatccttggcacagagatatcaacaacagctacttcaacagatggacactttagagcaatgacagccatggttggacaccaacatatccagctccaatgcagcaaatcttcaccattttgcttgtaaactgaatcacctcctgtgtanataaaaaaaaaaagtt

SEQ ID NO: 22163 - DNA, 1173 bp, Arabidopsis thaliana
tttcgtattgttttgtcgatggttttctccaattggttgactgttcttgaattttctccatgccgacgattgtttcgctctctctagattgtgtaaatggtggtttgaagagcatactgcaaaagaaacagaggaagggctcgagtgatgttcccgcaatgagcgaggcaagttggtcccagtttgatgtgtactgcacgcccatgaagcctttcgctataatttcccaaatttgattggcgtagtgacagtggaagaataggtgatctcttgtttccagagggtcttggcagaaaacgcaagtagagtcagcttggccgttccacttttgcattcggtcccctgttgaaagacgattgtgcatacccagccaagtaatgaaagcaaattttggtgtggcttggggaaccatacacctttagcccattcgcaaactggttctgccattcgaatgagtttccaagtctcacgggttgagaaagttttcttgtatcctgtgcttggcttccaaagatcaatatcctcaatatcaggttgatgacgtgtttttgcagcttctatctcagcttcaattctgaccagtaagtcccacggtgtttcctactacgtcgggtcgtgaacacattttccatattcgtagttgttgtaattccagatcaatgcatcctcgagcacccaaaacatcaacaagagtccccatggaagaccaatgatcataccagaaagaagtgtttctaccattgtgaatttccttcttatgaaaacttcgtgcaacgtccctgagtgtaagtaacttacgccacatccaagaaccttggtaagaagaggcttttatcgcccagaaattgtttcgccgaataagataggtctgaacccattgcccccaaagagaggtttgtgaggcaagtaaccgccatattaacttgagtccgcagactgtgtttatctccttaagtggccggagacctaaaccgccttcacacatagggagacaaacctttgaccaagcaatctttgcattatgagtctttaaatcaggaccactccataagaatgccgagcagagacgttctatttccttcatacaatttcccggcagtctaaacgctgaggaccaaaaattcgtgatactcattagcactgacttgatgagctgcagtctaccacagtaag

SEQ ID NO: 22164 - DNA, 889 bp, Arabidopsis thaliana
gaggagaatttgaagctatggaaggaaatgattgcaggaagtgagagaggattacagtgctgtgttcgtgggaaattcaacatgcaagatcccaacaaagccatgcgcgacccggtttattaccgatgcaatcctatgtctcaccaccgtatcggggataagtataagatatatccaacatatgactttgcttgcccgtttgttgattcccttgaaggtataacgcatgctcttcggtctagtgagtatcatgaccgaaatgctcagtactttaaagttctggaggatatgggactgcgacaggttcagctttacgaattcagccggttaaacctagtttttacacttctcagtaagcgcaacgttctctggtttgtccaaactggattggttgacgggtgggatgatccacgtttcccgacagtccaaggaattgttcgtagaggtttgaaaatcgaggctctgattcaattcattctcgagcaggtaaacctttctgtttcattgttggttatctcatttgaatgatctgtataataattctgatgattgttattcgtttccagggggcttcgaagaatctaaatttgatggaatgggacaaactttggtctataaataagagaataattgatcctgtgtgccctagacacactgctgtggttgcagaacgtcgtgtactatttaccttaacggatggtcctgatgagccgtttgttcgcatgataccaaagcacaagaaattcgaaggtgctggagaaaaggcgaccactttcactaagagcatttggctcgaggaagctgatgcgagtgccatatccgttggtgaggaagtaactttgatggattggggaaatgctatcgtaaaggaaatcacaaaggacgagga

SEQ ID NO: 22165 - DNA, 614 bp, Arabidopsis thaliana
ccttccagttttattttgtttttaaaacactaactaatattgagattgccttgttataatctaggtggatccagataatgtgaggccaatcgagcaaaatgctattgtcgaagctgagagattagctcaagctaccaaaaatgctctcaaaagaaagattgagaaagctgcgagttctgattatcagacaaaaactctaccagcaaagctcaaaatcgatcctaatgatcccgaggatgtagtaagtcaagattctttttcacccattttggtcccatgaggtcgtgttatgaggtctttactttttttttgttttggtacagaaaatagctaagcgtaagaagatacatgctttcaaatccaaggcaaggtttgagcaactcgaggttgtgcagaacaagaaacagaatgattggcaacagtttcagacgactaaagccaaaactaaaaaggtttgttagatacggaattcatatggctctttgttctcttggtggggattctgagacgggttttggttgtgcaggtagggttctcacagggaggaagaaagagagtatatttaaatcacctgaggatccatttggaaaagtgggtgtgactggaagtgggaa

SEQ ID NO: 22166 - DNA, 574 bp, Arabidopsis thaliana
acttctcctaagctactacaacgacaaagagaagatctcgttgactcccccccctcccccacacaaaaaaaaaaaccaaaaaaatacagagctaatggttctgcttccatgggagctggaggaagatatactgtctcggcttccacctcgatctcttgttcaattcagatcggtttgcaaacgatggaatgctctttttgatgttaaaagtttcaacaaggaccagttcgctcgtgctcgtcctcagttcatcttcattaccgattccaagatttattcgatagagatcatcggtctcgacggcgttgatccaacgattaagttacatgtgctagactcctctggtatcccttaccgtgaatggaaatttgcttacttaaccatcactgcttgcgatggccgatgggttcttgttttgtaactcttggattagtcccaagggaacagctttttggaatccgtggttgaaacagattaaatggatcgagtacgagaataaaggtttcaatgtatgtggcgtaggatacgataatactaggcctgagaaggtttcaaaatcttggagtatttagag

SEQ ID NO: 22167 - DNA, 1630 bp, Arabidopsis thaliana
catcattgagacattacatcgaatcaccaaaaacatagaaagggtgaagaagaagaagcagaacctggaagtcaaacaaaacccatgagacgaaatgaaacagagaagagattcttttaatggaagaaaacaacagagccaaaaaggaaatgaggaggctttgaatgggtctaggattagatgggaacgtgagagagaacgataatggcggccatttctgatttaagagattctcatgaaatctcaatctctcaatgatgcaaatctgttccattggctgggagaaaaatagagtcctctgttccacgatcgctctgttatttttgttggctcctcctcagtttatcctaattttggcgtcaatgtttcgcttttaaaactaggtccctataaaaattcaaacttcctatgttaacccagaaaataaaacattatcaatttgacccaaacaaaaatcataagaaaatcttcaatttttaataatttccctaaagtaccattaaaaaaaatcacagaagctaattatgggatttctactgttttctaattcataacaatatatactgtaaatagtttaccaatcaaagacactaaaaacaattcatgtcttcaatagaaaacattcaaaagttggggactttttatgaaaattctgtataaacgcaagcagaaccaaagccctagccctctctaattcgctgtgtccgttaagtcctctcttttccgaagatctgactttatcccggaattctgacgccgaagcttaaatggaaaaagaagatgagctccagaagttaaacggtcaagtttcagctccacgagacggagatgtagaagatgacgatccgactagtgttgagttctcaagctttggcggcgcttcgggaatttctagcagaccagaacaagactgttgcgagcacgccaccggcgtcttccgtcgccggaggagaagaatccgataaagtggagctggttacggaggattggagactcagccagttctggtacgaacctgaaactgcagagactgtagcagatgaagtggtcactctctctcaaagaattccaggctgcagagtcgcttgcattgcttgccctactctctacgtttatctcaaggtactattaatcagttttgttcagtacccttaatttgtatcgaatccgttttgctaaaaatcgatacttttgttgtcgttgatgctaaatttctgtgcgacgggttttgatttgtgctgagtcagaaaagagatcctagtcttcaggtgcaattgctggagtacgatatgagattcgagagatatggaaaagagttcactttctatgattacaacgaaccagaagatctgccgcttcagctgaaacattgcttccatataatcgttgcagatcctccctacttggtaaagtttcttcaagttcttaacttttccgatgctgttctttcatgggaattttggaaatcttttagctgccccttgatagataggtttagagactgatgtgtaatctgctctgaacttctgacattcaagaagcttctgctagataggcattgcttataaattaatcttcttttaaaagattatagaaagtccaaaagcagacaagatgaaagaaaaaaagt

SEQ ID NO: 22168 - DNA, 537 bp, Arabidopsis thaliana
gccagtgtgctctaaaggatgacttgtacttcctgagccgagcaaacaacaccatccaagccagcttcagctgtcttcttggcatagtgaatcacagactcttgcagactggtttggatattttgaaactcctgcatctgagcttctgacgttgatgtgagctgagttacagcgatcaatttagcttgacttccaagaccttcacgcgcagcttcatcatctctacaccaccagccgcatgaacattggtcatatccacaccaagctgagataggatcttcatggctgacttgactgtattaggaatgtcatgaagtttgagatccaaaaagacactatgacccaaaccttttaagtaggacacaatctcaggccccgctgcgtaataaagctccatccctaccttgagataaaggctttcttctgctgggaaaagagctaaaaattccttgaccgcctcaaaactaggaaaatcaagagcaatgattggacgatgttctcgcataggtttctccttttacctttactagtgagaga

SEQ ID NO: 22169 - DNA, 560 bp, Arabidopsis thaliana columbia
taaaatatagttaacacccctaattataacgtttacaacattatttaaggtttgatacaagaaaaagagagatgtgagggtgtttagttaggtgagaaactctggaccgaccaagtggtcgattcaagtctgtgcaaagccgacaaaaggggcaaatctgtcattcactctgttttcaacctgagattcaccagaaacaaaaacatacggcggagtaaaaaacaaaggcgacggagataccaagaaaaaaaaaatacagaggaggaaaagaagcacattgtcgccgtctctttaacttccttcatcaatctccgtctcgtgaatctctgtttctttgatctgtaattgcgaattcgtcgtttcccaattttgaaattgttgtaatgtcggcggtctcgtgctccacggcgagttctagcggaggatgtgcatttaggtttcgatcaaagacatcaatccattctcctaatttcatcagaattgggacaaattctcaggttttgagattttccttctctctgtttcaatctctctagcatcaacaagtataaagttctaac

SEQ ID NO: 22170 - DNA, 2551 bp, Arabidopsis thaliana
ccgcggccatttccaaatcatgcgtagggtaattcttctcatgtttccgcaattgccttaatgcttatgcgataacactccccttttgcatcagtacgcatcctagtcccactatggatgtgtccgtataaaccgtatagggctcaccttcctccggtaagaccaataccggtgcattagtcaacatgggctttaactccaggaagcttttctcgcactcatccgaccagttgaatgcggtgtcttttccggtcagtcgagtcaagggttgggccatgctcgcaaaactcattacaaaccttcggtaataccccgctagtccgagaaaactcctaatctcggtggcattccttggtcgtggccactcctttatcgaccatattttctccggatcaaccgatactccttggtccgagataacatgaccaagaaaaccaacgctactttaccaaaatgagcatttacttaacttcgcaaatagctcatgttcccttagccgttccagcaccgcccttagatgttcttggtgagcttcccaagatttcgagtaaacaaggatattgtcaatgaagatgataacaaactcgtctaagaaatcccggaatatcccattcatcattttcatgaaggctgctggtgcattggtcaatccgaatggcatgaccacaaactcaaagtggctgtaccttgtccggaaagccgttttcctcacgtctgttggctctatgggaatttggtgatatcctgaggcgaagtcgatttttgaaaaccactgtgcacctccaagttgatccatcaactcatctatccggggtaaaggatatttgtttttcaccgtaactttattcaatcccgatagttgatgcatagcctaaagctaccatctttctttttcacaaacagaaccggcgcaccccatggtgagctactcggcctgatgaatccaacaactcctccaactgtttctttagtccgccatttccgccggtgccatccggtacggagctttagatatgggggttgtcccgggctcgagttctatcgtgaacgggtctgaccggtccggtggtacaccactaacggccgcaaacatgtccgagaactcgttgacgatcggaatgtctttcaactccgcactcgcccccacttccttggttgtgatcgtggctaaatatgcctcacatcctttcccgatcatcctttcagcctggattgccgagattaccaagcttcacgaggttgttcttattccttgaaattttaacataccttcgtccctcttgaattgtatccgtcctcggtgacaatctatgtgagccttgtacttccccaaccagtccatctctaagataacatcgtgtttctttagtggaacaatgattaggttcactacaaccgagatgccccgaacaagtccggtaggatacattgcctttctgccggccgctcgtaccattccataatccgtgtttggttctttcctgaacccagctgattgaaccaattccagactaacaaaacaatgtgtagccccataatcaaatagagtgtgcgtttctacgtcacctactctcaaggtccctacacattcccttagaatgttgagtacctcccctttcccatatgcatgatgcaatgcaaatgcagttatagaaataatgaatagggagttgcgagaacgtaccagtgatcgccctgaagtttccagcatcattagcttcctccgacaactcataaactcgcggtgccacggctttgcgcatttgggggaggcggcagtacgtttcccccacgattgtccctttgtccgccttgcttctccgcagtcagcttagggcactcccgctttagatgtccaaccttcccgcaatagaaacaagtccttgtctcttcaccgagaaccttggactgtcctggttccattctcgggaagctctggatcgcatggtccttgcttccacactggccacatgcacctatggccttccagcaagttccgctgtggctcttaccacaggtcacacattccccggtcttagcatcggacttggtgttatccaccttgtcgaatttccttttcttatccgcgggttgggtgggttgattgttctggatcggagctttctcccgattcaagtacctttcttcctcaattccttcctcaatcatcactgccctttcaactaattcgaaaaccgagttgaatgtccggaccaaacaatggttgcggatctctatccttagtctgcggataaatcggcgcacttgggcttgttcctcctcaagttcacggcccacataacgcctaaggcggttaaactcctcatcatattcacgcaccgtgcgattcccttgaactaggtcaaggtacacacattcaagcctgtcccaagcctccggtggaaagtacttcttgttaaactcgttttcgaaatccgtaaaggaccggacctcgtcccctctgcgtttcttgacggttaaccaccagttataggcgtctccttcaaggaagtggaccgcaatgtccctttgggaatcctcagggcagcga

SEQ ID NO: 22171 - DNA, 2900 bp, Arabidopsis thaliana
ggtttaatctgtcttattcgagtttctatttgtagatctaattagcgtttcttgtttccggttgattttcattgtagatctgtttagggtttgcttgtattcgttaattttcgttgtatttcgaattctcctttactaatgttctctttttttttgcaagatgtcattcactagcaatgattattcccagtttcggtctcagcaacaaaatcaacgtcgttctcctagtgaaggaaacggttcagccactcagggtaatctccaaaccccaatcaattccaacaatcaagcaaatggtgcttctcctccgcttgtcaatcaatctcctcgcggttctgccaatcaatctcctcccggttttgccaatcacactactccactagctgctcggctcaatgacctgactatagaagagttgcttgctagccctggtcgtgcagggttgcctaaattagaccccaatcgacctcctggtactctctggtaagccactaggctctgttctcttcactattacttgattgtttagttttgtctgtctgatggagtcttgatttgtaggtttgacgatgacacctcagttgcagccactgtccggagcatttttgaaaaagatttcaaagagcctcatgcaaatgggtcacagacatcagaagcagtggtcgatagatggtttgaaacatttgctgtaagtgaaataattttgtgttttgtttggtacaacttttggtcttgtctatttctaatgtgtcttgtctttgttttgtagcaagtatataactgggaccctgcaataaaccagagagttagattggagtttgaggcaaagatgaaggataggatgtctgatcaagttggtcgttggaagggaaagtggaaggagaagggaaatgaggcaaaaccgcggtggatagatccagaagtttggaaaggtctggttagcttttggatggatccgaagtcggaaagaaagagtctcaacagtaggaatgtaaggtatcatgatccggaaggcctcgggatacataaacaccggtctggacagacctcatacaaagccagagcccgcaaacgtgtaagttaattaaatttcatactttaaaaagcttgtatttcaaacaattgacctatatgtttatgtgtttcagtgtgagatgacaggagaaagtactccagattttctcctcctcttagatgaaacacataggaaacctgatgggagtttcatcgatagaaagtcggaggaaatctataaggaagtgtcctcgaatattcaagaggaagagtcacttctgtgttcaggcgacactacagagagcacgggttcaggcgggttatctgttcaggcaaagaacaagatctatgcacaggtatcttatctctttcaacccaatatagaagacagctttttttgttgctttggattggtctattttagcttgaattggattggtctgttttagcttgaattcgattggtctattttagcttgaattggattggtctgttttaacttgaattggattggtctgttttagcttgaattggattggtctgttgtggcttgaattggattggtctgtttttggtgctttggattggtctgttttagcttgaattggatttgtctgttttagcttgaattggattggtctgttgtggcttgaataggattggtctgttttagcttgaattggattggtctgttttagcttgaattggattggtctgttttagcttgaattagattggtctgttgtggcttgcattggatttgtctgttttaacttgaattcgattggtctgttgtggcttgcattggattggtctgttcaggcttgcattgtgtcattgtgattcaaactgaattgaatatgttgtgtttttggtttgcaaattggcagtgtgtgtaaatggatatgattatgttgtgaaactgaattgaatatgttgtgtttttgtgtttttgtgtttttggcctgattcagttgtgttgttggtctgaataatatcattgtattttcggcctaagagttttgcattaagtctatatgtttcgactttgctttgatcatgtttgcttgttttggttatgagtttgtgacaggttgctcctaagaagaaaggcaggatttatggggctggttcattgcagcatgaggcgtcttcggcgcatgccggaccggtgcttcctcgagatgatccggttgtgctttcccagaagctggctgctgttgaagccctcattgcaaaccaggctgagaagatcaccagttttgacgcatactttgattaccttgccaagaaggatccagagtttgctgccttgtttcgagtcagatcctcttcaagaactgaaccagtcagctccaatccacctgatgcgcctaatgccacaactgctgggatcggacctgaagctgtcgaacctgaggctgttgtagctaacccaaacactgggtcatctccatctgaggctttctaacattctgtattaagtttctttttcactcatcaaaacttgaatcttttgttggtttgttatgtaaaattatttggccttctaacattctgtattcagtttctttttctgtacttgaaacctaaaatttcagcttttaaatatgagtttaaggtttcttaattagtattcaacttcaaagtttagtataaaaatccaattaagataaccattaaatattgttaagtagaacagtaatccctatattcaacagtaatcatgcttaaaacaaaacagaaaagagtcgcttatttaccgcgaatccatcgcaaactttactacggatttgcgactacagataaaagccacgcaaatccatcgcaaattttgcgaggcattagcgggacaaagaatttgcgactactttgctactgaagta

SEQ ID NO: 22172 - DNA, 638 bp, Arabidopsis thaliana
tacagtatattttaaataaaaactcttgtttatactcattttgtggtcgatagaagagttttgtcaattttaaatgcccatttatccttcttcttcttcttcttcttttttttctttttttttcgtcggcaacttgtctcaagtttatctttcttcaatataatttagcagctaaattgtaaaaagtaaaaacagtttgaccaaacaaaaattaattttatttcctatataatcagattatttagcagctggaattgcaaaaacagtttgaccgaaaaaaaaggatttgtaaaacagagcacctgatggcgtcggtgaagttgccgtgggatttggaggaagagatactgtctcggcttccacctcgatctcttgttcggttcaggaccgtatgtaaacactggaacggtcttttcagcgacaagaggtttgtcaaaaagcacttggtccgtgcccgtccccaattcatcttccttaccgaatcgaagaagatgtactcgatagagatcgatctgggtggaacgatagaggtgcgtgaggtccctacgattttcattgtcagcctatgaagaagaattttacaactatcatggcttgcgatgggttacttgttcgtgatttttggaacaaggtgttgc

SEQ ID NO: 22173 - DNA, 517 bp, Arabidopsis thaliana
caaggcaatctcaatattagttagtgttttaaaaacaaaataaaactggaatagaagcattacctcttccttgtttccccactcatcataagcaacaaaatagccatttgcagtatgtgcctcaatggtcgcatcatacctgaacatttaactaatcaaacaaagaaaaagggagaaaaagacgtaaagaatacagtagatacatcattaattacaagtaacccgagagtttttcaacataccactcgccatcgtcactaaagacagcttgaactttagtgtccaacagggaacttaccctcatggattgggtcattccttaaaccctgaacaaacaatgaaatacaaacacacgttaatcaccaaaatagatatttagtaagctctggagtagcatatgtttctgtattcaaatttacgagaaaaatcacatggcagcatctgagaagatgatggagatagagagaggaagagagaacaaaaaacagcctaaaatggtaaagccaagagaaaagat

SEQ ID NO: 22174 - DNA, 1560 bp, Arabidopsis thaliana
ataaaggttgtttacaaatttttttggtattgcatccagaagaaacccaattaatagcagcaactggtctattgtagatgttaagagaaaacgaaatgcaccgggcccgagccctaaagaacctgataataagtttttagtcaattattcctaaaacaccaatcatgtcgttgtagtattttaggtgtcaatccaaatgggtgtgatgcaaacagatgagatgtgatcagaagtcactaagtcaagccaagcaataacagttttggggtttctaacagtcctaagcgaacatgcagaaaatagaagcaataacagaattactaaaatcactcgaccacaacaggctgatgccagaagtaggatgtggtcgagtaacaggtcgagtaatagacaggatatgaaacagctatactcgactgcacagtctgttgccagacactgggtgtggtcgagtaagttggtcgagtgattgtaaaaactaagaaacaggcaatgagaacgattaagcgataacgataaaacagagaaataagatagacgagaaattcctaaggatggggtaatcgagtagagtggtgtcctagcctattcgaatggttaacaagcgcaatcaagctatccctagacaacaggttcaacaacagaccaattcactcccgtgatagaaatcctcaagcaaagctagcccagactaattcccattaacggaatctaactatgcaggcaatacgaacagactgataaagtcaataaacgctctaaacggccaatcccttgggatagagacgcatatctcaggaactagtggatcaagcattccatcgaacaccttctgggtgcgggaatgcttgggatcgaattccagttgatcagaaagaaataagcagtaaacgcaactagtcctgaagggttcaatcaattctaaaacttaaccattctacagactacggattccacaattactctatcccaaccctaagaattctaagtcactactcatacaacatgctcaaagacataaacgcagataaatgataatattgcataagtaaagagataaagagtagagaaacaagatgacatatgaaatcaaatgcggaatctaaataacttagaaaaatctcgaattacaggttgcagaagcaaaagcggcgtagcagagtaaaactgaaaataaaactgaagcaaaaactcaatgtcgactagatgtctcagtatagtagacgggccaataacctaatcgcccggcccatagaatgatattgggccgagatgggcttcgtgatcagatggaggtccaagccgcttccaaacactttgtcttctcctcttctcttccttgtgctcagcttgtttggttgagtgcggatttgagtagactgtgaagacgtgatcgagtgtccggtcgagtgatggtgatggtggtgagtgatgatactcgaccagggggtcggataacttggtagagtgaattgtcgagtgtggtcaggtggtgtggcgaagtgatactcgaccagggggtcgagtggcgtcatcgagtggcctgagctggggatactc

SEQ ID NO: 22175 - DNA, 583 bp, Arabidopsis thaliana
taacggccgccagtgtgctctaaagtaacaaggtctcccgtttcggctcaaggggcgatcagaggtgccaaggcagagcagcatcgcacgaccgcacaagaagtaaggaaattggagaagagaaggtggggaattgaatcaaggaaaaagtcgaggtttttaaaagagagagccgaaaagtgcggtaccagttaccttggccgacgtgcaaagtcagggccggttctgccgccgaatgatcttggctttggcgaacgaatagcatcgtgacggttcaggcggctggttctccagcgttcataccagataacacggctagcctcacgcagttcagaacgccattcgctgaacacggagtctttgagtttcaggaagtcgcagtgctctggattgtacgggtcagcaaaaccccaagggaatttgcgaccaatgggaccatcgccctggagcgagtatttgtcgggggacagaatcgagaaaggaagtagaggaacagcctgggaaccgacgtcctgctgagagccttcactgcgctgtgtaggggattctggcgcttttggctcggtctcctctttagtgtggc

SEQ ID NO: 22176 - DNA, 2240 bp, Arabidopsis thaliana
tctaaaagcaatatatatatatagaccctaaaaacgtccagggctaataatgtaaatagagaaatcttctggggcagacttgagcttctggaaactcaaaagcatatagggtttttacggggccaaaactggtgtcgatcgacaccaagagtgtgtcggtcgacactcctcgctgattcctgaaccaaaatcgtccttagcttccttttccttaggttttgctccaaaatgtgtccttatctccattgttgtcccattgcatagaatacctgaaaagacattaaaaagactcgagaaataacataaagaatcaaaatcctatacctaaattatagataaaattggtgaaaatcgggttatatcaccacccaattcagcttcgtatgagagatggataggtaagtgttccataacatcaaaaaataatggtagaaagatctttttcaagttacagatgattaaaactatgttctgtttgagaatttgaacgcgacttgtctgtaaagttctcgaacataggtcccggaaaaatgctccaattcctaaaatatatgtggaagttaaataattacataaaaaaatttctccataaaacatagttagaattgtacctgataatgcaaggtggacattccggtcaagaagttcagcaaagataaatggaagtagtcgctccataaaaacatgacaatcatgactcttcatgcctgaaaacataccattctccaaatctacacaactagccaaatctgaagaataaccatctggaaatctaacatcatgtttcacacattgaaataaactctgtttggcttcttctgtcaatgtatacggtggaaaaggagctttacccgtactatcaatatgtaagcctggccgagaacaatatttctcaatatccaatcttgacatgatattgtcttttgatttacccttaacacccaagagagtgttcatgatgttgtcaagaaaatttttctctgtatgcataacatcaatattatgtcgaagattgaggtccttccagtaagacaactcccacaatatgctttctttgtgccaattatgttccttcccatagcctcgcatcttcttttcatgaccgttcccaccaacatccttcgttttgggtggatttacactagccaaccgctcgtaataaacttgctcccctgtcaaagattcgggtggatactcgctagaagcgtctcttcctttgagaaagtcttttttgttcctacgagatggatgaccatgaggaagaaatctacggtgacaatcaaaccaacatgtcttccgtccattgggtagataaaaagactttgtactttccatgcaaactggacaagacaatttaccatgagtagtccatcctgataacatgctatacgcgggaaagtcgctaatcgtccagagtagtactgcttttagattaaaattctgactcaatgaaacatcgtacgcatcgactccagtacaccacaactcttttagctcctcaataagaggttggaggaagacatcaagactagctcgaggatgatttggtccagaattcagaatggtaagaaataagtactctgtattcatgcacatacgagggggtaaattatatggagttaggatcacaggccacaatgaatgattacgagacatgctaaatggattgaacccatcagtacacaacccgagataaacgttacggggttcttcagcaaatcggggatgtaactcttggaaatatctccattctgccgcatctgaaggatgattcatttctccctcctttgattggtgctcagcatgccatcccatagccgcagctgtcttatggctctcatacattctcttcagccggtctccaataggtagataccacatacgactatatggtactttggttcttggatggtcgtctttaggcttccatctttgtgcgccacaaaatcgacattgatcttctttttcgtcttctttccaaaataacatacaattgttctggcaaacatcaatcgtatgatatgcaagtcctaaattgcgcatcaacttctcggtatggtaatgtaaagtggtagcctggtttccttctggtaaaaaatctgtaaatatttcgcaaacggagtccaccaactttttactcatattatactccgctttgttgtgcatgagtcgagatgctaatgataactgcgactgcccttcacgacaaccgtcgtacaatggattatttgcaccttcta

SEQ ID NO: 22177 - DNA, 1543 bp, Arabidopsis thaliana
acaggaccacaaaatccaaggtacagagggtgcttcctaaacctaaaggagtaaactgagacaagtgcgccccttttccaggatcttcttgacgtagactactgaacctgctcttggtttgggaagaagtgtcgccaagtcccagaccttgactgcaatgggacatctaaaaaagatatgcagagcatcctcgatctccccacatcgtttacaccctgtttccaccactatacctcttgctgaaagtgctgtcccaattgggagcgccttttttgtagctttcgagaggaacattctgatcataggtgacgtatacaccttccagttgttagttttccaattaaatccctcctccaagcaggggacaagattagactttgccattgcatagccagactttgtagaataaactcccgcttttgcagggagccaccaaagtcggtctggtctttttgtagaactcaatatcaagctgagtatatcttcctcatgatgaagtaattccctacgaatatcttcacagtcccattggtgagaaacagagaagatcaagtctttgaccaataaagtagcagagtctttatttggcggatcaaaggggattttgggcttgaggtagagagccagagggagtaccacacacatatgtcttctccggatcccaccgtccatcccaacccttttcttaagatttctctgcccgctagaatccctctccatccatggaatgcattagacaagggggtgagctccataaaaggtgaagagtggcagtatttgccaagtagaacttgagccaagagggattctagattcttcaaaagtttccagccaatttttgccaatagagaatcgttgaaagtagccacctccctaaaacctaatcctccctctgattttaacgcagtgagcttctccaatgctacccaactcatttttcgtttatccggtgtatcatcctaccaaaaacgggtcaacgccgattacatccttttacatagagagagggggagcttgaagcatgtcatagcatacgagggcatagctaaaactgctttgagcaggacttgtttgccagctcttgacaggaaccttgtagaccaagacagagttcgttgtcggattctatccaccagacccgtgaagatgtcaaattaagctaaacaaataggttataaaataagaaacaaagaaaagcaataaaagtcaagatatatatcagatggagaaaagcgtcagagggacattcttaggaaataaatgactaacagatcaagctatgattaggattattagcaaaccgttctagaactcaaatcactaatataaagtaaccggtgatgtgtcgtgctactcattatgcctaaagctaaagatccccaatgatgtgtcggtgaatccctaattctatacatgcgttatttatgaagtttgattagttcaccaaagtatctaaaccagaacccttctatgagcgtacatgttctttcttaaatacttaggcccatctatgatagttctggtaacaagtacctatggtggg

SEQ ID NO: 22178 - DNA, 2252 bp, Arabidopsis thaliana
cgctcttgcgcatacctctctgtcattgctctcttcccacgggctatctcagcttttcttctgaatattctctctgttctctttctggccttgaagacgacgactctgtctcatccatgttgtagtcaggatcaacagaagaactgccactgtaattactcatgattctcctccagaaatctagatctcaaagctcaaatgtcaataggttagtctcaaagataacaatgaaaccaaaattgttatcaacaagcaatgaaatagacccaattggtcgagtacaatctgatactcgagtaacctaagctgttctcgagttacactaactcgaattggatctattagagtagaaccgttggtcgagtaaactctctgaagttggatggctctgttggttgcaagaacaagaggtcgaatggtttgttgtagaggtcgagtgaaagcttgtggtcgagttctgtggttgtaatcgagttgtccatgagacttcgacggtgaacgaggcagagtactcgattgcggcggcgcagagatggtcgagtgttgcgagaacaaagtgatggcgaacggcgaagtgaaaaggtcgagtgacggaggaaatgaactcggtgtcggcggtgcggaggtcgagtgctttttggaggtcgagtaaacagatgggtcgagtgaatcttggtgagagatagcgatacatggccttctgtagagtaaaagttttggatttttactctatctccacgttgttcctttgtccttgagaaccacaaacacaactaagaaaaattaaaaataacaagaaaagaaaaatttatttacagagatagtcatgggacttcctcccaagtgagcttgtttaaagtcattagcttgactcctttactcctttaatcatcaagaagttcttggagatgaaccaatgtcacctctggaaggatttgatccgctaagtatttcttgagcctttgaccatttactgtgaaatctccactcttaccagctagagtaactgctccataaggacggacctcagtgatacagaaggggccagaccatctggatttaagctttcttggaaagagtttcaagcgagagttgaatagcagcacctgatcaccaacttggaaatccttggtgatgatcttttgtcatggaaaagcttagttctctccttctagattttagagctctcataacatcaattaaacccaggagagactctccttgcgtctgaaacagtccagaaacatcttacaacaagtcacaaccaaaagcaatcttgaagcaaactggagatgaaaaacagaaacaaacagcctcaaagacgaaaccctaaaatacaaaccaacagcctcaaagacgaaaccctattaaatccctccggtgaaacgctagccgtagacgtcacagagctgcccataaaatatcgtgccgatcggaaaccagatgagaccacgatctcagttgcaatctccgctggtcccaattcgcgtctgagaaaacgtgtctcacgaaactgcaaataactcaaccaattttaatccaaatacaattctgtaaactggagaataactataaaggacttgggataactctaccaaatttcgttaccgtttaccacgatttgatatgacgaaaccgatttctcccaaaccctaacgattttgctccttctccttttctctctttttctcctttataaaacgaaaagtggctaaccaaagccctaatttcgagtttccttcttttataggcacagtctagggtttccaattaacccaaccaattaaaccggatgatttaaaaacaaaccctaaccgattttccggttcacgggcgttacaaggccactccttgattaccttcactttctcctcgtctactttaaccccatctgcacttacaacaaaacctagaaaaacaagattatccgtgcaaaaggtgcactttttaagattcgcaaaaagcttctcttccctaaggactttcatgaccgattctagatgatcaatatgttcagccatgctcttgctataacccaaaatgtcatcgaaataaaccacaacgaaatgacctatgaatgctctaagaatgtggttcattaagcgcctgaatgtactaggtgcatttgtcaacccgaatggcataactaaccattcgtacaacccatgtttcgttttaaatgcagtttttgactcgtcttcttctttcatcctaatttgatgataaccactttttaaatctattttagggga

SEQ ID NO: 22179 - DNA, 1151 bp, Arabidopsis thaliana
cttcaatttcaatgacaacgcatcaaacaactaacaacgagggcactgagcttatctggtgaccaaaatgcttacaaggctatctcatcattatcccctatgcatatgcaacaatcctaaacgaaacactctagactcgatcctaaatgcaatgcaactacatgaacactctatttttgtgaaatcattttctggaatttttcaatttttttggtttttctatgccttagatgaatgcagactcaagattatacaatgcaacacacacttcctgagccctcccccaaacttaaatcacacagtccactgtgtgaccaaatttggaagagagtactcaggacaaaaacacatcacaaaaacaaaataaaaacaagagatggtatattacaatggtggagtgaggtgcatacctcagtggaagaaggagcggagttggtcgtcaatagctgtctgtgattgctcccaggccatcgaagaatctccctgttgtgtcccagcttccccctgggggtactcgacctctgctccttcgtcgcggccagcaccgctgtgatgatactcgacctctcttcttctgctgcggccaccaccgcggtcgcgtaagctacgggagtggagaagtcgtgactgcatcattcgctatactcgaccacatcgtcattcggtctttatagggtgtggtcgagtgatttcctggtgtgaagacgccagaacaatgtcgagtttgattgctttgtggtcgagtgtattgctgttccttcaaagccagaatctatttccatcaactcttcatatttatctcctgaaaacactaacaagatgcatccaaaacaataaggaaaatgaaagatatgtacaaagataggcttgggacttcctcccaagtgagcttgttttaggtctctagcttgactcttcatactcattaggcgtttaaaggctcctccaaaggaacagaggttccttctggaataaactgatctatcatgtatttctggagccgctggccattgactgtgaagtctccattctttccagctagagtgatagcaccataaggtcggactgcagtaacagagaaaggaccagaccatctagacttgagcttgcctggaaaaagcctcaggcgagagttgaacagcaacacttga

SEQ ID NO: 22180 - DNA, 531 bp, Arabidopsis thaliana
gtttctgttgccgaaagtaagttgtccctatatcagatgaaaacaactctctcttacgggttggagcggtcgagtcagtcacaggtgtagctggtaagatctcattggagtaagtcaggtttcccatggacgaggaacaggctcttacgtttctcttagcaaaaaactcaccatgagacactggcggtagaggtggaaatggatagaacggcatgccaggagcaacagaccaggtggtcgggtcctctttgccaggtgaaccaaattgatgaacaatgctaagtggaatcccataggaaactggtaagcgagaaaggaacttttgttgcggctgtgcagtaattgcatcaggcacatctgtgcagggtgatgaaaacccgggtggaaggtcatcttggacatcctgatttccattagtttcatctgtttgttgggacaagatagtcatgattctttgttcttttgtcttagacggctggtcccatctgcttttgcgcttgcgtccatttgtctcaggaagaccggaattag

SEQ ID NO: 22181 - DNA, 609 bp, Arabidopsis thaliana columbia
tgaaaagcaagcaggaggctacagcgtaccgatatgataaacggtgatgggttcttccttaataccatccaaaatctccatcttataaggctcatttatcgccatgatccttttcttcgcttcttctctagatacttcttctcttaaaagtggtaaattccgactaaatgatacgatcctaccagataaagtacaaagaaaaccatgaatactcttttaaattcttccctcaaagactttatcagaaactcaccatctctttcttgatcctcttaaggtctttatctgttaaaggctccatatcaaaatcatagtagaaaccattatcaatccaaggacctatcgtcacttttgcatccgggaagagtttctgaactgccattgccattacatgcgcacactgaatccacatcaattacactattcagctcaacaacaacatttataccaaaatctcaaaactttctcatgaaattgaatcaaaattcaaactttagcaaaaacatacttcactaaaagcatataattacagaactctcctaaattccacataaacagaaacagagctctgcataaaacatcaacctttatcccaaaacacatactaaa

SEQ ID NO: 22182 - DNA, 607 bp, Arabidopsis thaliana columbia
tgaaaaggtcttctccttcataaattgagatttaaaatgacaattatggaattaaaaacttggagccatcaattagctaaatggccttaaagagatacaaaaacataatatgatcaactttggttgccacccctagtagcattctccggacaagaatcaagaggaggctcacctttggggttagtaaagcgttgacgctgcgaggaaaaagacagacggggtcaaatttaggcaaagaaaagaacaactgagaaagagagaatatagttaaacaagtggcaaggatgcttaaattaccttgagttcatgttctcgagtagagagatgcgtgatgaaattatcaacgccttggccagcaatacctgggccacaaatacgacggcacacagagcaaatccaggaggcaggtccaggcgtttcactgcagctatcctcctcctcctcaagtggccctggatcagctagaagagagtttttccagagggtggaggaggcttctcgaggagactcaagtggaaacgggaaaatggagttgtattttttttcacgttggatgagaatattagagtagaagcctggaggaaccacagtggtggacgggatatga

SEQ ID NO: 22183 - DNA, 369 bp, Arabidopsis thaliana columbia
cgccagtgtgctttaaagggaccagagatgtcgtagccgtatttcgctgccatcactttcatctgacccagagcgcggtgctgttcagcgattccttcgcgcagacggatagtctgttcccggtttacgccgttttccagatcagcctgcagagtagtgaactgtgccagtttgtctttcatcaggtagtcgataccgtacagcgtcactcacatgtagtcaccggtgatactgccacggccatatgcatctggcagaccggtcagaacaccatatttacggcgacgcaggatgaccggagtgtaaacgtcggtcacgcgctgtttgtgagttttacggctatccagtgaagattttgttcatcatcgg

SEQ ID NO: 22184 - DNA, 597 bp, Arabidopsis thaliana columbia
gatgccgggtgttacaagttactatcatgtagttgaaaactattctgttgcttagatcattgacgcaccattctggtttatgtttggcaggaaatttctgacaaaggtaagcaggctacaaaatccatcacagataagaaagagaagggtgataaggatacacatgttgaagagatcaagaaagacataaactctttgtcaaaagaagagcaaatggatgtagtatataggtaatgttgatgttttctggttctaaatttttcattaacttagtttattttgtattagactttcttacatgttatgtaaaataatattcacgtgatatgtctttcgtgtagttctgctccggaaatagttggtcttttgtctgagttgaacgatgcagttgaagagcttgagagtaagataaatcctgttatgaataaggtaaacctctttactgtttcacaatttctttcaatatgtttctatattgccactttatatcacctagttcgaaagacgggatttgtgcgcctccagaaatttatgcaattatgtcccttgcagttgaggaaggagaaattcgctgaatggttacaaggtactggaggt

SEQ ID NO: 22185 - DNA, 705 bp, Arabidopsis thaliana
  unsure (1)..(705): unsure at all n locations
tcccccaattaatgcagaaatggatttgcttggctctctttcagatgtattttcaccaaatcccttggctattgtaacatctgattccacttctgttgaaaccaatggacaagcaaacactggtttagctccatcgttttctacttctcagtcatctactcaggtattctcatttaccaattatgtttaaagtttttttaatgggtatgttactgggttcatctgaaaactcaaccggatggtttatttatcttttgccctttgtgcagccttttgatgatccatttggtgactctcctttcaaagccatcacttctgctgacactgagacaagccaacatcagagttttggagttccttttcagccaacaccaccaacttcaaatcctaacaatgaacataactttggtgtaacggatgcatgatcattagggttcgattccggagagggagcctgagaaacggctaccacatccaaggaaggcagcaggcgcgcaaattacccaatcctgacacggggaggtagtgacaataaataacaataccgggctctttcgagtctggtaattggaatgagtacaatctaaatcccttaacgaggatccattggagggcaagtctggtgccagcagccgcggtaattccagctccaatagcgtatatntaagttgttgcagttaaaagctcgtagttgaaccttgggat

SEQ ID NO: 22186 - DNA, 522 bp, Arabidopsis thaliana columbia
aggacaccgaccaaaaactgtgaacatttaacacaataattcacatacttgtaagaaagtatagacaataattaaagaaaatttacagatttcaataatttaaagagattagaattgatcatgttattgtatacctcgtcgagcatggagatgagttttgattttttctttccattatctcctccgccgccatcagaaacaccgcagagattctcaaccgtcggatcaaaaagcagagaagaatcatcgtcgtcgatgactttgtcggtgtaaatcccacgacccacattacaaaactcatcaagaagcatctgtgctggtttcaagaaccttgatcctttaagaatcgacgcgtacgccgtgaaaggtccgagaggccagagcttctagacgcgatggtgacggcggcggcgttggcttcaccggcagatctacagaatccggagttaacaacaccgggaacgactagatcgtaagcgagtctagggtgagaggacaaagatagagatagaggctcgggtt

SEQ ID NO: 22187 - DNA, 556 bp, Arabidopsis thaliana columbia
tactctttcttgtgaatgctgcaggttgtgttgatagagaatgatgttgactactcgccgttctcttctcaagttctggcatgcttgccacccttaccttggtctgtatcctctgaagacgtatccaatcctgttaggcaagacttacgacatttgcttgtctttagtgtggaccctccgggtatgtatctagagctttacattttataaagtatatatgattcaagccaaatttaaatgtctcccagagtctgcagttagttgtgcacaagcagattaactttatttggtgctaacaggttgcaaggatattgatgatgcattgcactgtacatcgcttccaaacgggaactttgaacttggagtccgtatcctagagtcctcagattctcataaatatgactgtgctttcaatttaggacatgtcaatagtcaatgagttaaaaatgagtttgtgggatatatttaccaaagcattgaaatggctcatattaccttttagcttcatagttcgcttttatcataattatctagtacgagaagtgcttttgaggtg

SEQ ID NO: 22188 - DNA, 284 bp, Arabidopsis thaliana columbia
aaaagatgtagtttcgacggacggctggtgtgagagtagcttttatagatcctgaatcgcaacagtacgtgcttgagttacatcagtggagggagagctatgccagtgtgaaaggttggaatacggtgtgttgataagaacgacgcaacgttcacggtggcgcgacgttttctctctctgggtatttccgagtgcagaggagtgaaccctgttcacgacggtcgtcaatctgtctgggtggcgacaccgactcctgttgttgacggcttggagcaaagtagtct

SEQ ID NO: 22189 - DNA, 491 bp, Arabidopsis thaliana columbia
gccgaggctctgttgaagctgattagcacgtcggttcatggagtttctcaggcaatgcaagttgcagcaaacatggccgtatttgaacgagcttgcgatttcttcttccgtcacgctgcacatctttcaggagttcctttgagaatggcggagagaggtaggaggcatttcccattgacgaaatctcaaaacactgcagaagatacactctcaggaatgcttaagaagaagatagatggtttcatgacattactcgagaatgtcaattggacaagcgacgatataccacaaggtgggaatgagtacatgaacgaagtgttgatctacttggaaactttggtttccaccgcacaacagatcttacccgctaaagtcttgaaaagggttttgcgtgatgtccttgctcacatttctgagaaaatcgttggaacgttatggggggatctagtgacaagattgagcatggctgcagtcaaagtgacttgatgtgg

SEQ ID NO: 22190 - DNA, 686 bp, Arabidopsis thaliana columbia
gactctctctcgccctccgatgagctggaaccgacggtcgatacgtaaacgtagcatcggcgtttcctcttccttctccgccgcctcttccaccaccgttattatcgccaccaccgttattatctccggccaaattggctgttccctgagcgtcatcgttaacaacggaatcaatccgatccctaacgtcggcgggactccaacatcatccgaagagaattattatcggaaccagagagaagaagtccgttagaagaatccgatctcgatttccgtcgacgaagcctatcaagatcgacgaactctccgccaccgttctccgtcaccgtagtaacgccagcagaatccaaaatcgccatttcgaaaagcgtttgacgaaacagcgtcgggagaaaagaggcgtcagagagaatcgagaagcatgcagaagaaattgaaagaggaaacagaatctaatggagagggaaagagcggattgaaggaagaagctaagaaatcggtgggaatgggattcgtgtctggttccttatagaaagagaagcaaagttttctctgaagagaagaagaagaagaaaggaaaaaggattcacgagagaggaagatgcaacaatggtgacggaagatttttaattgaaaagcggtgttgggatattttcatgttttatttattttaaaatatcatatgg

SEQ ID NO: 22191 - DNA, 224 bp, Arabidopsis thaliana columbia
accctcgcgtcccagcccggattccttgacgccaccaaatggggcagccgcgttagagaacacccctaggttcgcaccgatcatgccggtctccagcttctgtcccatccgtaggatgcgagctgtgtcactggtgaacacgtacccggccagtcccaccggaaccgagttggcgagggctaacgcttcctcttcggtgcggaaggtcgttatcggggcgactg

SEQ ID NO: 22192 - DNA, 380 bp, Arabidopsis thaliana columbia
atcacgactacgtcccaactgcaacaatttacagataggataaaaaagaggtagcatgcattagagaataaattacggcgtccgttagtaagtcaattcactctattcaattttttaccctccatgctactataaattacaacgatactcactcacaaaacctaaaccactataacactctttatacaaacttcaaatccacaaagagtctttttttttttttctcttcgacttagcttatacatagttttattacaagatgtcattgtcagcctcggagaaggaggagaataacaagaaaatggcagcggacaaggctgagatggggaggaagaagagggcaatgtgggaaagaaagtggaagagattggacattgtga

SEQ ID NO: 22193 - DNA, 449 bp, Arabidopsis thaliana columbia
ataactccaatgtcccaattctgtaaacacttagcctcaaaaaatctaaaaaacactcttatactcgtctccgacaagccctctccgccgtacaaaacagagcacgacacaatcactgtcgtccccatctccaatggtttccaagaaggccaggaacgatcagaagacctagatgagtacatggaaagagtagaatccagcatcaaaaaccgcttaccgaagttgatagaagacatgaaactatcgggaaatcctcctagggctcttgtgtacgactccaccatgccgtggcttctggatgtagctcatagttatggtttgagcggtgccgtgattttaacgcagccttggcttgtctcagctatttactatcatgtattcaagggctcgttctctgtaccgtctacagagtatggtcactcgacgttagcatctttcccttcgttacc

SEQ ID NO: 22194 - DNA, 638 bp, Arabidopsis thaliana
tccgtaaatgttgttcatcagatccgagtctgtagattttatctctcagatctgagtttttgttttggcttattataatcaaatttcattgctcggaacatagtcagactcgtttgagtgtgaattgttgctattgatacatgtttagatgaaatgttctagttcagatctggattttgattagaataacgttcttaggttcatcacaatgtgtgattcttcgcctgtgttcataggatttttaaatgatgtgaatgtaattaactaatactttgttttgtttctggttggtgaaggtgaggattcaacttggtcagggatctgcagccagtataaccaccaacatgcttaagaatgagggcgttggtgccttctacaaggtataaattgcatttctggatgcattacttatcttgaagatgtacgttttgtgtagtatgttttctattgatatgttcatgacttttgttgatttgtaatgtatatgatttctgcatttccggatctgagtctcagctattcaaagaattaatttccttatctaacagtctttccaacaacaacattagttatccccattgaagatgtccctgagcttatttgatgttaattttttttaatagggattatctgctggg

SEQ ID NO: 22195 - DNA, 773 bp, Arabidopsis thaliana
agattataattttttttaatagggattatctgctgggttgctgaggcaagcaacttacacgacagcccgtcttggatcattcaagtaagttagtcattcgtctttcgtcttgagcccatccagatgaatagatttttattgccttatggttatggataaatcatcctctcttctgtcaatcttattaggttgctgactgcaaaggcaattgagtctaatgatggaaagcctctaccgctgtatcagaaggcactatgtggtctgacagctggtgctattggtgcttgcgtcggtagtccagccgatctagcacttatcagaatgcaggccgataatactttgccgctagctcagcgcaggaattataccaatgctttccatgcgcttacccgtattagcgctgatgagggagttttagcactttggaaagggtgtgggcccactgtggtcagagctatggctttgaacatgggaatgcttgcatcttatgatcaaagtgctgaatacatgagagataatcttggtttcggggagatgtctacggtcgtaggtaagctgctcttccaagtttctcatacagtaagaatatattttttctgtgagcaggtagatagcagttagagtcaaggatcctaagaatcaatcgtcttggaaatttacatttgtagcatataatctcctgattacacgagtgttagattgtcataaattaaatgtgtattcacttaatacaatctatcaagactacacaaggaaaatctttattatgagag

SEQ ID NO: 22196 - DNA, 479 bp, Arabidopsis thaliana
gttaagactaacaaaaaaagagaatgaacattaacaaattcacccaaagattaaggacaacgagaattctggccaggtcctccaaagtaaaagtagggctctgacatgtatgttttccggtggagctttgtagaataacactcgtactcatcagcgtactcggacagatatttggggtatttgatctgcaaggaatagtccttgattctaatgttgctgtggtaacaagcttgagcccagaggtaagaggcccattgcccactccccatatgaagttcttgtatgtggcttcttccccacgtttgggctatgtacttctccaccacactgcacagcggttgcgctatgtttgaggtaggcgaagagtgtccccggccaataacctatcacgttgttagcacatgtcaaccaccaattcccgctgttggtatcctgcaaacatagtcgatcattaaacattgtaagctagcagagtatat

SEQ ID NO: 22197 - DNA, 1144 bp, Arabidopsis thaliana
acataaactctggcaaatagagtaatctgaataaggtttttccccattaatttaatatcatagggaaacaaagttttttgtttttttttctgtttgattcgcaaaacatgtgaccccaaaagacaagagacaaactgtatgaaacttaccaaaaaattaagagaaaaagagtttttgttctgcatcccaaacagtttgcttcagcaaaaatcagttctttgaacgcttcaagtaaacaactatggctatgcttgttaggacaacagctccctcaaccaccacaccaccacgccatgaaacccatccgcttcctctgtctcgagaatcacctttcttgagttgggtggtttctgagctcaagctccttgttgactcagtgaagtccagatgcagcctcaaaaccttttgtcctgtagacctagcaagagtaacagcaccaaccaaatcgctatccgatgtaatcaaaaccttatcaccttcatcgtcctcatatataatctgaggccgttgttccacattgttattgtcgctgccaattctttgcatcacaatacccatcagctcttcgaggttttcagctccagaagtaaaccgatgtacacggcccttaaggtcttcaaatttgaacgaaaacgaattccctagtcctagagatgggtaagaactgagcttccctatatctgaatgatgcatcattgccgacatttcactttgagtgtcagaatcatcaggtggctctaacgcaagagctgaatcccaaaatttctgcatcatcgtgtttgccatatcatttacagctccagaactgttctccaccattgaaatagctgcgtgagtaatctgaagaacgtctacacaagctgcagctgatccatctttatctataattggaagatgtagaaactttccatcatgcattgtatgcaacgcatccagaatcgttgtctctagcgatgcacattcaggattcggtgtcattaccttctcgacaagagtcaattcaggagataaattttgtgccaccactcgcatcagaatgtcctttgaagtcaagattccactgattgtgtccccgtggaaatgagtacagagttacccgcaaatccctcatcattttcgcagcaactgagacaggatctgatgg

SEQ ID NO: 22198 - DNA, 566 bp, Arabidopsis thaliana
tatcgttgctcattttcatggtaatcctccacctgcgggcaaaatatttgtggacctaaatccaatttgggggaaagatgggcgcattaacattcgttgtcttccgagtgggacggtgcttatttatatcccttctgaggccactcgcaattgggtccttgaggttgggtgttggcaggcgggtaactgtctgtttactgttaccgcttgctctccaacagtaaccttaactcctcttaaattagtctcgttaccgatttggataatcctcaaagactttccacctcaattatactctatgcctggtctaagtattattgcttcaggaattggtgaccctttacacactgaaaaacatcagcttcatcctttagcagttcatacccggatcaaggtcgagatccttctcaagaaaactcttccacaatcggtgttggtggaggatgatgatggaaatgaagttagaatttcggtagaataccctcgtcttcctccaaaatgtgactactgcaaagaatttggacgactctatcacagatgcccatcagctccagatatcgagagga

SEQ ID NO: 22199 - DNA, 498 bp, Arabidopsis thaliana
agatatcatctgagagaaataatcacggcctgtttggatcattccaccatggcaacatgctgataatagtcctatgaaagtgatctcgtctggggcaatccctgcatcaatcatttcgttgaagtatgatatagcagtggatgcatctccatgaagggctaaacctccgattatcgctgtgtatgtaagcgagtttcttgtttgaattccgtgaaaaacactgagagcttctgagatgttaccacatttggcgtacatgtcaaccaatgaagttcctagcgcaacattgagactaagactgtatttctcgatgtaacgatgaatccaaatgccaacatcaagagcaccaagctgagaacaagcagataggcaatgtatcatggtgatttcgtcaggcttagtgttacttgtttgcatctcctggaacaatgccaaagcgtcttgaccacgcttggcttggactgatccacgatcattgcatccacagtacacatcttt

SEQ ID NO: 22200 - DNA, 682 bp, Arabidopsis thaliana
cccttctcttatctatgatgatgggttcttacttaatgattgtgtaaacacagatgtttttgagtgctcactacgcgggtgaggatatggtgatgaaggtgaaagcaggggactcatggaagaaagtgtttggtcctgtctttacttacctcaattgcttgcctgacaaaacctctgaccctctttcgctatggcaagacgctaaaaaccaggtttatccattaaccaaccttctaccttttgtgcatattataaaaaacttatctaacattgtaggaagtggtgtttgattagatgttaactgaagtccaaagctggccttacgatttccctgcttcagaagactttccagtgtccgataagcgcggttgcatcagcggtagattactagtatgcgacaagtaagcctcacattccaccatttgctctgcttttcttcgttttactatcattcactcaccgttgttttcttatgtttttttgttaaaattccttcagatttcttagtgatgattttttaccagcaaatggtgctttcgtagggttggctcaccaggagaggttggatctggcaattagaatctaaggtcagccatgcaaattatactcttagaccatataagaatatacatgtaaacaatgaacttatgcttgcatgaatttaacttatatacatagggat

SEQ ID NO: 22201 - DNA, 907 bp, Arabidopsis thaliana
ggtggaggaaattagaccgttattgctttgtggggacaaatatttaattacaaaacgtaaataagttcgcataaaaaacaacacggaaaaaaatcgtatagattcgtggtttttaggtaacgaagttggtgtatatgaccgttgcagcctcgcaggagcgtttgctctaggaaaaaaaggaacactcaaaacatgaatcgaacaaaaaaggaaaaatattgattgcattaccaaaaggctatttagggagctattaattagatttacatcaataatctacattattcaaaaatgctgcttgaccaacaaaacaaataaaaacaaaactcttcagtttttcttagcccatagaaagcatgtaattatacgcttttcataaagatcaaattggggaaaagctttataacatggttatggagtatcacaatctagcccaccagacattctaaacatgctaatgactttgattgaagtccaaagccaaaccaggccaacacattatatgtaaattcttcgttatttattcccttatgaatcactaaagaacaaacaccaaccccccaaaaaaatattcaagaaagaataagatcaaaataaaaagtatctccatatagagctgtgtaagtcacacttcctatctacattgtctattgacaaagtttcttctcaacaaaagcctcattagtaaactcttcaatcttctagcccccggaccaggaccaagatcgggtttagcccaagtttccgtttccttctcagaatctcccggtctatcctattgagaaaggggtcattgctcttgaacttcctagcgaatggtcggttgctcattaccatctttctgtaatccattgtccctaatatattggggtgctgctttggcggattgtccacgcgatgtaatgga

SEQ ID NO: 22202 - DNA, 477 bp, Arabidopsis thaliana
taccaataagagacagagctgtgagaatgcaagtgaccctatcacgactaatgatgtctttgtctgaagtgaataatgaaggagaaagagatggaacagacctcacacatcctgagatacttcatcgagtagcttctttgtcgcttcattaacctccacgttttccatcttcaggcgccgtcgcatagcagggtgactctttcccgctgctgcatatgttcttatcaatggttcaaatatttctgcgcctatgttgtctgttccagtctttaaaatctccaacaaattctcagctccattaacatctttcttttgctcgaaatagctcatcaaagctctgactgtttcaggtgacggtagccacttgccaccatctcctttgccgatggagaatgcctttgacatgcattcgagtgctcgagccatatcaccgctctttacatagtaatccacgaagatctctcatgttttagcatt

SEQ ID NO: 22203 - DNA, 3173 bp, Arabidopsis thaliana
tgctgcatgttgataattctgaattcggattaaggcctgatctcgcctctcgttgatggtatccagcgaatcgtcgagcattgtagaattctctttttcattcaaaggagcttacgttcgacgaagtcctgatacattgagctcggctggtacaactgcctctatcccgtaaaccaatgaaaatgggatttctccggtcgagcgcctaggagttgtgcgataagcccataagactggttgaagttcatcataccagccccctttcaaatgacttcaacgtttcttaagattgcttagaattgtcttgattgcggcttcggtctgaccgttcccttgtggataccgcggagtggaataactaaccttaatccccaaatccgagcaaaatgcttcaaactcgtgtgagataaattgtggtccgttgtcaataactatttcgtatggaacgccatgcctgcatatgatattcttccaaatgaaagtctttactgccgaatctttaatattcacatacgcttcagcttcaatccacttcgaaaaataatcagttaggactagtaggtattgtacacctcgggtcgacctatgtaatggtccaatgatatccattgaccatctcatgaaagggtatggggcggagatcgaagagaataactccgacggttggtgaatgagtggtgcatggagttggcaacgtttgcatcgttgagcatacttaacgcagtccgtgatcatagtaggccagtagtatcccattctcttgatcttgaaagccatagcccttcccgagaaatgacttccacacaagccttcatgtacttcgctcataacaatctcgacttcgggcccaaaaatgcaaagtaagtaggaatcacttacacctcgcctatataaagaattctttgatggacaaaatttcgcgctaacgattctcatttttctagcttgccatttgttctttgggagctcgcctgtagcgatgtaatgctttattggctccctccaatcagcccccccaatctttagccggaattcagtcaatttcgtgaaacactcgagcttctggttcaggatgttcatttggtgctaatatatcctcgtcaacccacggttcggtttcagcttcgattgtagcgccaggggtgatttcttctattagttcgagcccaatatcttcctgcacagtaggcttaggtatagttgtttcttttgactttcgccttttgacaggtggtaattcgacaacaagttattcttgaggacaaatatactataaaatagatagataattatagagaaaactatgagtattgtaaaagaatatgtatagctaatttgcaccaagaaaatgcgtgtgtctttacatgggctttgactcacaatatatacccaaagaatacatttaattcttatttaatcataatcattctatcttaaacgcatccgtttctaatcttcgaattaattatttgaacgtttgaatttgaatccactccggaccttcttgacttcacctttcggcccattcagcctcctcaatccgggtagtcttgacttcgatgctacactcacttcgcaggtcagcacctcatccctactctcacctcgaagacgcttgtgggccttctctcttatgggcttcctttacccacgtagcaatctttggccggatccgagcccatggtgcgggatccgacaccaacaatcaccgtcagcggaaaggaattgcacctcctactatccagaacaacaactttgagattaaaagtggtctcatctcgatgattcaggggaacaaattcgatggtctgccaatggagaatccactcgaccaccttgatgaatttgataggctcagcaacctaacaaaaatcaatggtgtcagtgaagacggattcaagcttcgtttgtttccattctccttgggcgacaaagcacacatctgggagaagaatctgccccatgactcaatcaccacctgggatgattgcaagaaggcttttctatcaaaattcttctccaacgccagaaatgagttctctgtctctgtatagaaggctggtgaaagcttctatgaagcatgggagcatttcaagggttataccaaccaatgccctcatcatggcttcactaaagcctctctgctcagcactctttatagaggcgatttaccacgcatcagaatgcttctggataccgccagcaatgggaatttccaggacaaagatgttgaagaaggctgggaattggttgagaaccttgctcaatcagatggtaattacaatgaggactgctataggaccgtcaaaagcacaactgactttgatgacaaacacaagaaggagatcaaagcgctgaatgacaagctggacaggattcttcttagccaggagaagcatgtgcacttccttgttgatgacgagcagtatcaagtccaagatggggagggtaccagttggaagaagtcagctacataaccaacaaccagggtggctacaaagggtataacaacttcaaaaccaacaacaccaacctctcctaccgcatcacaacctttgctaatccacaagatcaagtctatcatccacatcaacagcaaggtcagaacaaaccttttgttccctacaatcaaggttttgttcccaaggagcaatttcaagggaactaccagcagcaaccaccacctgggtttgcacctcagcaaaaccaaggtcctgttgttcctgatgctgaaatgaaacagatggtacaacagctgctacagggacaagcatctagctccatggaaattgctaagaagttatctgaattgcaccagaagatggactgcagctacaatgacctgaatgccatagtggaggtgttgaattccaaagtcagatacttagaaggacaatccgcatctacctctgctcccaaagttacgggacttccagggaagtcaattcagaatcccaaggagtatgctaatgttcaggctatcaacataaggagtggaagtgagttatccactagagagagacccaagtcagtcactgaggacagtgcataccaagatggggaggatttcagtctcaataaagatcaagctgaccagtcactcgagcagccactcgaccagccactcgaccagccactcgaccagccactcgaccagtcacttgagcacccga

SEQ ID NO: 22204 - DNA, 3062 bp, Arabidopsis thaliana
  unsure (1)..(3062): unsure at all n locations
gatgcatagaatgggaaatcagatgctgaaccaacgcctttccttaataaaatatgcacaactccctagcataccagtagaagaaacaattgcggcacaggctccgtagctgcaacgacccaaacatctggtgaaaccacgaacctccatgatcgattccacatccgaggtccttcagcatgcagtcgacttatgtgatacataaccaactcccccattgtgtttgtagcttcgaatgatggcactaaatcccaaaaagtcgcattcacggcttcaacctctcgtccgttgctagttgcggttaggaacagtccatgatagaaacatgcgtaggcgtcgatgggagagatagaacccaacatggttaaaccatgagcaaccgtaacgaaattgcaagctaaacgaaccccttcaaggtaaagcgccggcattgctccccgttcaaggaggagggtgaaatatggtcggaaaggtgttttcggcaacacgaaatcaggccacgtcataaaatcatccatgttgatagcagtcggcttcagcgtgcttacgggacctctgagcgtttcaatgggagttacagaaacgggtaagtagttgacgaggatgctgagtgggttaggtagctgaatggccatgtaaatttccgctggtgggggtgtggggacgtccattgccgagtctgagggatttttttggtgagtttaggttatatttgtcatagtaagagtaatgaaaagtgtggagatgacttgtcccagtgtacatgttatatagacctaatggcgaggagacaactaagtaaatatttgacgtcccacttacctattgtaggtggtattaatattggacattaactcgtgtttatatgaaaagaataaactattaactatttccgattaaaactgaaacttcaaattacaattttcgagtatattggtttatgtacgtgtagatttacacgtgtacttctatattgaaatttgcagtttttgatgtaaacccaagctatctcgtcgacttattagttacatgtacgtcattagtaacacgtgtacgtctatataaacctatacgctgaattggagtgtatttattatgccatgtcacgtctatcacaatactgtcttttgcgtcaatccagtcatatttattcctacatttatagtgactttaaagttataatgtaagtacagaaataagtatggattacgaaacttcaaatttattactcatatccgaataaaccattaaacggagaaactttgtaaaccagaggataagcacaaattcaaacataacttcataaaagcattacaagaacttgaacaacttcatgcatagaggataaaacgaattagaaacataacttcataacggcattagaagaacttgaaacataacttagacgataacattaaataacaacttcaaataactagtagatttatattactagagcatttggctaactcgcctagcacaccaccagacgtaacaactgttacacacgttcttgaacggtccagagacaatgtaacaaagcagggcgcaatctggagtttgaataccatggctgttatgataagagaacgtcgatccataagtattattatatggagggcgaaacttctttaaatcctccaggaactcctcacacaaatcccgtatcacttttgtccccaacggataatgattgcgtccgaataggtttagaaacatggcgcccatgtaatcattaccgtcaattatgaaaagtatcgcacaagcaagtgttgcatgggcttgtgatggaacatgaggtcgtaagacgttgatggctcctttaatgtcacgttcatgcgttagaacacgcagagcttcaaaatacatggcagtcggattgccagcatccacacaccttttgaaaaggctcgatgtcggccttcttcttgtgcgccggatggatgatgctgccatcaacttggtagtcgtcgggatcctcacacatgctaaaatcatcagcacccttcaaggacatccggacggtaaacaacatctctgctacgtctgcctgaccgtagtagtggctgaaggtcccaccagcatttgtgaaccactgtcttagcaatctttgcgagtaaatcgtcaggaatagtgaggttgaccatgttagaaatgagatactccgaagaggtcagatcattgtccttttaataacccaggagggagggtcggatggggagatagcggttacaataaatttgtcaataaatgtacgtatagagtaacagtgtacgtacatatagaattctcatatttgcggtctaatccgaacgaaatttatattaaatgattgatatatgtacgtctaataaggagttacacgtgtacgtatatttattataagactaaacgttctggcaattatgacaagtgggagtgtatttattaattaacgcttggcacgtctttaataagactgacattctgcgtcaattgactgacatatatccttacatttattattacatttatagttagaatataagtacttgttagaatgtaagtacttgttagaatgcaagtacaaccgtaagtttagtttgacaacagaaatatattattcatgaccgaaatatattattcatgaccgatagaaccaaaccgcatgaaacagacacagaagttgtaaatagggaatttaaaggaaacggaaacaaaacaacataataggtaatttcaatgaagcaaaaacaaaatacataggaccaaacacctaacaaacttgaaacacgtgacagtgtacgtacaccaaacacacgtacaaatgagagacctagagcattcggctaattcgcctagcacacgaccataggtaacacttgttacaaacgttctggtatacactagaaaccatgaaacaatggtaggcgcattgtggcatattaattccatggctgatcggataacagaacgaacgagcgtaagtattattgtacggcgggttaacttgtttacncctcgaggactcctacacaaatctcgggtgaatcggcacgtatggatgatggttcgtgtgtgag

SEQ ID NO: 22205 - DNA, 619 bp, Arabidopsis thaliana
cattcaaacgtttaggatttttatatacattttgagaaaagtgaaatgtataatattatttggataagcagtgtatatcttattaagtggctatgtttgtaaaaacgcctaagcatagaatctacaccgttgagtttgaaccattatattaacctcttctatctctttcaatagggttcatcagtttggattgtggattatccccgaatgagcaatctccgtatgttgagctggaaactggattacagttcttatcagattcaagcttcatccaaagtgggaaaattggtagaattgatgcaagtcttgagtccaagtacccaagatcacagactacgttgagatattttccagatggaatacgaaactgctacaacgttaatgtttataagggaacaaattatttgatcagggctacaattaactatggaaattacgatggtcttaacatttctcctagatttgatttgtacattggtcctaatttttgggtgacaatagatttggagaagcatgtaggtggtgatcatgggaggagatcattcacacccaaagtctaactctttggatgtgtgcttattaagctggacatcacgccgatcatacagtattggactaa

SEQ ID NO: 22206 - DNA, 2262 bp, Arabidopsis thaliana
gttagaagacacaaagccaaagactcatatggtctttggctacaccatgaaagctttgagaagcaagaagaaggttggttagtgttttggagtcgaatatgacttgatatcatgtgtatgattgagtataagacttaaaccgcaaccggatcttaaaggcgtaagaattgtatcgttgttaaaagacacaaagccaaagactcatatggactttggctacaccatgaaagctttgagatgctagaagatggttggttagtgttttggagtcgaatatgacttgttgtcatgtgtatgtgataataggtttttaagtcaattaaacctaaagcactatcatgtcgttgtagtactgaaggttgtcaatccaaatgggtgtgatgctaacaatcaatatgtgatcagaagtcactacgtgaagccaagcaataacaagttgttgtgtgttctagcagtcctaagtgaacatgtagaaaacaaaaattcaagcagaaacagtaaaacacgcgaccaacacagctctttgcagagcactgggtaaggtcgagtaacagagagaaaataaaacacagatactcgactgcacagtctgttgccagacaactgggtggtcgagtacgaggtcgagtaacaagaaagaactgcagaaattaagcgagaggtaacaagatgcagtaaacaacagtagagtaaacaaaaaattcaattagataaagaattcccgaggatggggtaattgagtagttttgtttcctcagtttacaggtgattgacatgctcaataaattaacccaggcaacaagttcattaaccaaatctaagtgccaccacaatagagactctcaagttaacctagtcccagactcaatcaccattgacgagacctaacctaaaaggcattacgaatcaacaagttaaagccaaaacgctccctgcaaccaataccttggtacaaggtcacgaatctctggaattagtggttcagacattttatcgaacaccttttgggcgcagaaatgtctgggctcaaattccagttgatcagaaagcaataggcattaagaataactaatccagaagggatctatcaattaaactcaaccacctagcatactgagaattctacactactctaacctatcctcagaaacctattcactactcagacatcatagcagatagcataaacgttgaatggaatgaagacatgataacaacagagtaatagcaagatggtaacaggatgaacaacagtaaaacgaaattaagaacaaatactgaatactgaatactgaatactgaatagataaagagaaatccagattacaaaaggtctagaacacattgtctgcggaataaaactagataaaaacttgttctcgaaaatgtaaagtacatgctatttatagcaaaatattccgaaaccctatacttaaaacgacgcagcattgggacggattaagaactgtactcgacccaggtggtcgagtgagaggtcgagtgaatagctggagtctttttttctttcttgtgctcgagtgtctagttaagtgcggaatgaagaagactctgaagctcgcaatcgagtatgtagtcgagtggtggtgatggtgatactcgacttccaggtagagtggtgtgatcgagtggtgatctggtaatggaggtgaagatactcggcctcggggtcgagtgatgtggtcgagtgatgtggtcgagtgattatcaggtggtggaggtgaagacactcgacctcggggtcgagtgatgtggtcgagtggctctcctgatggtactcggctaggcagtcgagtggtgaggtgaagtggtgatgtcttctactcgacttggtggtcgagtggtctgttgaggtcttgaagcttctactcgacctcagggtcgagtggtttggcatgatcaggtccgcttcttccaattagctcgtcaacagctccaaatcacctgaaatcaacacaaatgtgcaacatgcatgcaaacctatcctaaatatacaaagtgatgacgaatgatgagaaagggtataaaacagtgatgatttgttttaaagtaatgacaaatggatgcttaaaacatgcaaaatacacacttatcaactcctccaaacttagtctttgcttgccttcaagcaaacaatcaagaacaagctggaggtgaggcttgaaagcggggactcagagccaaagaacctgttaaacgtgatgaaatcaatgtccaagttgatagttctaagctgcgatatgg

SEQ ID NO: 22207 - DNA, 738 bp, Arabidopsis thaliana
actagatatactatagactgtcttaggaaaatctgtgatgtgttttgttattgagactctccttctatgccttttatgtgtagcttattaaatggaaaacctggaacctaaacacactctgcagggtcttcttactctatcttgcttcttttattagggctgtccgtgtgcaccattttccaataggttagctcatgcagttcctgcacacattcaagggctcagatgcttagcaaactttgaagcattgagatttgcagaacccatacggcttcttgcagagaaaatggtcgataggatggttacaaagagtgttgagagtggaggaaaatatgtttctgttcatctccgctttgaaatggtttataattcctgccaatttctccatttctgcaattccttatttgtagtaccctcttataatctctatttactttacttttaaaggacatggtcgccttttcgtgttgcgagtatgattttgggcaggcggagaagctagaaatggacatggcccgggaaagagggtggaaaggaaagttcaggaggagaggcagagtaattaggcctggtgcaaaccgcatagatgggaaatgccctttaaccccactggaggtatcactgaaaaactacctcagctctccaagatttctgaaaatcataaattcagtttatctagtgactatcacaattcactttacggatataagacattatggaagtgatacattttggtac

SEQ ID NO: 22208 - DNA, 2900 bp, Arabidopsis thaliana
acattactgacgctgcaacaagcatgaatcaatgtcatataagtaaccacattccctttcacgccttccttttccatatccataaagaatacaaccgccatgttcaatccatggtgcctgcacatcccaccaacgattgtattaacagttaccacattaggtttaatctcgtcctctttcatccgagaaacgacttctttagccgtctcaagctttccagctctgcaatacccatcaatcaagcaattgtaagtaactgcattgggcgcacatctctcttccagtttcatccttaccaataactcctctgcttctttcaacctccccaccttgcagagcccgtcaatgagagtattaaaatgaatcgaatcagctttaatcacatttccatcatcagttctctttccacgcattttttcaaaaacttcgagagcttcatctacccttcttgatttgcataaagtgttaataagaatccctaaagtcacaacatcaggccggattttcacctcatccatcttcaagactaaatcattcattctactaatgtccatattccttcctaagcaagacaaaagcgcattgaagggaggagcttcaagtggggttttgttcttcatcaggtcgctcaaaatatcccaagcagcattggcgcgacgatttttgcatagacttgatataaaccgagtcaaccaaacagagtttggggagacaccatgagagctaaatcttgaaatcaaagcaattatcttttcttctgtcaaaagcctttccttccaaacctcgtgtaacacaatatccgctgtgattctattaggaggaaaaacagattctttctgaagcatttcgtcgagcaccttgaaggcatcatccacaagtccatttcttagcaagacgtctaccacaacattacgaacctgcgagtttttcatattcgaatcgagtctttcgtatacaagaaccgactgattcaccatacccatacgcccaaaccatcggatcagaagcttagtggcaacgatagtaagaggaatgttcttctctttggcgatctcgtagagacggagaagtttatcacgcgggtccggttcactaccggcgaattcaatgaccgactgaagcgccaaggagagagattcttcacggcgtttcagagactgagacttcgcatccaggtactcgaagaacgagattgctagagaatacgatcctagccgccgcgtgatttgcgagaatactaaaggagaagcagaagaagaagatacgacaagcgcacttagcgactcgctcgacgcccaatcatgttgcggggtattttgaagagttttcacaaatttgactactacaaattcctggctctccgatttgatttccggccgtgggtcaacatcataagaaaaacgccggaggaatcgagaatggttgagcagaatataagagttctggcagccgggaaattgatagcatgatactcattgtctaaggttttgaaaaagacggccaccgggaaaagtgagacgacgaactctgttggcgaattcaacgtacaagaagttgggcccattttaaataatgggcttacacattagcccaaataaacctttacaatattacacaatggggacaaaaatttattttttctcataaaactgaacgtgagctttttatcatgctgattacattatatttataacaaaatgaggatgaatctttatttttctcatataattatcctttacattaaaactccaagagggctttgttgatcacttctcctactttacctttggaacagcaattctgagctcagcctctcgccatttcttctcccatcaagattaagtattcgtgctttacattttttgattgttgaagtcaagctctaaattgagtcccgactcaaaaagcttagttcacctagcatcgagctacattcaaaagataaaaataattcttgcagttaatccgagctcaacgctcgcagtcacacttataaattgagccgagctcaacgcttgctattatgtgaaaatgtttcacaaaaaccgagacctcgtcttgctttaagtcttcaaaacaggataagccgagagttcctcgcaccttaaaaaaaaaaaaaaaagagctcaaaagctcacgtatcttgctaacccaaatgataatggcatgtctgcagctcatcgcaaatgtttttttcagctcatctgcccggctatctcgcagatcgcaagacaaaccatttagcttgccttgcagcttgttagcaagatcatttggtaacctatctcactgctcggctcatcagtcaggtcatttctctgctaggcattcagatcatccaggagagcatcccacaactcaacaactcatgaggtccatcagactacctaactcacaagcttagccttgttttatatcatcgacgcgtgccaagctaaactgacatatcttggagattcaacggatcaaattttaattcgcatcttcctaaagtataagccgaatattcacttcttttaattcggaaaaactccctctttaaattatacataggcctactgggcataagccgagagacgtctcgcgcccagtacacgccgaatacttttatttataaagccgagctcagtctcgcacttaacatctaacccgaacttagacagaaaaaatcggctgtgacgtcaggtgaaaaccagtccgcccgaaagccgagctcaaagcttgcagatggcttataatttagtcgatttaaaacctaatttcaagtttgggaatccgatattgttaatacgtaatcaaccgacgaaggttcacaaaaaaaaaaaaaaaaaaaacatgaacttgttcttaaggacaaaaacaatttattcaaatataagtctgaaagataagagtggtcg

SEQ ID NO: 22209 - DNA, 2177 bp, Arabidopsis thaliana
aatcaatactcaatcacctagcatactgagaattctacactactctaacccatccccagaaacctattcactactcagacatcatagcagaaagcataaacgttgaacaggttgaaaacatgataacaacaggatgataacagaatgaacaacagtaaaagaaattaagaacgaatgctgaatactgaatagacaaagagaaatccggattacaaaggtctagaacacagtgtctgcggaataaaactagataaaaacttgttttcgaaaatgtgaagtacatgctacttatagccaaatatttcgaaaccctaatacttaaaacgacgcagtattgggacggattaagaactatactcgacccatgtggtcgagtgggaggtcgagtgaatagctggagtcttcttttcttccttgagctcgagtgtctggttgagtgcggaatgaagaagactctgaagcttgccatcgagtatgtagtcgagtagtggtgatggtgatactcgacttccagatagagtgacgtgatcgagtgatggtcaggtggtggaggtgaagacactcgacctcgaggtcgaatgatgtgatcgagtgacggtcaggtggtggaggtgaatacactcgaccagggggtcgagtgatgagatgaaattgtgaagtcccctactcgaccagggggtcgagtggtctgttgaggtcttgaagcttctactcgaccttgtggtcgagtggtttgacatgatcaggtccgcttcttccagttagctcgtcaacaactccaaatcacctgaaatcaacacaaatatgcaacatgcattcaaacgctatcctaaacatgcaaagtgatgacaaatgatgagaaatggtataaaacagtgatgatatgatgctaaagtgatgacaaatggatgttcaaaacatgcaaaatacacacttatcaattgaccattggagtacataaaggattcgctttatccatattaaagcgctttaaaatcctttttgtataattgaattgatgcacaaatataccatcttggaaatgctcaatgataataggtttttaatcaattaaacctaaagcactatcatgtcgttgtagtattttaggttgtcaatccaaatgggtgtgatgctaacaatcaaaatgtgatcagaagtcactaagtcaagccaagcaataacaggttttagtgtgttttagcagtcctaagtgaacatgcagaaaacagaaaatcaaacagaaacagtaaaacactcgaccaacacagctctttgtagagcactgggtgaggtcgagtgacaggtcgagtaatagacagaaaataaaactcagatactcgactgcatagtctgttgccagacaactgggtggtcgagtatgaggtcaagtaacaaaaaagaactgcagaaattaagcgacagataacaagatgcagtaaacaacagtagagtaaacaaagaattcaatcagataaagaattcccgaggatggggtaattgagtagtttcgtttccttaaccctagacaacaagttcattaaccaaatctaagtgccaccgcaatagagactctcaagttaacctagtcccagactcaatcaccattgacgagagctaacctaacaggcattacgaatcaacaagttgaagccaaaacgctccctgcaaccaataccttggtacagagccacgaatctatggaataagtgttcagacatttcatcgaacaacttttgggcgcggaaatgtatgggctcaaattctagttgatcagaaagcaataggcattaagaacaactaatctagaagggatctataaatcaaactcaaccacctaccataatgagaattctaaacttctctaacccatcctcagaaacctagtcagtacccatacatcattggagagaacataaacgatgataagaatgaaaacatgatagcaacagagtaatagtaggatataacaggatgaacaacttagtaaacgaaatcaaaagcaaatactgaatagattaagagaaattcagattacaaaaaggtcaagaacacagtgtctgcggaataaaacttagtttttgaaaatgtaaaatacatgcaacttatagcaaaatattccgaaaccctaatactcaaaacgacacagtattgaatggtcaagtgataagctggag

SEQ ID NO: 22210 - DNA, 2740 bp, Arabidopsis thaliana
gagatggtatagtacaatggtgaagtgaggcgcttacctcagtcaaagaatgaacggagttggtcgtcaatggctgcctgtgattgctcccaggccattgaagagtcgccctgttctgtctcagctccagcatgtgggtactgtacctcattgcctttgtggcgaccagcaccgccatgagtatactcgacttccattcttctgctgcatccagcaccgcggtcaagggatctcctggcgtgggtaagctaaaacatggtcaagtagttttcattgctctgtggtcgagtatactactgtaccctcagacctagaatccacttcactcagctctttatacttatctcctgaagacactaaccaaatgcatcaaaaacaacaaggaaaaataaagatatgtacatagatagacatgggaattcctcccaagtgagcttgttttaagtctctaagcttgacttctcatactcattaggcttagggtgggttgtagagaggaaatgaggctcctctccttctttggtagcgtgatcatcatactcattagggtttcttgacatgtctgcaattgggtactcagtggtcatgtcctcacagtaagcttcttttttatcaagatagtcttctcctctagaccattccgacgtgaattcacatccttctttgctaacaagtatagtggcgccatcgtcaggggcgtccttgatgttgagtagtacttggtttgcttttccattgagctccttgatttgatcctttagctctttcacaatatgtgttagctcttgtacggctttttcttgccatttagatctctccttgagttctaaccaatcatttgacatctaagtgcttgccttgagttgtttggtcgagcatgatctctcaggacaagttggaggcttcttcgagttgttagtggaattagttggtcgagcatgtgttgaacttacttcattagctttcataacctttgtgccagaccccatcaagcccttgtaagcctctgagccaactgctgccttgtgtgagtctaatgacttcttagaactcaaagtttcactagggagatacccacctttaccactcttggtcaaaacagtttttgaattatttgcttcttcaagttccactagcagttcaccagctaactgttccacttccttaactaagaaggtttgttcttctattgtcggctttttcatagcatcattgatatcaaacttcatttccaaattcttccccagattaagatcaatctttccttgcttaacatctatgattgctccagctgtagccaaaaaaggtcttcctagtatcaagggatcttttggttcttcatccatgtttagcactacgaagtgtgtaggcacctccacatttccaatcttgataggcaaatcttctaataacccatgaggtagtctaacagacctatcagccaagatcaaggagatattgtagtatttatacttgttgaaacccaacctcttagctactgagagtggcatgagatttactgatgctcctaggtcacaaaggcatttattgaaagtcaatgaacttagggaacatggtagagtgaatgaaccagggtctcctagcttttctgggacatcgttctcctgtatgatggcactgcactcatggctcagaactgttgttttctgaacctcttgaattctctccatgatcaagtctttgaggaactttttggaatccgggatacgcgttagagcatcagcaagaggtatccttaattcgactgccttgatgttcttggcaaacatagctctgtacttatcttctaactctttcttatgtcgaccaggaaatggaagtgggggcttgtaaggatgaggaatggagactttttctttgcttttgacaacaacatgtttcggatcaattggtgatgttgctgggaaggtcggtcgagtgaagtggtcgagtggcagctcgagtgacaagtcgagtggctgctcgagtgactggtcgagtggctgctcgagtgactggtcgagtggctgctcgagttgtttgtcagcttgatctttattgagactgaaatcctccccatcttggtatgcactgtccttagtgactgacttgggtctctctctagtggataactcacttccactccttatgttgatagcatgaacatttgcatactccttagaattttgaattgacttacctggaagttccgtaactttgggagcagaggtagatgcggattgtccttccaagtatctgactttggaattcaacgcctccatttttgcattcaggtcattgtagttgcattccagcttgtggtgcaattcagataacttcttagcaatttccatggagctagatgcttgtccatgtagcagttgttataccatctgtttcatttcagcatcaggagcagaagtaccttggttttgctgaggtgcaaaccaaggtggtggttgttgctggtagttcccctgaaatcgctgctttggaataaaaccttgattgtagggaacaaaaggtttgttctaaccttgttgtttttgtggaggatacatttgatcctaaggattagcaacgttggtgctgcggtaggagaggttggggttgttggttttgaagttgttataccctttgtagccactctggttgttgttgatgtagctgacttcttccaactggttacctccccatcttggacttgatactactactcatcaacaaggaagtgcacatg

SEQ ID NO: 22211 - DNA, 2393 bp, Arabidopsis thaliana
tcatacgattgatgtttgcaaaaacaattgtatgttattttagaaagaagacgaaaaagaagatcaatgtcgattttgtggcgcacaaagatggaagcctaaggacgaccgtcgaagaaccaaagtaccatatagtcgtatgtggtatctacctattgcagatcggttgaagagaatgtatcagagccataagacagttgcggctatgcgatggcatgctgagcaccaatcaaaggagggagaaatgaatcatccttcagatgcggcagagtggagatatttccaagagttacatccccggtttgctgaagaaccccgtaacgtttatctcgggttgtgtactgatgggttcaatgcatttggcatgtctcgtaatcattcgttgtggcctgtgatcctaactccatataatttaccccctggtatgtgcatgaatacagagtacttatttcttaccattctgaattctggaccaaatcatcctcgagctagtcttgatgtcttcctccaacctcttattgaggagctaaaagagttgtggtgtactggagtcgatgcgtacgatgtttcattgagtcaaaattttaatctaaaagcagtaccactctggacgattagcgactttccggcgtatagcatgttatcaggatggactactcatggtaaattgtcttgtccagtttgcatggaaagtacaaagtctttttatctacccaatggacggaagacatgttggtttgattatcaccgtagatttcttcctcatggtcatccatcccgtaggaacagaaaagactttctgaaaggaagagatgcttctagcgaatcgtctcaagggaacaacttcgcgagattcagacgctccagcaaacagccacccgtcgtctcaagggaacaacttccaagaggaagttcctgggacgttgccggagctacaagaagactcggcgttggctctgcaatcgacactctctgtgccaaaccgggagcagtggtgttgtgtcttgtctccaattcccaaacctaaaaccgaatggtatgttttcttcctctattttattctagtgttcttagcctgtgtagtgtaactcgtgttatggtctgtagaatggcttgttagggtttgtgtaacatagtagaatctgcctttgttggagttggatgtttgttagggtttgtgtaacatagtagaatctgcctttgttctaaactcgtgtgtgatcttgttaagttcttcaatttgtctataatcttgttaggtcatttatagtgttctgtggtgaatcatgaacataattgtggaacatttctcgattgttgaacttggcatcttagcggctttgacattgaggatctgtctttgttctatacttgtctataatcttgttaagttctttattgtgttctgttgtgaatcatgaacttaattgtggaacatttgttgattgttgaacttagcatgttttcggctttgacattgaggatctgtctttgttctatacttgtctagaatcttgttaagttctttattgtgttctgttgtgaatcatgaatataattgtggaatatttgttgattgttgaacttagcatgttttcggctttgacattgaggatctgtctttgttctattcttgtctagaatcttgttaagttctttaatgtgtgtgatcttgttatgttgactattgtgttctgttgtgaatcatgaactattgtggaacattttttgattgttgaacttagcatgttttcggcttagacattgaggatctgcctttgttctatacttgtctagaatcgtgttaagttctttactgtctgtgatcttgttatgttgactattgtgttttgtgtgtgatcttgtcggcttatacttgtctagaatcttgtagaatctgcctttgttcagttatatagtctactatagttgtagtgttttggattttaaacatgtttacttctgtctgtgttgcatgtgtttggaggtttactcgcgacagaggatctaaattggttagaaagatcacaaggatttttactcaaaagttcaatgctccctactataattggtcctgtgtgccattggataaaagagaaagattgtttttagagtttgcggtaagcttcttgtatttctccaactttctttagactttactatttaatctgtcaagtgttcactaacttcacactttttttgtagaaaactcaccactgggatccctgaataacagggacagtccaatactactttaatgagatcgttaagaggcgcttgaaggacatggttagcaccgataggagaactcgagagcagccttcatggattggagaaactctgtggggaacaatgtgtgcttactgggacacagaagaagcaaaaaaaaggag

SEQ ID NO: 22212 - DNA, 2655 bp, Arabidopsis thaliana
aaataaaaacttataaaactgaatcgtatatactcccgcgggacgaatctagcatggctaggggtgttaaaacgggtaactgtgagacctcgtcccggacgtctacgcgtccgacaaccttggactcacgtttgcgcctcttccaggccgaacctctttatttttcgcaattcaacatagaattgcctttacgtggcttaattctataatcgctttcttattacacagcggtagtctttctaaccttggttaaattctaacaaactcttgtaccggtttcatcgtctttgccccttagacttagatcaatcctttactcgatcaagacatgcatattgtttgctaaccactctaggcctatcaatcgcatattcctttatcctattttcacggttaattatcaaacgtctatcttaactaataagctagatcgttacataccttggcccatatgcggatttgattccttagcccgtttgtcgccttactccattcgttcaacgactcgtatccgatcgtgaatttatgaaccaatccgtatcgttacttagccatacaagcaaccaaccccactagtctaagtcccacgatagagattggagatcgtacgattcccttggttcacgatggcggaatcaagctcttggctcattggtccatccgtcctccaaacgtacgccccttcggtttcatggtggatgattaagccctcggcttatcaaaccatccatatttccgatccggtcgtttactacgaccacccacggtttactaaccgtttatctctccggtctatggtggtcggtataggtttcggcttatcaatccatccttacgatccgaacgatatcattatcaaacccaagggtccatggattcatccaccggatcatcgtaggctagcccgtgaaatccttcttctgtcggctttaggttcgctcacgggtccaacatccattttggccatgggttcccaccgtggactttcccgttggttatccatcgagtcagcctttggttttaccgatctttgatcggttgcaccatggctgaggagatagatacatgaaggcggccgcattatttatcctatatggtgaatcatgttccttacccattcttggtgctttctccctttaccggtaagattgcatccatgggcgacccttgggtgtgttcggatgcacttatccttgtgcttcctcaaacacttttctcgatccatcccctccgacgatcggtctgtccgacccgtttcgtctgacgatcggcctagcccatccgatctgtccgacgattggtctgtgcgatctgatccttccgaccatcagtctagccgatccgatcctacgaacggtctacaagatccgattcgtctctaagacgaacggtctaccctctccatcctctacactccatcgaaccgttggaccggtgctacgcatcagttcggtcaagttatactcgccgagccgcaccccctttacgaccaacaacttcgagatgtgttgggacaattttgagaatgttttgtggtgtatggatgatgtgttgatgccttaggcgtcctaccttatataaggggcgaatggatgcttcccgaagcatcacatccgttccttgcacccttccgaaaggtcacatccattccttgcatccttccgaaagatcacatccgttccttgcatcctttgggcgatgcaaccgttcgttggtacccgctcgaccttacaccttttggctgagacacctcttcatctatgagctaccacagtccacaagctcgagtgtcagctgaccggaccaccagctgggtcagtactcgatcagctcactgagcttaatcgagctgtcggtcagctcacctagctgagctagctagtcttccagctagtttagctcacctagcttagctagctagttcatcctagcttgtccagctcgcctagctggttcagcttgaactttctcgttcttctgactaagtattttagtccgtttcttgaccatggtctagttttctcctaaaacaacctggcctctttatgaacgcgggacgcggtcgttacaagtctaccccccttaaactgaattcgtcctcgaattcggcgtgtataagatcttggttactccctaactcgggacacgggcgttacaagtctaccccccttaaactgaattcgtcctcgaattcagcgagtgtaagatcttgtttactccttaatgctttcccatctttagtctctccaagactttagatatcacgtttgatcaaatctctatttccgagtttgatcaagtttcccgatctttgtctcttacgacactcgatcaaattcctgatcctggtcctctcccggacttgatcattatttcccgatctttgtcctttcctggacttgatcaatgttttgcgatctttgtcctttcttggacttgatcaacgttttccaatctttgtcctttcctggacttgatcaacgttttctgatctttgtctcttccgacattcgatcaaatttttgatcctggtcctttcccggactcgatcattatttcccgatctttgtcctttcctggacttgatcaacgttttccaatctttgtcctttcctggatttgattaacgttttctgatctttgtctcttccgaca

SEQ ID NO: 22213 - DNA, 2497 bp, Arabidopsis thaliana
tgtgtaataaaaatctgaaagagaattcaagaccaaagcacaaaacacacaaagaaaaattaaaagatgctatggtatgtacaatggttgaggtggtgttatctcagttgtcaggtgaagtagatggagacatagtcatccatactctcttgggtataggctggggctgaagttgaggcgggagggtgttgctcgttctgtccggtcgagcgtgtgaaagctcgtctctgcctactccttggctctctcaactcggagatcacttcctgaggctcaaaagatgaagctcggggttaatcgatccgttcagctctccttgcagctgagctcgttgaaccgctccttcttacttcgggggttggagacggtggccttggcttgctttggaagtccttgagttgagcagccatactcttgagcgactttttcattgttctcatgttcttcttgaaacccttcagtgtcttgctgtgaaggttcccaagctcttcaagtacaccgagcttcttgtgaactttagcaaactcatctcctctttggtcaacaccttcttcataatgagcttgctcttgttcgctggtcccatgctccggttgatcaatatgttgctcaaactcgatctgctcctcataatcagcttaagtaaagtactcatgttgctcatagtcggctggactatattctggttcatcttcccgagctcctccaatgtctatgttcaagggagagggagatggcatgaaattgatgttgcgccttgtgttcaccgaagtctggttctcgcatggtaggggtagaagagaatgtccaagctccgagtggttgaacttgaagagatagcgatctgctggagttgttttctcaagaaaatccttcctcttgagatagtctaggtcaatgaacttaggcaacacgtcaggggttccgaattccatacccacaacttctagtattggcgttaagagaccagcaacacaaagactcccgcgaattcccgagcgatggatggttgcagcatactccttgtaactcaataagtgatccaagataacaacactcaatgaggtgtccgctctatcacctgccatcttcctcccatctcttgtctcccttaaaatgaagaccaaagattggtctatcatgcacaactcctcttcactaacaaatctggtggccttttttggaaagagggtgttggcgatgcattggtggaggtatctaatcacgggattacggattgaagaactcttggtcttggttggcaagaagggcttcagaccggttattgtcttccaaagagatttcagctcttcttgatcatagtcttggcggattccttctccacttgggaacccgaaaatggtatcaaggtggcaaatatcaagagtatactcgacatccctaactttgaaagttatgtaaccaagacctcctctctcttcttctccgaatcattgacacagaaatgaaccttgagggttgcaaggagttggcagctctcctctttgtataccccacatttggcagctcatgaatgttgcaagattggccaattccatcaagtattcaacatcaccacaaataccaagctcttgcatcttttccttatgagggtatctagttccctcaaacttcaactccttcaaatagtgatagtactcgctcggggttggctctctcttcctccttggtcggtttcttctcccaacaggggttggtgtatcatccccgatgatctcaaactcttccgcagaaaccgcttcttcaaagggagcctcttcatggtgttcttcttcagcttcaacgagcctctttccccgagctacttcttctctttgcatggttgagcggcttgagcttcctccttgaatcaagcttgttttttgagcacggcgagcttggcaaatttggcgttcagtcatgccactcatgtcaaacacctcaacttcctcattatcaacagaggatcttcttgcccgagatgaactcttccttcttgaatccatggagattggtggtgagctttgacaaggcaaacaagaacacttctctaagaggtatcaaaggagaagggaataagtttctttggtgatgaaatttggagcttgaaaccgattgaatgcttgaggatagactttggagtgattgagtaactttggtgatgtattggtgaaggggaacagattcttaaagagtgatagggtgcgttttaggggaaaggtttggaatgaagacttcaaagctttgtgagggggttgcgaaaacgagattatgaaagagagagtttcaatgagggtttgtcgaaatcaatgggtggaagagattggtctttggtttgctttggaagagatagaaaagttgattggaaatggtgaggggtatgggtaatagatttatccgtcgagtaaaggagtgttgggggagcaagtggagtcacgaaattaggctttgttctccaaataatgagagctcgagtaaagaatcgagcatcttcttg

SEQ ID NO: 22214 - DNA, 548 bp, Arabidopsis thaliana columbia
tggaggaggaggcggcatcatgtgaggtgggggatttgtcttgagcttcaagaatatctgcctcattctccctagatcagttggcttcccaggtttaggaccctgaataacattcactgatggtttcttgtccggatcctttttccctctctttttctcaatgttgggaacctcacgagggattagctctgcaattgctttccagtaatgcttgtcaacttctttgtggaacttctcttggttagcccagtatagctgcaagagaggcaaaactcacacaagtttccaatacatccaaaaaatcccaaatggctgtgaataggaattctatcactacttaccttctccttttcacggttatcagtcttgttggtctcaatggtcttgtctcttttctcatagaaggctttcttgaaatcttctgcttcagttatgatctgattccgcatctccttctctttcttttccttctcctcaaggtgaatggtgttcaactgcccaatgcgtgcaaaatatcagttaattatgtcgacaagaaaacatggtgg

SEQ ID NO: 22215 - DNA, 626 bp, Arabidopsis thaliana columbia
tgagagcgaatattccttcttgatggatgataaagacataaagaacgatacaaacttcaaatattgtttggttacaaaaattttcaattgttagcatttatttttgttacataaatttacatatgataagctatccagtatccacacaccacgaaacaattttcaaactatggagaagcttactttgtctttcatcactctcaccgttctctcagccatcttcaccgcagcttcagcggccgatgctacaccaagccaagtagtcctagacatagctggacatccggttcagtccaatgtccaatactacatcataccggccaagatcggaaccggaggtggtcttatcccttcaaaccgaaatttaagcacacaagacttgtgtctgaatcttgacattgtccaatcatcatctcctttcgtctcaggccttcccgtaacattctccccactaaacaccaaagtcaagcatgttcagctctcagctagtctcaacctcgagtttgatccacggtttggttatgcctgacccaaagtgtggagaacgacactctgtcaactaagaaagactttgtagcattggtggtcagaaggtagggtaatagttggtcagatcaagagtggag

SEQ ID NO: 22216 - DNA, 2781 bp, Arabidopsis thaliana
gttcttattcccggaatttcaacataccctcttccttctcgaattgtattcgtcctcagtgacaatcaatgtgagctttgtacttttccaaccagtccatcccaaaaataacatcgcatttcttcaatgggacgatgattaggtccgcgggcatattgacactgttcactacaactgagatgcctcgaaccagtctagacggatacattgcttgtccgctggctgctctaaccattccatattcggtgtttggttctttttcgaacccacatgtttcaaccatttccggactcacaaaacaatgtgtagccccagaatcaaatagagtatgcttttctacgtcacctactctcaaggtccctacacattcccttagaatgttgagtaccctatccccattatgcatgatgcaatccaatgcacgaaagaatttataagttgactacgcttaccagtgcccccccctgaagttcccagcgtttctagcttcttccgatagttcatacacacgtggtgctacggcctgcctctttggagggagcggtagtccattacctccgcgattcccaccttgcccaggttgtttctcggcatccaactttggacactctctcttaaagtgccatgcttgcccacaatgataacaagtccttggttcattgccagaacctttgattgcccgtgatccatccttgggcaactttgaatcgcatggtccttgcttccacaccgaccacatgcacctatggccttccagcaagttccgctatgattctttctacaagtcggacattcctcgcgcttagaatcggacttggtgttatccaccttgtcccactttcttttcttgttcgtggacttgtttgattggtttgagcaattcagaatcttttcctgattcatgagtttctcctcctcgatccagatttcaatcatggccgcccttcccacttactcggataccgaattaaaggtgcgaatcaaacaattgttccggatttccacccttaaccctcaaatgaaacggcgcacttgggattgctcatcctcgagttctcttcccacaaaccttctaagacaattgaactctttgtcatattcacgcaccgtccgattaccttatacaaagtccaagtaggcatcaagtctgtcccatgcttctggtggaaagaacttcttgttgaattcctcctcaaagtccgcaaaagttcggatttgatcacctttttgtttttccacggttagccaccaattatgcgcatctccttccaggaagtggatcgcaatgtcttttcggtaatcctccgacaaggagtggagataaagttcctgttgagtcgactcctccattcatcggcgacaatcagatcagaactgaccgtgaaatgccttgtatccaactttgagacatgctcgagtaagttcaaatagtctcccctcttcctcgaagagtgagatggtggaatgacttccacaactcccgaatcatcatccctcggattctcaatcgcttgtgccacaggatccggcacaagggatttagtcaatgtggccaattgtgccataatcgctttcatcatgtcttactgctcttgggccgatggtgttgcatccggattctccttcccatctgatgcatcgctattctccagatcttgaagaaccggggagtcttccccagccacagttccggccagattagttccgtcctttgttgtctcgacccttgtttcctcaatgacttgcgtctcattggaaaccaatttctcttctacaacacccttgtctttcttactcctcccagagttttccctcttacccatatgcgaaaactcaaaagttagcaacataaacttaaaagtaatcgttacggtataagaaaacatctaccgcgagtcttatcccaccccatactaaagatcctagaaccgtaatcgctctgataccaacttgtagggtacctttcccagattccaatccggcgaggtttcccacgaacggatcacttagtgatccgatgctaaatccaattttagggtccattccttaacacatgtcgtttctatcatattctgagattcattactagagtcatatgcacaaaagagtagaataaacaagaatcgatacaacttatgagttttgcctataagctattacaagtcatataatcgatcctagctacccgaattccatcaccacttatcttcccggcctggagtctcgcgcctaagccaattcctttccacgatctccttctttccctaaaaagccaacaaggcacacaacattggttcacttagcgcatacaatcaaaccatgcattcttgctaagtttcggtgatgactcattcggaaaacagattgggagaaaggaagtaagcgcatcagttcggctagaatcgtcggatctatcacgatcctccgattccttgccgagctgcattccctatagcccatccgtttaaacggccgaatcatgccgagtatgaacatgcttatgcccgataatgcaaaacagattataacccgcccaaacaagtctatatcgacctattaaccgatcgccctatcagaattaatattccaatggttgaccatggaatcctcacctttccctcgctaatctctcagaccaacgagttgcctctaaaaacaggcgatctcttttaagtagttttctcttcaagacgccctagagagttttggtgagttccccgtgtttttctgtgcccaaatcgcatccaagacccttctatttataaggattcggcggtaacc

SEQ ID NO: 22217 - DNA, 531 bp, Arabidopsis thaliana columbia
taaatagagccgctttacggtaactagcaaaacattggacattcttaagtatgtatgtctgagttttgagttttgtactagagagtctaacaaagctaagacaaaatttaataacgtaattgtgtgagctttaatgcaattttattcggttgttgtaaattgtgtcatgtgttttcgtggtaataccgggtacttcatatctagataactattcatgtataagctaacaagtagggtatcaatgtccaaatgattgcttgccattgtaacaaagaactctgtcttctttatttgctttgctcaaaatggctctgtttcatccattgcttatgacgagaaacggcatatttaaccatgactggttcatatggtattgaaatatttttccattgatgcagttggaagggaaattgttgacacctgccttgaaaggctgaggaaattggcagacaattgcacagggttacaaggatttttggtatcaatgctgttgggggtggacaggttctggtttgggttctttactgttgg

SEQ ID NO: 22218 - DNA, 759 bp, Arabidopsis thaliana
aaatgcggaagagttgagacggggagaaaagcatttgatcgaatgaaaaacaagaatgttaggtcgtggaccgccatgattgctggatatggaatgcacggccacgcggctaaagcgttagagttattccctgctatgatcgattcaggggttcgaccaaattacattacttttgtatcagtgttagctgcttgcagtcatgcgggtcttcatgtggaaggctggcgctggtttaacgcaatgaaggggagatttggtgtggaaccagggttagaacactacggttgtatggttgatcttctaggtagagctgggtttcttcagaaagcttatgatttgattcagagaatgaagatgaagccggactctatcatctggagctcacttcttgcagcttgtagaattcacaagaacgtggagctagctgagatatccgtggcgcgtttgtttgaattggactcttcgaattgcggttactacatgctgctttcgcatatctacgctgatgcgggtcgttggaaagatgttgagagggtgagaatgatcatgaagaatcgcggattggtgaaaccgccaggttttagtctactcgagttgaatggtgaggttcatgtgttcttgatcggagacgaagagcatcctcagcgtgagaagatttacgagtttttagcagaactgaacaggaagctgttagaggcaggttacgtatcgaacacgtcatctgtatgtcatgatgttgatgaggaagagaaagagatg

SEQ ID NO: 22219 - DNA, 576 bp, Arabidopsis thaliana columbia
ctcactatttcctctgctttacttcctttaacaccttcttctagtgttgctgctgcttctgctagttttccttccgccaagtaattatccacctttttaattacagattcgatgcctccattagcttgatccacttctttaaactgtttaagttattaaaacaaagaagcccaagaatgacagttagacttcagagtttttgagcgccgaattttggttttgtaattagcacacctttagcgaagatgctacatgtgctagggaatgtgctaagatgcctccgccaccaggtggaatgagactgaaatgtctaagtgttcctttcaaggtatcaaactggcaacataacgagaggagagtaagagaaaagttggaacaatttttatatccaaaaacattgattgtgagtgggatcaccttctgattcaattgcagcactgtgtcggttccattggatcgtgcttcttctggaagagatgataataccaggcctaggattgaatctttatgagtcccttcaagataagtctgaagcgtatcgatttctttttggactggcagtcctttcgagagtgt

SEQ ID NO: 22220 - DNA, 634 bp, Arabidopsis thaliana columbia
  unsure (1)..(634): unsure at all n locations
ctatcagttctaatagcttttatgactgcattatattgagttctaacatgactaataaaatcaggaaacttcgatgaaactgcacttttattccttaagagataaatccatgttacacgagtacagtcatctacaatagtaagaaagtatctatatccttcaacagactctactgaaaaaggaccccacacatccatatgtatcaaatcaaatggcctaacagactgattattatttgactcaaaagacaatcttttttgtttagctaaaggacagatatcacaatgagactctaacacatgactcttagacaaagaaagtgtacacgaaagaacttttaacttgttagaagatgggtgtcctaggcgttgatgccaaatctttccatcgaccgccaaggatccagagaaatgagatgaatgtgatgaagatactgcagatgatgcatcaagttgtaaaatgtaaagattgtacagaagaatcctctaccaatcatcaagccctgaatagactcctgaataaagcaaaaatccagataaaaatgagctgacaaatgattatgctttaacagactactaactgatatgagattgaccttanaagaaggacatgcaaaacacatgcaatattaatg

SEQ ID NO: 22221 - DNA, 408 bp, Arabidopsis thaliana columbia
ctcgatgttggtcttaataatgctcaccgtccaaggctaacggactcacctaatgtcaaaacgtcgaaacaaccgaaataacggtagcgaaaggactaaacattgaaacgaaaaccggtccacgtatcttcatggcccatccattaaagctaacacatgctccactcactagcccagcctgaccatttcctaaactatatacattatgacaactcaaccatgaaccaattgatcatgttttatatctacgaatgatctacttgaacttaccacgacagacataaccaacgaggtcaccgaaactaatcaatgaactggcaagtacattagtctctcggttttgtaatagtagtaccaccgatgttatcaacactcctagtaatgccgttattgcacttaacgatatcg

SEQ ID NO: 22222 - DNA, 621 bp, Arabidopsis thaliana
atacacgacgttcgttgttgacactagacgtcctaatacaaagctcaaaacaaaacagttcccttaagcgtagaacttctttgtacattattatttcatattacaagtcgtaccaaaccgaactttagattcaaacgctattccaccacgcgctcatcaagcctcaagccctaggccttccgtagctcattggactgctatgggtcagtgtggtctcaatcgtgctaaactttactcgtttagcttcttcgggagagatctggtacccattggttataacctcaagcggcaaacctctcatgactgaggtacggcccgcgagtgtgttgacctgtgcgttttcgtttgtcttgaattcgatccactcgaactgttcgcctatggcatgtttcatgaccgaaaagccttgtggcacgactagtaactgtccgctggagatctcttggtcgaacactctttctccgttgtcgttcaccatttgtatatgagcctttccgtttgtcacgtagagtgccgcgtttgcgtttacgttccattgcggtagcaccatagcgttctgcgtgcaagatatattttttaaattgaaaacgattaaaaatgcaagatatatatatatatata

SEQ ID NO: 22223 - DNA, 612 bp, Arabidopsis thaliana columbia
  unsure (1)..(612): unsure at all n locations
atccacagtttagttcgggctccagctctagctccaagccaagagtaagtaacatctatatttttggaaattttcatcatcttagaaaattccttagaacgtattatcaaattctcacgtttgtctctgttttccaacagtcaagcctgagaccagctatgaatcctccagtaccaattgccgaaagaccagataaaccttcaggtaagcccaactcaataaccttcatcttgcctaagtttccgtgtatcttttcgtgtgtgcttctgcttctttgcttcatcaaacagtttccctatacttgcaaagctaggcgctaatcaagtgctttatggccacctaggagccgattagtttctgtcttttctttttcttcattttgctataagaaaggttcatcaattttatatgaatgtcttaagtggatgtcaaggcctattcgtctgttgattttctgttaattgactcggtaaaccatcatgttccctgctcatagtttggtgtttgaacaaaaccgggcatagtaaccaaatttgtgtatgtnacagctggagctgggcaagacagtcgagatagattccaggtgctttagaggcatatgctagaagaaat

SEQ ID NO: 22224 - DNA, 575 bp, Arabidopsis thaliana columbia
tggaagcaaattcaaagatcggatattttttttttgttggtgatgatgcagaaatggtggaggcgatgaagaaagttgctcagcttgatgtggagctaactgtggaagagaggaatcttgtatctgtagggtacaagaatgtgattggtgcaaggagagcatcatggagaatactatcttccattgagcagaaggaagagtccaagggaaatgatgaaaatgtcaagaggcttaagaattatcgtaagagagttgaagatgagcttgctaaagtttgtaatgacatcttgtctgtcattgataagcatctcattccatcgtctaacgctgtggagtcaactgtctttttctacaaaatgtgagtgtcatctttattatactctgaccattcatgtgatatttgtgtgactaagaatgagatcatttccgtttgactaaagttaaatgtttaagttattacatagctaccactcttgcttgtgttcttcctgaaatgatgatgattcatgaacttttccttgtttcactgttttgactttacgtgtttttttttctttctatgtaggaaaggagat

SEQ ID NO: 22225 - DNA, 466 bp, Arabidopsis thaliana columbia
cgaagaaggtctttttttatttatttataaagtgtcactcaagatggaaaaatctcatttttaatattatttaatttgaactctttatatatcttatatgtttcttaccctcttgattaaaactctttcttacatctaaaaaaatcacgtaacttaatatgaacatgaagaatctctaccttgcaattttatatctcttggcggcttcaacacttccatttgccattgcttcggacccaagcccccttcaagacttttgtatcggtgtcaacaccccagctaatgctcgtatgtaaatgttgattttgtaatcctacttaggctcatcgtttactgatcatatatatatatatatatatcacttaatatttatttgatgatttatttggacactatacaatttatattctacagtgtttgtgaacggaaaattctgcaaggacccgaagcttgtcacagcagatga

SEQ ID NO: 22226 - DNA, 526 bp, Arabidopsis thaliana columbia
caaaacaacactccataactttccaaatgtttactcaaaattcttgatactcactattgatttcagtataaatcctcctccgcatccggcgataagcaagcacgaaagcgacaaacacggcaagatttatgttcgtattataaacaacaaccacaacgctccatggttgaaacaattcttcctgaagaaaaggttaatgtcaagtcaattcaagatttcatcaagaaaatcaattctagtacctttcttgacccgataatcttgtcgagtttgaggagatcgaggaggcgcgggaactctctctaggttatcgaaagctcctgcgaatctgtaatcatcccatcggaaataacaactaggacgggcaactgttcctccaactctgtcccagttatgttcttgattatacctaacattttctctcagacaatgattacagtcactggaagataaatcaggtgtgcattgcatcaacatattaacctcaggagtgtctgtgactctgcacttgagactccataatact

SEQ ID NO: 22227 - DNA, 545 bp, Arabidopsis thaliana columbia
cctcggtttgaaaaaaaaaaaaaaaaaaaaaaagacgagagcaacaaacaaaataaagtttccttttatcccacattcaaagctttatttagatgaaaggaagtcataagaaaaatgaaatattaattaagaacacaaagatcaaagattcttagattgatttcatataagagaaaaggagagttgctaggaatctaaacttaaatgaatctaaacttgctattaaatcctaagatacatgggtttgtaggctttgagagtatatttagtaacttcaggcttatcatgcgacaatatctgcgcttcttagatatgctctaacaaaagataccatgatacttttatcccgaaacaaaaagaaaaaaacgaacaacaattcaaatgacacaaagtaatccatttacattgcaacaaatatatgatatctttttaagaataaagtaaacaactaaacaaacattttctctagcacttgcaccacttccttcatagacggtcgcttttgaggcaaggaggagacacattcatagcctaacttcaagcat

SEQ ID NO: 22228 - DNA, 586 bp, Arabidopsis thaliana columbia
  unsure (1)..(586): unsure at all n locations
nnnnnnnnnnnnnnnnnnnnnnctaaagttcctggtctagcaatactttgaaatccgcagcaagagaatcaacaagctccgagagaccaagcagccggacccctatccccacaagttccaagtcaccgatgacctccgcaaatacttgaaggagtatgagagcctcgcgaagggcgaacagaagccggatacgaccgttcggattgctggcagaatctacacaaagcgttcatctggtgcgaacgtgattttttacgatatccgagctgagggtgtcaaggtgcaggtggtatgccaggctcagaacgcttcgggcgctgtttcgtttgaggaccagcacgagcacctccggagaggcgatatcgtcggtattgtcggtttcccggccgcagcaaccccaagaaccgaccggacggagagctgtccatttttgcgaccgaggtggttctgcttgctccctgccttcacgccattccttccgagcactacggcttccaagacaaggagcagcgctaccgccagcgttaccttgacttgatcatgaatgacaagtctcgcaacgttttcattacccgttccaagatgg

SEQ ID NO: 22229 - DNA, 643 bp, Arabidopsis thaliana columbia
taagccaatccttgccgccaaaacacatcttttccggcaaccgcaaccaaaaccttttcacatcccatctcggaaacatccgatccggatccaacaacattaaaccacggatcattcactccatcaacactattcgggctaacgatattttcccaaatatatgcgatcttgtttctgacttctccgtcttgtacatcgtgttcgtcgatcggttctttcccccaaaaacctggatgcaccataacaatccctttgattgtagggctaagcttctccttaccagctcttattcccatgtgatgcgatatattggctccggcactatctccggcgataaaaactctgtcgaaatcagcgtattcattaatccaatcatcagaatgagaaaagatccactgaatcgcagaccatgaatcgtcgtaagccgccggaaccggatgctctggcgcaagacggtactgaaccgacacggctaggcagttagcggttataacaactccgtgaggtagttatggtaaacaggagagaaaggagattgtatgatgtaagctcagccgtgaaagtagatgagtagaggtattttgttactggcggtgtcgagtttcttagattgttggggagaacatcggacggagaggttgtg

SEQ ID NO: 22230 - DNA, 549 bp, Arabidopsis thaliana columbia
aattatactttgaactaaacaagttctgtttaaaccttgtcgtgtggtgatgtaggagagacttaacgtttgtggaggctggttgcaccggagctggagcggacacgtcacagagagtgccgtggcttaagaagctgagtctaagtgaagttgatggattcgccagcgtttccttcattgaccaagatggttggatctctaggttccccattgagggtgggccttaacaattctatttgacaaagtttgatattgggctagaagccccattaagtaaaccttttattatattggagaagtaagaaaacccattaagtagacctctttattacattgggctataaggcccattaatctcattagtttgagcaaatactgtaaatataggccccttttgttcttctcaaagtacaccataagtaaaaaaaaaaaaaacatgcgtatatgaatcgaaaaaccttaattttctgatttacaaaaattccgaccaaatctctgttccctctctttatccctttgttgcgtactgattcctaagccgtgacggtg

SEQ ID NO: 22231 - DNA, 509 bp, Arabidopsis thaliana columbia
agatgttttttcaccataaactcttggtcactaaaaaagaactgaaaatcaatttcggagaagatggctaacatttctactggatcgattcgagaacagaggaattaaaaccatagccataagaaacacgatatccgtttaaaacagaaagatcgggtcattcattacaacagaacctcaaacagagtttaaagtcttaaagacactggaaactgtaatgaaatatctaaaatgtttgcccaacagagtaagataatgatcgttgtttgcagatcacatggccattggttcaggaccagcagcgttcagaatgtctaagagtgagttttggggctccaattcttcgtgccaaagctgcaacttatctccagggtaaaagtttctcgtcactccctctgagttgatctgttcaaaaacatcaaaaacagtttgccaattaagtaccattaaggaggttacataagtttcgcttcacgagcttctggtcagagaaagatcttactatgaca

SEQ ID NO: 22232 - DNA, 568 bp, Arabidopsis thaliana columbia
taagacaaattcaaattattttcctacgaaatgtaattcatagatatttaaagaaatttcgtaagaagaattttatatcactttgcggagttaaaagatgaatacaatttgataaatgtttatttaaagcacaacagctatagattcatgataagttgaaaaaggctctcccagtagttttaggatttcaacatataagctcacacacccttacacgatataaccataatcatatgagagataaaacaagcctaaagaaaaagaagaaaagaaagcgcaaaatttggcatgagtgtgatcgaatctaacaaccatcacagcttcaaagagacaagttatccttgcgggtcttttcaagatctattgctcccatatttgcgagcgacattagcatccaacagtgtatcccaaacctgcaagcataaacacaagattgatttaaagtacctaataaaatgatatgttttaactacatgattattatctaatttccctcacatgtagctctccctttgagccccaatagcaagcaagaaagggttgtcaccgcaaaggaaatggaaacaca

SEQ ID NO: 22233 - DNA, 583 bp, Arabidopsis thaliana columbia
cctcgaagatttgtgtggaggggtaaaattggagccgtctctagggaagaacatctttgttctagcgttcttaccaaagtcagaagcacgcacttctcgcctcggcactggtgtaatttttcctacagtatacctgtgaacctcaaaagattgttgtgttagaggaagaactaatttataaaccaatcttagtgacgtttgcagtagatatacaaggccatcatataaatatgcaagcaggttgtctcttggcctgtatacggatctgagtctaaaatcaagccatattgcagaaataatactcataatgtgtcataggctataacagagcagtctcaagaatcatgaaaattgagaaacatatttaaaagaagtggttttacgtaaagctctccagcttgctatgtttgacgaagaagaatattttaacatattaaaaagaagtggcttaggttgttgatttagtttacctgataccaagttggagatttagcattaagtaataattgtgtcccccctaagaaaggtcattaaagacctagcctgacttctcttggacgatttggaggtttaattttgtgtg

SEQ ID NO: 22234 - DNA, 410 bp, Arabidopsis thaliana columbia
ggtgcatacacttgcaatgtgtgtagtggctatgtcgttcacgtaagatgtgcattacgtaaggatatatgggatggtaaagaactcgcggaagtaccaggagaattagaagacgttgagtccttcaggattttagcttatggagaaatattccatttttatcatcaccatcatctgaaatttgacataagtggagtttacgttggaaacaaattttgtcaagcgtgtgtccttccaatcaacgaaggaaatatttatgtttgtgtggaatgtgatttcatcctacacgaaacatgtgcatatgctccacgtaaaaaggtccatccattacatccccatccccttacacaaaagggtgatcatgtaaacgctttcttcaaatgcagtgcttgtatgcgtaagagtaatgg

SEQ ID NO: 22235 - DNA, 581 bp, Arabidopsis thaliana
ggagattgtacttcttcaaatatttctttgtcagatacttcaagtacctgaattcaaaaccagatttttgcaatttaagagcaagttagggtttctaaagacgtgtgagagaagaaaagaagtttaccgtttggagaaattggaattggcgttgacattgatctttccattatatcgggtgatggagacggagttaccaagagcaccggctttacctctgaccttgattcgttcctgaagaaacttctcaagcgtggctatctccaagatcgtatcatcaactggtttagagcagtcgatcacaaaagaaactcctttcttcttagcaccagctccactcgacttggcccctactcgagccatcttcctacagagattgaattgaatgaaactctcttgcttagattagacgttggctcgaaaagatgaaaatcttcccgcggcgaggttagggatggactatataaatgacccacaagagtccctagggttttgtttagtgttacccaatgggttcttaggccaatacttgggctaagagcttgtctaatttctgtttgatccggatgatacaaatattg

SEQ ID NO: 22236 - DNA, 590 bp, Arabidopsis thaliana columbia
ccgcgggtttctctttgctctctgagtgacggaactgtactcaagattctctacgagcagacatctcctatacagatactgaaaagccttaaactagagcctccagagtttgttcaaatacaagcaaatgacggaaagacaacactgtatggcgcggtttacaaacccgacagttcgaaatttggtcctcctccatataaaacaatgattaacgtttatggaggtcccagcgttcagttggtctatgattcttggattaatacagtcgacatgaggacacagtatctgagaagcagaggcatcttagtttggaaggttctacaaattctttttcttctctcttttttactcaggaaaatgttgaataaggtttactcaaagatgatgctttagaattgaaatgttatcactgatttgtgcagcttgataacagaggaactgcacggcgtgggctgaaatttgaatcttggatgaagcataactgtggatatgttgatgcagaagatcaagtaactggggccaaatggctaatcgagcaaggtctggctaaaccagaccacattggagtgtatggttggagttacggtggg

SEQ ID NO: 22237 - DNA, 865 bp, Arabidopsis thaliana columbia
tatgaaattgactcaagcatttacaatccatcttgcagatcatgtttcaatatatggcccgacattctcccctgaaagtagaagatcttgcttctacgatttcacctgaggaccaacaggacaagccccctgaagtggagatgtccgattgacgagaagagagtctaaagtatattgtttggtcactgtgttgtgttcgtggaaacagagggaagtaaattttgaaaaacgtagccacgtttttttggcttctcatatgatgtaagatagtttgttctatgaaaatgagaaaaaataaatcgttacttaaattgtctatagagtaaatccctgcaaattgaagaaatcaacaaatcttgaccaatagaattgcgtaaaaccctgttaaaaaacagttccaagaagctaattgttttgaaggaaaacaatgtaatacaaaaaaatcatccagctgatgtggtgggctcgcagctatcgtgagtgcaagccaaaacatctctgtaatctctagagatgttgaaggagtcatacacttggccagtgctgctcttcttgtactcaaagagcagtgatgagtgatcggaagcagtcaacttcacaaacccaaagtcgtagtctctgaccaaactccatttgggtacaagtgagctaaagggagacaagtgacttcctgcaccaccaacaacaacatggatggttcctttaaaggtccctgagtagtgatccttatcattgttcacacattggctctgcaatagaagaaaaaaagggtaagaaaagagctacatccatgagacgaaaaccgagcaatttaggatgggataaacctcgtaaatggggcaggtcgctcatagttatggacatg

SEQ ID NO: 22238 - DNA, 835 bp, Arabidopsis thaliana
gagcctggcttgttagaccttcttctccatattgatcatagatggctctcttttgaggatcactcaaaaccttacaaaatccaacagcataaggaatctatcaaacacaattctacaagcaaatcaagattacttaattgccagagaagtaaccatagtgaattgacaaactacacaattgctcaaattcaagcaaaagatgggaatctctctgaaaagagaaaacgcattttgttaatttacatcgtaagcttcggagatctgcttgaatttggcttcggcgtcttttttgttgttagggttcttgtctggatgccacttcatggcgagtttgcgataagctttcttcaagtcgtcgtctttcgcattccgatccacctgaagaaccttgtaataatcgacccccattgctatacctcctccttcttcttcttcctctttgattcgctcttcgaatttcactcgatcttcttcaatgggaaaaactctagcggatcattccgtaccggttcgaaatatttatcgagatacaagaaatacccgaccggttcttttatttggtctttaccggttctgtttttggttcggcaaacctagctcaaaagtcaaaccttatcagaattaagaatcacggtgtcgtttcaaagagaggaaatttacacttagtagccctatatatttattatttaacatttgacccgcactagtatatgtttgttactttactttaagcgagggtgatagcagattatgaaatatctgagggcctaaatggaaataagtaagaagttttggggtgtcttaaaatgaaaatctgaagacaatacattggtaa

SEQ ID NO: 22239 - DNA, 637 bp, Arabidopsis thaliana
taagcataacggacatgagataggcagcaagtagaagacagacaccgtagatgaaagtaaagctggctccatcagtgggacggatctgcttgtgaccaccaacaggtctgatgaagaacatgaggcaaacaacgacaactgcaggcgtaacagctaccatgagaatgagagaagccgggttagatgagtggatcattgtatatatctgagagatgatcgcaccacctagcccagcaaaacccttgagaatacccaccactggacctctgctcttgggaaagttttgaacaccagagactaatgctccagtattgaagtaggtctcgccattgttcccaacgaatatgagaacacacatctgaaaacaaaaagcatacaaaaacaacttgtatcagcatacaaaaaattaaacaagctaatccactacattatcataagaaatgccagaaacagaacgatttcaactaaagcagaacaagagattaagaagaaaaaagtggaatccagtaacagttttgatagcgacgtgattattagtaaacaaacaaccttaaaagcaaactttctcagagattatctaaaagcagatttgaatagaaagtctccaaatttttctcagtacccaaaaacatatgaa

SEQ ID NO: 22240 - DNA, 521 bp, Arabidopsis thaliana
tggtcatcttagaacacttcttcttacttgtggaagcctgatcatttccaacaacatcatctgaatcttttcgttttgatgatggagtagaggttgatgacaaatgaaacaacccgacccatttttttttataaatataattaaatattcccataaatatctaattaaaccaaccaataaaataacaattaaaccgcaagtcaaaaatactattttatgaataaataaataattcgaccaacaaaaccaagaataactaacaatcctaaccgggttccaataaccaaaaacaccaaaataaaacaaacgagttcctagatcatcctctcttccttgccatgatttcacgatcacactttatcatccttgtgaagacacttcctcagcatcgacacatgaaagaccttgtgaaacgcacgcataacatcaggcaactctaacctgtatgccactggtcccaccctctcaacaatcctgaacggacccatgtacctcagactcaacttagtctctgagataga

SEQ ID NO: 22241 - DNA, 593 bp, Arabidopsis thaliana
ctatacggttaagggtcaacctttcatgcaccaggtgctgcatctttcagcgtaccatggaagtacccaccagcataatctttgacatgagccgccgtgtcatgaattcgactccgagcataatcaacctgatccgaccttaatggatgcatgcctttaaaatatcgatacaaccacgacacaacagcccctgtagccaagatgagtccagcgagggacaagaatccggttacgataaggaacaaagggatccaaatagggcttgagataatgatgagtgggagaaaagcaatgaatccaaggacgaaagcggtgacagtgattccggtgagtaaaaggagtattccaccggagatgaagaatgcgaggaagccgaagagttgaccggagtgattaggagactgcgattgtagtagctgacggagaagagatgagagggggtggttggtggtggtgttgctgcgagggacggtggttgagttatagatgggtctctgttgggtgtggctgctagggtttgttcgatcagccattttcggcgaggagagagagagatgtgtgtgaggtgtgagaggagaaagagtgaacaaatg

SEQ ID NO: 22242 - DNA, 466 bp, Arabidopsis thaliana
aatacaaaaagtttgaatcttacaccttaccgataatcatcgatagcctgaagaagctgtgacggtgttgctgccgggtcaagctgtctgcaacctctgggtgcaccgggtgcttcttgacctgtcagcaagtaagacggtatcttgtgagagaatctcgaaatttcatccctaaggaaccttttggtttctttggaatccaaatgatggtgaaacacggctttgaaaccagcaactttaaccagaggaaccactaccacaccatattcctctgtgtatccttcaactacttcaactatatcgtactcaactgtttcgactcctgtaagatagttccagtcaggggaccatttccgatacagagcccagacatcgcctgttctaggatatataaggaattccccatgattgcctttgaccaggtttactttgtgtgagaaactgtaaggtgtcctgtagattagtg

SEQ ID NO: 22243 - DNA, 1873 bp, Arabidopsis thaliana
atctcaattacaaatctctagtgttgatttcagaacccacatttggcgctgtctgtggggacggaaatagatcctttcaacaccgaaactaacacatcaattgtgaccaacgatcatggatcccaattcatccgattcaacgagatctggtgtaccagttcagatcccaaacgataacgtcgtggacgggcacctcccaacggatctccctctcggaatccaggttgatgttatccatgacattaatgcggagaacatctcccaaaacttgaattctgtaggatctgaccaagtcctccccccccctcacgatatatcctcctaacgcagataacccggctaaatcgtctaatcaggtccctccaatatctgccaacgagctggccgagcttcgctcaatgatcctgaacctgatcaacataggcaaaaatcaagaaattgcgcatcgcaacctcgccgcaatggtgggtcagaagagatgcgactctactcgcatggcgcaggaagtagagcgtgatactgcgggcaaggaaattcctccccgctaaaactgggattcctgcccagatccccatagatctgacaggtactgtctcctagacagatcctactccaaggactcgtctagacttcgcctcgatagaggtctcacctcctctcaaccagcaggtcgccttttttcaggcacccgtgcacaccctcgtcaaaaacccaacaatagggaatgagacacgtataacgcctacctttccaaggctaccgctcccacctgtgctaccgctaggtactcacctccgaggtacacatggacgagaaacaaacaaccgcgtccagctcccacgttcccgggaactcagcacaacaacggacctctaccgctaatccaccatccattccccggatacctggaagcgacctcctaaacggtcccgacatagatcgagtgattacgcagcacaaacaaacgcgaacatggctcaaatacattcacgaatgcatctagcagtgagcagtgagcgatgctcccgacatagatcaatcaattcgatcaaaactcatctagagcaaggcagattcctacacaaaaggtaaaagcccgatgatgggacctgatcacaagatcacattcttggaaagcaaaaccactgacctcgataaatctctcgatgacgctctcgttatccgaatcgacgtaggcaactacgaactctcccgtctaatggtcgacatgggaagcacagttgacgtactcttctacgacgccttcaaaaaaatggggcacctcgattccgagttgcaaggcagaaaaacgccacttaccgggtttgctagagatacgacttttttcctaggaaccatccagctcccaaccgtcgcacgtggagtgagacaactcacgaacttcctcttggtcgataagaaagctcctttcaacgcaatactgggaagacaatggctacatgccatgaaagccgtcccatcaacctaccaccaatgcattaaattcccctccgagaacaggatagcagtcgtatacggcagctaacgcagctcccgaaaatgctatatgggtagctacgagcatatcaaaaaagctgaccccgtggtactaatgatagaggacaaactcgcagaaatcaaaacagtcagatcctccgacccgtctcaacgtggagctcgaaaatcgctgataacgcaggtctgcatagacgaatcagattctaaatgatgcattgaggtaggtcacgacctcgacccagcaatacgagaggatctcataacctttctcaaggaaaacaaagacagctttgcctggtcaagcgcaaacctccaaggaataagcctcgagctaacctcacacgaactcaacgtc

SEQ ID NO: 22244 - DNA, 504 bp, Arabidopsis thaliana columbia
gaggttaccgtaatgttgatgagcatcataacgaacctgatcatatcgatttttcctccgataaactggatgacccgacctgtcatctgttgacgtagatgacctcggtaagctccaatctctggttgactgttcatcatgaagcttatgagatgtggatctacttattgcacccatcatatccgacataggcctcatcattgctttgttttgctttgcgaccaactcttctaaccataaaattagtgactctatcggctccgcaatctccacttcctttcccttatcctttgactccccgacatgcgatcgtgtaaccaccatgattccgaaaaacgacgcagctttgatacctttaatacataaaacttccgattcaccgtaaaacaactccgattaataaccaaaacttcctattacaatcgaaacgatcaaacgctagctctgaagatgagagaacctagctcgataatctacaaatgatttgatatagaaaatgaagat

SEQ ID NO: 22245 - DNA, 3159 bp, Arabidopsis thaliana
cttgttgattcgtaatgcctataaggttagctctcgtcaatggtgattgagtctgggactaggttaagttgagggtctctattgcggtggcacttagatttggttaatgaacttgttgtctagggataatttattgagcatgtcaatcacctgtaaattgaggaaacgaaactactcaattaccccatcctcgggaattctttatctgattgattttattgtttactctactgttgtttactgcatcttttcatctgttgcttagtttctgcaattctttactgttactcgacctgttacttgaccccccagttgtccggcaacagactgtgcaatcgagtatccctgttacattttctgtctgttactcgaactgtcactcgaccacacccagtgctctgcaacgagctgtgttggtcaagtgttttattgtttctgtttcattttctgttttctgcatattcacttaggactgctagaacacaccaaaacctgttattgcttggcttgacttagtgacttctgatcacatcttgattgttagcatcacacccatttggattgacaaccttcagtactacaacgatatgattggtgttttaggataattgactaaaaaaactattatcaatgccctttgtgctgactaatgcaccagccaccttccaatcagtgatgaatgagctgtttagaccatatatgcgccggtttgttttagtgttctttgacgacattctggtatacaatcttgatgtagagacacatctcaaacacttagaggtttttcttcagattcggttacagaacaggttctacgccaatgagaagaaatgccactttggttgcacaaggatatcatatttgggccatatgatcactagcgaaggagattctacagatcccacaaagatagaagctatggtaaagtgccacagcccaagaatataacagacgtgcgcgggtttttaggccttactggttactacagaaggtttgtggcaggttatgggaagatagcaaagccactgacagaattactcaagaaagggaaatttgaatggtctgttgaaggtacaagtacttttgaggctttaaaagaggcggttatctgtcttccaacgttagcattaccagattttgagaagccatttgtgatagagactgatgctttaggcacgggtataggagcagttctatctcaggataagcgtcccattgcgttcattagccaaggattctccagtaaaggcagagttaaatcaatatatgagaggaaacttttggcgattgtttttgtagtggataagtggaagcactacctcacgggagaaaagtcattatcaggactgattagagaagcctgaaacacttactcaaccagaaggcagtgtcagccatacaacaaaggtgggcttcgaaattagttagcctggactatgagattgagtataagcatgactcagaaaatagagtagcagacgcgctatctagacgtccagtaaccgagcaaataatgaacatgctgtttctagcttcggcgacagtgaacaaggaagaactgtaggcacaggtacaaaatgatcccagcctcaaactcatacaggaacaactgcttagaggagaggaaggggagaaaggatacagtctggtagctaacaccttatataaggatggcagaattgttatgccagaaagctctccttttatcccaaaattgctggaacagtttcatactagtcccattggaggacatgaaggagcgtttaagacatttaaaaggttatctagtgaagtttactggaaaggcatgcgcaaggacgtggtggagttcctcaagggttgtcaagtttgtcaacaaaacaagtattctacattgtctccagccggcctcttgcaaccattacccattccgactaaggtatggtccaatatcagccttgatttcattgaagggcttccagtttcaagtggatatgatgcggtactcgtcgtggtagatcggctcagcaagtatggtcattttattccccttaagcatccttacacagctaaatcagtagtagaagtgtttattaaagagattgttagacttcatggatttctagagagtatggtttcagatcgggacaagatttttgtcagtcacttttggtctgctcttttcaagtcccaaggaacacatctggctaagagcacagcataccacccacagtcggatggccaaaccgaggtcctaaacagatgcttagagacttaccttcgctgttttgttaatggaaagccaaaatcttgggctcaattgttttcctgggcagaatactggtctaacacttcgtttcattctgccatcaagatgactccatttcaggccttgtacggaagagaaccaccgaaactgttacgatttggtgacatcccaaaagctaacgcggtggtagaggagatgctacaagaaagggacagagtggtcacgatgctgagagaaaatctgcaggcagctcaagcccgaatgcaaaaatcagctaacaagcatagaagggagctggaattcatagttggcgattgggtttatctaaagttaagaccttacaggcaggtaaccgtggcacagcgtcgcaatgagaagctatctcccagattttttggtccttatcagattcttcaaaaaataggtgcagtagcctacaaacttcagttaccaagcagcatctccatacacccggtcttccatatatcacagctgaagcatgcgcaaccaagttcagcccaagctcaacctctcccagcgattatgacttctaacttggagtgggaacctgaacctgaagatgtactagagataagggaaagcagcacgggcgcagatactgagttattgattaaatggagaggtctgccagagtgtgagaatacatgggagccaatgaaagtcatcaggcagcagttcccagcatttcaccttgaggacaaggtggcttcgttacgggggagtaatgataaggtggagactatggaaggagaagcaaggaaaggagatagagcaacaaggaagaggattcaaagaagatctttgacccaagtggctaaagagagtttaagaaagtgcaaggaaacactctgtcgcatccagaggctttaaagtgtcgagggaataagtat

SEQ ID NO: 22246 - DNA, 1815 bp, Arabidopsis thaliana
caatcatgtcaccccatttattgtaatcgtattcttcgctactaccttcactaaagtctactgtagggtcgagtgtacttccacggctttcaccatcggtgtcatcgtcatgtacatccatatcttcgtcctcttcgttatcctcgtcctcatgttcatcctcatcaccttcatctatgtcatcctcctcatctacatttatatcttcgtaaccattatgagctgcatcaacatttgtaacccctgtctctgtattgcctccattgccgatagggtaaaaagacacaaacaagttaacagaaggatcgccattacgaatcaacataaatgtatccaggctgatttgattctcaatatatactggagggcgattacttgctatcatatcagacatctttccaggcatccagtaacttattatagggttccattcactaaacttatagctgaaaacatcacatattgtacttgccaaatccgtgtacgtcgttgtgtctataatacgtacacagcgtccgaaacttcctttttcagcttcaaatttccaaccttcttctttgtatatccactcaccaaccataattaatacaggtaactccatacctgcaacataaatttctcaggtcagaccaacattaaataaaaaaaaatcagatcttttttgaaggatttcatttatgtcaacgaagacaaaaagaatcttaacaaaacaatttatgtacttataaatttaactaaacaaaacatagagctttcatttatatctacaaatacaaatagaatctccaacaaaacaatgtatgaacccagaaatttttaaaaacgtatcattcaaatcacgttctcaagtgtaattaggattaacacgaatttcttacctagaacacagattgtctccccttcaatccttcaaactttgtaaaacagcaactgaaaacttcagattcttcaccgtaacacaatttcgattttcgtttcttcaccttaacagaatttcgatttacgttttttacccagaattctaatctaaattatcaaaatatcttacaatataatctctattataataggtaatcatgagttttactcttgtcaaaactatttagcattaaaaacttctgagcccaacgaattttaaattttttttattccaatctcaagtgtcaacttcgccgaaacccagaaatcatttaatgcatttctcgtcgatgaacagcgtacgtacgaacccggttcttttggattccaacgacgcggtccgtacgtacaaaccgggttcagtttcgtcaggtcgtcaggggcattttggtcagtttttggcttaatggctaatagctgaaaggcccagcccactttgtcaaaatctgaaattaaaagtgggtcaatggctactgtgtgcaatttacccttaaatcaaagaatttaatagaaagtacttgaattgaattaaagagctaattaaggatttataaggaatcgtttgggtagaatagaaaatacaacccagacaacaaatcatcgtaatctctacgaaaccaactaacctaaagtcaatgactaatcaccattgttgatcaatttcttttttctttgtttcttaaatctcacttccatccattccatcacaaaaaaatctctgattcaatctcttctctgcttccaccatcgttgtcatgtttccatcatcatttctatggcaaaatccaattaaaatcacaagatccataaatgattactaacaataaatagcagatccgaatctgagaatggagaaaggaaatttcgtcatggcctagcacacacataaaagaaaaa

SEQ ID NO: 22247 - DNA, 2562 bp, Arabidopsis thaliana columbia
ttagcgatggagaaagagggcaacgtctttcggtgcttcaaaacctggaaagacacgatcctgcccaccttcgacgaatggcgacctacaattcgcgagcgatttttactccatgctcatcattcatctcgggttagtctcgttttcgcctattccgatatcgcttatttatacgcatgctaatttacttttttggatataaaactcttgcttaggcgaacaacgagcttaacgacatgatcgagcactatgaaggattactgctcagtatagaacaggatattgatgcttggaaaggcaagttttcttccctcgaggccgatctccgctcctcctctgactttaaacagaaactagaggatcgagtcgaccatctatcttctaagctcatgagatcgaatggcgagttgcatgatcagtaccaaagatacgacaagctctaggatgaactctcgactgctcgagacaggctctctgaatctaaatcggccacttatgatttgaacaatcagttcaccgaacttaaggctaagtacaaagcaattgctaagctttgagatgctgaattagccaagtctacgtcaaaagccagaagagaggtgaaaggtcgcgggatggaattgattcaaggggctatcctcttcattcaaactgagaaggccagatcggagctggagtcagacattaaggagcacgaaagtaacctgcttctgttggaccaaacccttgaggaagatttctctgaggaacaagaaaggtccaaactggaggctgttttagctgagaaaagaggccaccttgcttctcttcccaccttgtcctttaaccctcaacacttcgaggatttttacatcgaatcactgcctttgagtgaatcaggcttagattgggctggtaaacttttacatctgaatccttataatctatagttgttgtatttgtgttttttgctgacttgaaacgttcgcttcaggctctagtgaactggtcgatactactgtccggtcgtgaacagtgagacagtgatcatcccggatgttgaacatgaagccggaactgagccgggaaactcttctaagctactctctgccagtgaaccaaccaaaactgagtcagctgttgttgaaccaaccgaagccgatccggctatcgttgaccccgagaagattacggattcctagtggttgtatctactttaattgggggctttcccaaacacttccaaaactagaaattaaatttggataaatatgttgctgcctaaggaggctttatttttgaacaagtatttgcctgaggaggcttttaaaccttttaaaactatgattttgcaatagtccgtctttatatatcttttggccatgtggctaagtttcgagatttttaggttgatcatacctttctcttaaaacgcgagaaccgagctcggttttgaacgcgaattccccaactcgggtttaatcaattcagcttatttactaggcttgggccttaactgttttctttatatttaatgggctttttgtctttaatgcgacggttgccatctcctttctcgagaaacaagaaaaagcttcacgcctttgaggtaataattgctttttcttgattcccaaaaatggtttaaaccattcggacacgccacagttattaaacttgtggttccaaggaaaaaccctaaccctctataaatagaggtcccatctgccaccaaattctccaagtatgatttcagaaatttacttgataaacaatacacaaatggagaacgaagcagcctccactgtttctcttcttcaccccggcagccctctgttcctctccggcgacggtcaccgtgatatcaagggagcttcacacccttaactctcatcccggggattggatcaaactcggaatctccgagtttgctcgcatcccggactgtatgatgcccattcttgacctcgccggccaaggagtccaagtgttttgcaagacgcaaagagtctcctagtttgaagtgtagacatgtcgagaattcatttttatttgtcgtttttaataaatgtaactttgcttcttgttttgtacgttcgcacagccaaacttctttcctcttgtttgttcgcacagtaaaacttcctttcaaatgaataaaacaaattttcattaatagctgaactcgtttccgagctgcctacgtaccctttttcgggatcaagccacaccgtagttcatgtacaaaaaatgcgtgtcacttttaaacataaaatttctttaagttgaccacattccaaggacgctggactggtctatcttctaaatccttcaatctataaacaccattccggaccacttcggtgacgatgtagggaccttcccaattaatgccgagttttcctgctccttcttccttcttgttatcaaacacacgttttaaaacatagtcgcctacaaagaatggactgcttttgattttcgaattgtaataccgagctgctgcttgttgattattctgaattcggattaaggcttgatctcgcctctcgttgatggtgtctagcgagtcgtctagcgtca

SEQ ID NO: 22248 - DNA, 2638 bp, Arabidopsis thaliana
tttcccaaactctttgagaaggaattttctcatttggtggctttggccatggaaatcgatagatgggaggttgaggcgctacagctggtggttccagttgtgaagggcggaggcagcggtggtggagaagttccggcgaggatgagcgccggaggaggaaggtggaggaacgctcttccttgtcttctttttctgctcagccatgttgcagattgattaaattgacacttggggtagatgtaggatgaaattctaatgagattagagcctaaaatcacaagaatcggtgaagaatccgagaatctagagagaaaagagtgatttcggcggtttgaaaaaaaactgaaatgaagaagataaagtttaggtgaaatcgacttaccttgaaaatgagggtgtcgatcgacaatccgatggtgttgatcgaccccatcgcgtttggtgtaacgattttttttttttttgtgaatagaatcctataaaaccaaaaatcctaagctaaaatcccacttagcacttgtttatagtcaatagcttgactctgcagttgtttaatcaacaggtgggttgaaaggccccgatccggactgcctaaagtccggacgagttctctcgacccaagccactaagtgactcggccctaaccgtttatgaggttctttcctagtctaatccgttccatatgatttcgtgattcaatatatgagacgaatagagtaaacaaacaatcggatactttattgattaagcaaaggattcgatacaacctatgagtttgcatataagctattacaagtcatgtaatcgatccctagactatccgaactatcaccacccatcatcccggccttgagtctctcgcgcctaagccaagtcgttcccacgatcaccattcgttcctgaaagtcatagagccataagtaatctcatttacttaatcatatgcaagtccatgcaatgctgtatatgccatacactactcggatccgtggagagaattcaaagaggggaagatcgcgcatcagcccggccgattctcggcaggtcagttaagatccgccggtcctccgccgagccgcgtcccgcgcctcagccgatccctacccggacctagtcttgtgtaggatgcacatgacccggatactacccagccctctagtcgatcctttcaaggatccgactactaactcacatcctagaacccttagactcaaagtctaggatcccttaccttccttctcgaggttaggtcgatccgaccctccttctttattgccggcaacagcccggctaccgaatcctaagactatttattctcccaagagggagagagttttaatggtgagtttcttgttttttcggtgtgttgtggtgagtggaatggtcctgggcgcccttccttatatagggggcgaatggatgcttcccgaatcaacacatccgttccttgcacctttccgaagagttgcacctttccgaagagttgcgcccttccgaagagttgcgcccttccgaagagttgcacctttccgaagagttgtatctcttcgcccataaccgcccagctagttcgtcactcatccagctacctcgagctcaaccgtcactcgtccagctaccttgagctcaaccgtcacacgtccagctgcccgaggtggactgtcactcgacctgagtaaccgtcactccttccagctgagcttgagctttgggcgagctgacctagctgatttctttacgatcctagcttagccagcatgatttcccctttgtccgagcttatggtcagctccttctcacttgtccgagactccaccttcttctctaggaccaagtcctagccaacaatcctattgacgatcgcgggcgttacaagtctctcccccttgaattggattcgtcctcgaatccgcatcaagttgatctttacccatctccttgaaccactccggaaaattggccttcgtcttattctcggtttcccaagtgtattcttcacgtcctccacaattccacaagacttttaacaaatcccttgattttccccgagtcccttttgtcattcggtccatgatccgtaccggccatgcttccaccgtcatgttctcctttaacccgggaggtacatcttccacgctttcttcttgatcacttaaacacttccgtagttgtgatacatggaagacgttgtgaaacgcgtttagttttggaggaaggtcaagtttgtatgccaccgcccctactcgttcgatcaccttgtacgggccaacataccttgggcttaactttttccttgaggtgaatcgccctgcccctttgtaggtcatcgcctttaagtacaccaagtctcctacttggaattccaaaccctttcgacgcttgttggcgtacttttctgacgatgttgggcttcctttaacttgatttttaagaacttcattctcttcgtgatttcatccacgatcgtaggtccgaacaaccgacgttcgcccactggcgtccaacacaactgtgttctacaagctcggccatacaacgcctcatagggagacataccaatactagcttgaaaattgttattgtatgcaactctactaaccttagatatttccccagtttcctcccaatccaagacgca

SEQ ID NO: 22249 - DNA, 1894 bp, Arabidopsis thaliana
tgcgaggaaaagatgtaacttttaacatccaaggggtgcttacttgaacgatccgttgtcgttatgctctatgacatatttatttgagaatattacgtattgatttggtggtggttgtaatattagatatataattcgtctgcagtggtttatagtcgagttatttatctgtaattgttatgctaaatatatgttctgtccaggagaacaagtccaaagagaaatgtccgtttgaaaattattcactatatatttgtatatgaaattggtttaatggaattcaagtggtagattttatatttagagttaatatatagtgaatattaactgaacccgtactccccactaagcttcatccctcacgattgtgacctattaagagaaacatccaattaattactctgtttttattactcatttctaaaccgttttgatcagtactaaaacttctctctccatcacatcttactctttcgttattcgcaacaaattgacaaaatgagtacatcatcgaaatgtctacactctatcacacaatctagcgacacacaggttaaatttttcaattttttaaacaatatagtttacattcattccacaaagtatatgtaacttctataaactttcgtcttcgttgtcaacagaggaagattgcaagattatacattccggaaccaattctcgcactaattgttagccacgtttcagaagaaggaattgaggctctgaaaaactggattaaatctggtcatgaagggaaatctgcagctttctctgtcgagacactatcccgagttcgtttagataaaagccctgacttcatcaacatgtcttcacccgactctgttcacttctcattctactccaaatgtcttgcaaaaagaaacccttacgctatgtatctccagagcttgaggctagggttctgttctctcgacatgaaaggcgccatttcattattgaatgattgtaaagatgtcattacacgcagaaggctataaatacggaatagcatgtcttgtcaaagggggattccgcgaggacacttagagactaagagcagctcgtcagctctcccgtctcaaccagctcgtcagctcacccgtctgaagcatctcgtcagctcatcagctcgccagtctcaagcagctcgtcagctcacccgtccgaagtatctcgcctaatgtaaccgtcttgtctggaccaattaactcattccagtagctcttcttgccatcatcataaacaggagaatcttcagggtcatactcgtcaggaaactccccacaaggtaagccagtcacggaagcaaattctagtagtgaaaatctcattgggtgtccaccaaaaactgtccaaaactcatactttttcttagtaagcaactgtctacataacaaggcatgaatgaccttacccgaagtcgcaaccctactaactggcaaatggaataaaggaccaaagcaagactgaagtataaaatctaattcctctgtcccatcaaaaaccttcttgataaaggatagaatatccggtctagagtatacgttcagccttcccctcggataatgatcggtggcgaagagtctatttggaaggtttgaatcccactgagaagatggttcctgagatgtcgaccctgttcattggcaagaaaccagttcaagagataacgattattaacgagtatttgtacaaacgtctgtgcttagctacaaacaattgggaaacatttttcgattcaaaaaaaaaattgcagaaacattcagcgagaagaggatttcttcttctgagttaattggaccaaaataagatgattggaaacgatttgtaccttccattgagtattccgatcagtgagaatcaactggaatgctaatgaatctggcttacg

SEQ ID NO: 22250 - DNA, 2744 bp, Arabidopsis thaliana
tatcaataatatgtttctcaagttgaatatttttcagccaaattcacatatgatatttagacactgcagtaaatgtaaatttggatattaaaatctaagcgtccacaactccgtacacgtgcatctaccaaataatacttagaggttttttctttgtctcggaaaactagatatggacgttcactagcatgagatatcaactctaacgtacactaaaaaataacacatgcaaacgtatgaggtctttggtttgtctcataaatggtgatatttatgaatggacgtacactaatagtacactacagcgtacactgtctgttgagtaaatgtagaaatgtaaatatggacgtacactaaaacgtacactacaacgtacactgtttgttgggcaaatgtagaaatgtaaatgtggacgtacacttaaacgtacactacaacgtacactgtttgttgggcaaatgtagaaatgtaaatgtggacgtacactacaacgtacactgtttgttgggcaaatgtagaaatgtaaatgtggacgttcactaaaacatacactacaacgtacactgtttgttgagtaaatgtagaaatgtaaatgtggacgtacactaagaccgtcagtaaaacgtacacgtctagttttaagctgttaataaaaagaggttgctcataacaacgataacaaattatatatggaatactattactttgatttgacaatatgaatacacataatcacttaatacctttgcaataaatacaaccataacttacccaaccatatcttcaatgatgcttatttaagtgttcaaatttcattttctcgaaacaccttactcctaaatatgacaaacccaaatattcctgacgatttgcttgcgaagatagccaagaaaatggctgacaaatgttggtggtacctcggacctatgttaaaatccggtcctcgtggaagagacattgtctaccgtccggatgtcctcaaaaatgcaaacattttcagcatgtgcgacgatcccgatgacttctacgcggcaggccacgatccaaatgacatcaactccgaagatcgctatagatccttctttcaacggtgcttacaagctggtaaccccacggctatttaccatgaaggactgcgtctcgttacacatgagtctgacatccagggagctatcctacacttagagcgaatcgccccaaggaacgccgctgcaacccttgcatgcgcaattctttacatatgtgctggtaatgctcacatgggtggtgtctacttcggctcttcggaagcaaccattatgctttggaatcggaggacgcacgtgacatttgtgaggaggtgctaaaagatataaagaaatatggtaatactttaaaatacacatacgctaacagtttttcgttcccggaatgtgttgacgtaagcactcctgaatgcgcggaggtgtgttacattagatcgagactcttcaataatctttgcaaccaatgttacatctggttgtgtgctaaacggattagccagatcctgtagagctcacattcgccacgatcctgtcatatttataagttttccatgcaacaatatgtgagctttttacgttgattatcagtaatggaagtttgtttttaattaaattaccactttgtaattgattcaaacatactagctcaaagtactctaatatgagacatcattaaaataataaaataataaaatatctacgtacacgatatatgataatgtacacgtggcatagtttaattccaactataaagattacatagtgagcgacgatatagtttgtaaatgaagacaaaaggaaatttgatttgacgtcgtataacccatatatagaagatttcgctccatattaattactcgctgtcaaatacactctagaagtgacctccatcacactctcattaatatctctattagacgtacacggttaccgagcaatgtactcaattgatttggcagataaaataagtaagttaatgtttatttgaaaagattgttagtaaatgcgttgacccctaatatagcactatacatgaagccatattgttccacttatatgccatacaaacagacgtcaactcaaccttctgtcagagaacgtaatgagtattttgtagacgtacacggcgcgattatgagaggtacacaggaatttgtttaaattaaaagttactaatatgatgcactaaatatacatccacgtcacccacccacttacattgatggttattctcctctttaaaactcatgacaaacacacttagttgaatacacaaatccgtctagacctcctcgtttgaaaaacaatgcctttcctacctccgctaacccctccaaccgagttgtacctaggaatccaattgccaaaccccataagcatacttgtcaactacctccccgtcagccagactcccatagagacgctaaggaacttagtctacagttctgacatcaacacccttgcaatcgatgaattcatgacgtggccgtcgttactccaaccggggtctcccttctggccatacttcgaggtgcttgtagaacgtggatccatcccggcggtttaccttgaaggtgttcgccaagcgagcaacttcgtgacagtagctcagggcctttcagtcatgacaaccgtcgctttatctgatccctttgctctgtcgcaaccggtttgttccttacgtgtaccggtaatcacttggatttcctccctatcagc

SEQ ID NO: 22251 - DNA, 923 bp, Arabidopsis thaliana
  unsure (1)..(923): unsure at all n locations
gatgcaaggaggagatgatgcaccggcaccacgggcacaagtgaagctggtggatttcgcgcatgttcttgatggaaacggtgtcatcgaccataatttcttgggtggactctgctctttcataaagttcatcaaagatattcttcagagcgttgaaaagcacgatgaaaccgatacttccctacttgagaacgggcgctagagaaacgtcgttcttcccggctccatttcaaataatctccaagtttttcctttcttggactagttgggttttggacatgaacgtttgtccctttcaattgtataatttcgttaactaaaccattgtactttctcattagagaaatatatcgagagtttcatgaaagtaagctaaggcagttaagcttctttttggtttcctgttatagcaaagcaaaattgcgttttcaggtaaacagaatagaattagagcttgaagaagtaataatgtcaacatcaataagttggaaaatcagtgaaaaatattacttagaagcgattttcaccttagaacataatcttactcaaaatgccactaagtagtgtactcaaccctaagccacatcgcctagaaacagagtattttttggccttctttaaattttctgtttaaatctggttaatgacaagttgagtactcttcgtaacataatcacaaggatgaagttcttcgtcgtgatcgtgttttgtgcaatcttcttatctgtctctggggattcggacaatatgcaggacacatgtcccacggctccgggagaacagagcatcttcttcatcaacggctatccttgcaagaacccgaccaagattaccgctcaggatttcaagtccancaaacttacagaagctggagatacagacaattatctccagtcgaatgtcacattgctcactgcattaga

SEQ ID NO: 22252 - DNA, 2869 bp, Arabidopsis thaliana
ccggcgttcgaattgtattcacgaccgtgatcacccgatcgttgaggacgaggctgggttggcgaacctgcttcgccacatcaaaaagaggaactgccaggttcctgcagtgaagaacatggccgaggcggcggcttatgctgacatgatggtgaaggagggccaggtaataatcgataaatgcctcgttctaatttcattcttatgctagtcgtaactttctgttttgcctttggcaggcgatagctgccacaaacaagctggtcgctctgtatgagcagcgtctaagccaggtccccttggcgagtgagctcgaagaaagaaagaccctcatccgggagctgacgtcgagtgtgaaggctggtcaggaacgcgaggtctcgttccaggtataccttggttttgacttgtttgtatataattcatcgatgattcgatgattctgacctgattgtgatttcaggcggggatcgagaggctgaaaatggagctgcccacttcaaaagacctcgagaaaggttatgccaagaagatcgggctcatggggatggagatcgggggtttgcaagccgacaagaagacggcgaggaacctgattcatcgcttggaccagaggagggaagtgattgtaagtgattgtttttgcgaaaaatgataatgagtatcaaaaattttcttttattcttatctcgaaattgttaagtacaaaaagaggtaaagcaagcgacgatcaggcgtttgatcatcgagtagggacctgctcgataccgaggggtgattgaactgttgaactgtcaggtgagaagctgatcttcgttgatggaagatgtgatgtctgtttcccttgttgaagtttcgtctttcaaatagaagggttgagatggtaattgcatttgcagagggaactgcctgcatacctggttaggggattaagccccttggtaattcgattgaagtggtggttgcgctcttggggggagctgcctacgtaccctgccaaggagtcaagtcttatcgtagttcgattgtttttgagtacctattcgtggtatgtcatgagatgcatggcattccaaggccgtaactcaagtactccgttgataacttttacgagcttatagacgccgtcacgtaccacctcgctgattcgatagggaccttccttgttagttcccagttttccagcgtttagctctctcgtgttgctgaacacttttcgtaaaacgagctttcccacttcgaatcccgaattttgatattggagttatagtagcgggcggcagcttgttgatagttttgaactcggatcattgcctgatctctgcgttcatcgatgaagtccatgttgtcctgtaacatttgcgtgttcaggtccgagttagcaggactggcggtccttctcacgcttggtactattttttcgacagggattagtgcttctaaaccataggcgagagagaacagtgtttcttgcgttgatttgcgaggtatagttcggtaggcccagagaactccgtgaagcacgtcggaccacattgattatttggaatcaagtcttttcttgatgttgctaagtatagttttgttggcggcttctgcttgtccgttaccttatgggtaacggggtggtggtggtggtggtggtggatgtggtaagacggatcttccacttgtcgcaaaatgctttgatttttcccgagtcgaggttagtctcgttatcggtgacgatctcataaggtatgccatgtcggcatacgatattttcccataggaagtcctcgacttgtttctcggttacctgttggaaggctttagccgcgatcgagttggtagagtagtcggggaggaccaacaggttttttagtctcttcttccctcggaggcttccatgggacctacgacatccatggaccacttcataaatgggtaaggagaagatatcgaggacatttcctcgggaggttgatgaagagtaggtgcatgtcgttggcatttatcgcacctgagtgaatgagctatgcaatcggctatcattgttggctagaagtagccttgctttttgattatgagggcgagggtacgtccactacagtggctaccacattgcccctcgtgcatgcttttcatgaggtcttttgtttgttgcccgtaggtacacaccatatagggacctgcgacgctgcgtttcataagtctcccttccatgatgcagtaccttgcgctctaggctttgagttttctggtctcccacttgtcgggaggtgtgatcccttgttcgatgtaatcaatgattggaattctccagtcattgtacggttcaggttcgtacgaggcaggttgttcgggggttccgagctccagctcttcctccgctgcacctgcctccacggctgctgcgaggctctagccgcagcggtggtgcttcgggttactggcgtaaagttgcaagttgccgaggtttctatcccagcgtgtttgactgttaggtcaatgctcgggtgttctattccttcgaacgggataattcttttgacgaaaggatctgacgtggaggcgagagctgccatggcgtctgcagaggtgttttctcctctggggatcctggtcagttcgaacgattcgaggtacgcttccatgcgctcgtctttagcttcatattccccgtggaactggctggtgacaagttgggagttgctatgggcgtgtatatcgcggatccccattccttgagctagcttaatgccagcaatgagggcttcgtactcagactcgttgtttgatgcgttgaatccgagtcggaacgattgttcgatgacttccccggtgggggaggtgagttgtattcctactccggattcttgtcggttgg

SEQ ID NO: 22253 - DNA, 2736 bp, Arabidopsis thaliana
cttaaatgtaatgcaactacatgaacactcttttttttgtgaaatgattttctgaaatttttcaaattttttggtttttctatgccttagataaatgcagactcaagaatatatacaatgaaacacacacttcctgagccctcccccaaacttaaatcacacagtccactgtgcgaataaacttggaagagtgtacttaggacaaatccattcacaggaacaaaatgaagaaacaaatcacaacagatgatataatacaatggtgaagtgaggcgcttacctcagtcgaagaatgaacgtagttgctcgttaatggctgcctgtgattgctctcaggccatagacgaaccgccttgttctgtatcagctccagcaggtgggtattcgacctcatcagttgtgtggcggccacaccgctctgaggatacttaacctctttccttctgctgcggccagcaccgcggtcgcgtaaagtacgagactgcagaagtcgtctgctcctgctgctagatcgagtgagtgtggtcctcctcttcctcccagattcacgaggctcgaatgatgaatgtctcgcatggacatgcggaatctcctgctctctaggctcaggcctgcgctgacttggctcgggcgcgtcatatctcctcgaaggcatgtccggagggagctgtccctacggaatagctgtagtggaagaggagcagctgatcttgtccttcagaaacctgatagccctgaggcacttagcgagtaacttatcctgtttcttgcaccacttctgcagcttgttgttgttcctgtgagcttcgctcaaactcttgctttccctcgctggaggtatgtgctcactaaaatgatacatactcgtgtcaaactccgcctcatctatatcgtctgtctcatcaacatcttctgttgtagctccttcggtgtgactgatctcatcagttggcggactgcccttgaaataaagatcttcaagtgcaggcttgaagtcaatgttcctgccctcgagaatcctagtagcatcaatgcaggggagaagaatgttggcaattctaatcgatgaatgctcgaacctatagcggtgaaagtcgccagccatgtcaaactccaagaactcacatctgcgcaaatgatccaagtccatcatcctcggtgctaaccctggttccttgagcgatactccacaagcttcgagaattggcgtcacaacgccacccacgcatagtgctcctctcaccttcttcttcccgttcgtcaacgcccacttcctgtatccacacagatggatcaatagaggcattagtggtggtgcgttgttgagatcgcctctcaagacattcttccccttcgtccgacggagaatccctataagcgcataatctatcatctccatgttcgtgttagacacggtgcctgtagactccttggagtaaaagacgttggcaaccgattgctgaaagtagcggatcacaggactccagatttggttgctcttgtaccgcgccgagtttagcggtagattgttgcctatagtggcccacaaatccttaagctcctctctgtcaaatctgggtttggttccctttccactagggaaaccaaacagttcttccaacttcttgatcgaaagctgataccgctgttcatccactaagaatgtcaagaagcctaaccccatggtatccagctcaaagtctgttagtgcctcatacatctccacctgcagcgtggaaagaaactcgattgtctcctccttataggcaggataaggataagacatgagtgtctccaggtgacacttctcgaacagatactgcacgtcctccagtaacctcagctgggctaaagtctcatagcacgaataccgcgttccccagaaatcatttatctcaaagaacctgatatactcctccactgtaacctcgtcaggtttgttcagcagcttcgtctcctttcgccatgactctggctcatactcagtttcgatatcctcatcaatcagctcatatctacttgacatcgccctctttcctctggcgatttcagctcttctctgattatgtcgggctgtagagcgttcgaattcatccctgaagctctggtaaacatgttgctctcttggtctagcggaccaggactcagcttcatccacattgtaatcagggtccttagaggattctccactgtagttactcatgatgaaacctgaaaacagaagaaactcaaaaataaacgttaatacgttagtaacaacaaaccaaaaacacaaaccaatcaagtgaaccggtcgagtgacgtagtcgagtaaacctttggttttgaattttttttttcttttctttcggttgatcgagtgattttgtttggtcgagtgaagcttgtttcgtggttagagtgaggcggcggtcgagtggtgagcttgaagaggaggagaacagctgcggtttgaccgtggaaatagaggagcggtcgagtgaactttgaaatgaaggcgggggagaagcggaggtgctcttcgcgtgaagtcgagtggtttcggtgaagactagtggagttgtgagctagagaaggctgtgtagtggtcgagtaaacgtagaacaagagctgatgtggagatggtgaagcgggaggcaaggtcgagtggtgaatgatgttgtgattggagagatgagagaaacggtggtcgagtgtcttccttgaagaggagaaacgactgcttggtcaagtggt

SEQ ID NO: 22254 - DNA, 865 bp, Arabidopsis thaliana
ctaaataattccacgagacgacgggtcatgagtatgagactgccttttgaaaaattcggtggccaggcgcaagaattgccaatggatcatatctggatttcctcctcacaaattctccccacttgtccccgaaatggatctccactcttctcttgtcgtgtaatgtggcagatactgcttcaaccctatccctgcttcttcactgaattccagtattcttctgttccgcctcaagatctcttctactccatcctttcctgccgaccctggagatgccgatgttaggatcgccaccaggtagaatacctcttcctccggtgttactgctgatgtttgattgtcccacctgctcaccaacatgcttttgttttgtcaacaagtgaaaagaaacaaaatcatgactagctctttctttctttctttcttactttgatttgttcactgggtagacgatgactgggccgttgcttgtatccgttagtatgtttccaaatacacctcttgcaaattcattgattttgcttcttggtaccaggaggttcagccatggatgtggcacctcccactgccctttcgatcggagttttacctcagacacatgtaccctgtccaagaatgcttcatatgctacctccgttgtaaacagtgtcgacgtcacgtagcttagctctgataatgtttctttcacttcctggattggacaaatatatatatattttcagttccaatgaatgtcatctaccaaagaagattctaccgattgcttctactctgttttctcacctggttgattacgtctttgttatcttgcttcaaatacttggctagctccagacaatacagagtccttccatcaaacttgaat

SEQ ID NO: 22255 - DNA, 3072 bp, Arabidopsis thaliana
tatacttgtctataatcttgttaagttctttattgtgttctgttgtgaatcatgaacttaattgtggaacatttgttgattgtatcccattgcatgttttcggctttgacattgaggatctgtctttgttctatacttgtctataatcttgttaagttctttattgtgttctgttgtgaatcatgaacttaattgtggaacatttgttgattgttgaacttagcatgttttcggctttgacattgaggatctgtctttgttctatacttgtttatacttgttctttactgtctatgatcttgttatgttgactattgtgttctgtgtgtgatcttgtcggcttatacttgtctagaatcttgtagaatctgcctttgttcaattatagagtctactgtagttgtagtgttttggattttaaacatgtttactttctgtctgtgttgcatgtgtttggaggtttactcgcgacagaggatctaaattggttagaaagatcacacggatttttactcaaaagttcaatgctccctactataattggtcctgtgtgccattggataaaagagaaagattgtttttagagtttgcggtaacttcttgtatttctccaactttcattagactgtactatttaatctgtcatttgttcactaacttcacactttttttgtagaaaactcaccactgggatctcttaataacagggacagtccaatactacttcaatgagatcgttaagaggcgcttgaaggacatggttagcaccgcaaggagaactcgagagcagcctccatggattggagaaactctgtggggaaccatgtgcgactactgggacactgaagaggcacaaaaaaggagtaagacatattccaaagctcgtctctctgaccgtaacggtctcggtcctcacgtccactactctgggccaaagtctttccaagaaatccaagatgaattggtaagtgtttctgcaatcttcccatgtgttttagtgatgttcgtttaactgtgtgtgatgtttagtctgttgatagtaatgaagcttgtgatctgtgtttgcaggaagaaaaaatgggaagacctgtccctcttggtgaggtgttcatccaaacacacactaagtcggatgggacttatgttgatcagaaggcagagaagattggtctggcgtatgagcagaatgtgagagagaagctgtctgaactagaggcggatgcttctgctgtgtctgatggctcttcacgtcctcgggatctcacactagatgagtatgcagccatatttctcgaggtaagatgttctttgtctttttcagagtcttagagacatttaggatctgtcactaattatcttcctctttatttcttgcagtccacagaaaaggatgcaagaggcaatccttatggacttggctgtcttaaagaaactctaggcagtgccaaccgccaactccccggagactcaacctttaaagccttagaagaacggctgcaggaagctcagcggcaaattgaagaacaggctgcatataacgagaagcgagatgctgagattgctgcccgagaagccgagacagcccgagtcacagctgagcaaaaggacaagctcgagcacttgtccttagtcgagaagtatctccgccaaaccgatccgcagttcttggactttattgccacacactcttccacatccacagagcgtatcccaattactcccccatctaatgatccatagaatttaggtttccaaacactaattgtatctttcaataagttgtatgtttgaacaagataattttatgttttgaacttgattttcaatatataagcagtgttttcatattgtatagcatatcaataacaaacaagaacaatcgatgaacaaacaagaacaaacaagaaacccatcacctgatgaccaaatctttattcggaccaaactattagtcgcaaaaaagtagtaaataagtagcagtatagtcgctgaatcgtcgtcaagtagtcacataactttacgacaatcataagactaaacaaattagtcataaaagaatcgtaaaactgacgtccaatagtcgtatatacttatacgactatggtatgacaaaaagtttcaaatccttggcaagtacttttaatcgtcaaagagtcgtcgaatagtcgtaaacatatttacgactactttacgacaactggaaacatacccagggtttataataattaatcgcaacatagtcgtaaagtcgtcgtaaacaattaacgactatgaaacgactacatgttctcacacgctcagtacagtacaaataatcgtaggatagtcgtcaattaatcgccgacataatacgactacgtaacgacgatttttcactgtttagtcaattgtcgtattattgtcgttgatcaacgactaataaacgactactgtttttagcgactatggattaatgactacagtcattagtcgtaaattagtcgtattagctttagttacgactactaaacgactgacttgtaggtcgtcaatcacctgttttcttgtagtgtatccttatgatataaggaatcaatctccgcaaggtgtgcattaaagattgatatatcaaaggcttttgactcggtccaatgaccttttcttctcacggttctaaaaggttattatctcccgctggtttttgttcgatggattgaactctgtattggtactgcatctttttcggttcaagtcaatggaagaattggcaggttacttccaaagcaaatgagggttgagacaaggctgctccctctcaccttatttcatcgtcatttgtatgaatgttctgtctaaaatgcttgacaaagcggctagggataatgatattgggtacatccttggtttaaaaacatgggactcatgcagtcatttgtgttttgcggacgacagtttggttttttcagatggtagtgctcgatccatagcagcattactacaggtctttgggaactttccaggattttcgggtctataaatcagcttagagaaatcgacgttgtttatggcaggttctcacctcagcgtatagat

SEQ ID NO: 22256 - DNA, 646 bp, Arabidopsis thaliana columbia
ctttttcaagatgttgaaagagatcgagatctcagcaagattctgttgtgggacaacgttagatgtcgcgtagtggacgatcgcttgaagctgaatcggagtcgcttcgtaatcagctgccgcagccaccgctctgcttttggcgcttgctgtggaacagaggaagagcgtttcgtcagcggctcgtatgaagcttgtgaaaagcaaagcaccgccaactaaaccggctagtaaaacgccggtgatgatccatcttttctccgatgggattaacgtgttcatgttgttttgttcgatctcagatctgattgttttttagttatttttgttctggtttttgtggtttggtcgagagacgacctcggaggagaaaatagaaatgtgaagaggattgttgattgggggactgaatagggaagaaagatttgggatattttttcttggagatggtctgattaactgacacgtgtccatatccgaccattgaagcagctttgggttatagtggatatatgaacaagacacgttgctgtggcttattcgaattttgaaaacatttctgtggacatatgttatttaattggacttggagcatggggttcgttccacttcggtttgctaaagatacaattagtacattaacaag

SEQ ID NO: 22257 - DNA, 556 bp, Arabidopsis thaliana columbia
  unsure (1)..(556): unsure at all n locations
nnnnnnnnnnnnnnnnnnnnnnnnnnnnctaaaggtcacgtgatttgcatgctgtatcgaaggcggtcaactaaaaattattctgcccgcgattttttgtttcgccgaagctttcgctggctgtcaaagcacaatttggtcttttcttcattttagtcatttttgctcaaaatggcttcagtatacaaggcagtgtccaagagaaagtctcgcgacattacgaagcagcaggatcaggatgacgaagacgttatgatggaggaaatgctcgccgatgccgacgatacaagcgatacangtgaagatgaagaaaacacggctgacgcagcaaagaagcagttagccgctggaatgatgccgaagacccgtgtgctgatgctgacgtcgcgcggtgttacatctcggtaagtccgcggcacgaatatgcatatcaattctcgcataactaattgtcctcaaattcagtcaccggcaccttctcaatgatatgacctcattacttcctcacacccacaaagaaagcaagctggattcgaggaagaaggcagccggttac

SEQ ID NO: 22258 - DNA, 630 bp, Arabidopsis thaliana columbia
taacattccgattttagatcaaaatcatcattgttggttgcatcctaaatgtctttggagcagtttctcctactaatctcaaattatacaaaagagaaatattacagtaagatcaaatgtttgttgcatgttcctaacttcagtcttcagattcaaatcacagttacaaaactgcttcagccgcctaacaatttggttctgaaacatatgaattcctagaagaaaccacgaacaactgaccagctctcttgaaatccattactgctcaaacggaactcgtatgaacaaccgtccatgcatgctcatgaccgcggatgtgtgaagcggatcaattcttgctgataagtcaacaatctggtgaaaacatatcaaaatgacaggaaggttctcagtctctgtatcagttcagttaatggacatatctggaatatagaagaaagttttacctttttgaagggtgtaatccccaaggattatcaagctgctctggctggcctgttataacacctttcccgcaggatctgattgaattcgaacctgagaaaagacaacgtatgttcagtaattggaactatgtactgattttccagaaaatacttattgcctacacactgtgtactgagactatga

SEQ ID NO: 22259 - DNA, 601 bp, Arabidopsis thaliana columbia
  unsure (1)..(601): unsure at all n locations
nnnnnnnnnnnnnnnnnnnnnnctaaagggtctcctggaagtctgcttcggtcagatcgtggaaagacggatccagatcggccactttatcttgctgccacagtcccagcggatcgagattcgcatgctggtgaccacggaagcggtatgcgttaatgagctgcaggactttaacctgcttcacattggtgtcagggtcggagatcgttgaagagtaacgtgaagcgtctttcgccaggcggcggagaatattcacgcgtttgagagtggaattgatccggtttgactcccgtaccaggtaactgctggaacgtcgaacgccagttagcgtcaacctgagtcaggatcggttaagaagtcttcatagagctgttctatccagctctggtttgcgccagagaggtaagaagagtccaaccaggctttcaaagcgctgttctgcatcgtgatcccttaagcatcttttttatgcttacttcgccgtggatactaccacgcacagtgatgtcgtgccggggttcacttgcgagctcttgtctacgtagtggctcgcgaaggaacctttaaaaactgtcttagtgtcaggggcagtttttaaaga

SEQ ID NO: 22260 - DNA, 575 bp, Arabidopsis thaliana columbia
gaattcacaagacaagataactcgagagacgagccactactacttggagcctagcttatggacacttctggtttttaccagggcctccatagtaaaagtaatgaccccaatcatcattgcttccggtttgaacatcataacagttagactgttcagtgaatgttccaagtcctttaggtgccttgaggttgtttgacccatcaaccacctgaatgttcctgaagtaacttgctttgctaaagccttcttctggaaatttaccactgcccatttgtgttgaagtgtgctggccatctgattgtgagttcacgacttctcctccccattcaatcatcgatgcactttctgtcaagtaggagaagagaaaagatggccaatagcctaaaacatagccgttcccaaattgcatccaccagtgtccctctttaggatcctgtgaaaaaagttaacagaccatttcagcttttcttgtcttatggattgcgtcaaacttatctctttatggcttaacataccttccagatcagaatactgatatcgtactgcgagttacgatatccagagactggggaaat

SEQ ID NO: 22261 - DNA, 566 bp, Arabidopsis thaliana columbia
tctagtaagggagtgtgctctaaagaccacacccgttctgcctgccagtgaagaggagcgcgacacacagccgacgctgagttttcagcgtgtactgcaacgtgcggtcttccatgtccagtcctccggtcgcaatgaggttaccggtgcaaacgttctggtcgctatctttagcgaacaggagtcgcaggcggcatatctgttgcgtaaacatgaagtcagccgtctcgatgtggtgaactttatctctcatggcacgcgtaaagacgagccgacacagtcttctgatcctggcagccagccaaacagcgaagaacaagctggtggggaggaacgtatggagaatttcacgacgaacctgaatcagcttgcgcgcgtgggcggaatcgacccactgattggtcgtgagaaggagctggagcgtgctattcaggttctctgccgtcgccgtaaaaacaacccgctgctggtgggggaatctggtgtcggtaaaaccgcgattgcggaaggtcttgcctggcgaattgttcagggcgatgtgccggaagtgatggctgactgtacga

SEQ ID NO: 22262 - DNA, 571 bp, Arabidopsis thaliana columbia
ctcgcataggcatctcgaatccggcacatgtcgtaaattgtttagctgttaagtttggaagttgagacttactctttatctcttgtctctgtttgatctttcaaatggaacgatattgtctctcttctctatgtgttgaaatcataaatttgaatgaaactgaatgtataggcttgcgtgtgaacttttgagggaatcaaaagctttattattgttgtctccaatattgtttctttcttctttgcttagtataagcctatggtagatgaactgataaggagcgcatatttgtgtattttgatctagttccaacgaagaaacaggatatacaaagaagaacaacgtaaactaagagctgcatcaaggaaaggcgaagaaaccggggatgggactcatactcatcactagtcgagatttcctcctatctccaaagtttgcatctttcgaagaataaacaaaagtttcttgaagatttctgtatcttgtgtgcaaacttcatttgatcgtattcagtttgcttttgcaatggatttttttgtctttgctttgtctattacctttgaccgagttg

SEQ ID NO: 22263 - DNA, 605 bp, Arabidopsis thaliana columbia
taggcaacgtttcttttgccttctcatacaagaaaatacaatataagcaaaggcccatctgcctatataaaaccctaactctcgtaaataaaactctgtttttttcaccttctcgtttcaataaaatccaacacacaccaaagacagtttaaggaaaataaaagaagaccacacgatgcattttcttgtaataggattggtgattcatctatggtttacgaacgcttataagcttgacatcatcgatcacaggcccacacaatgacgagaaatcatcgctcctcatggcatagaaagtgctgtagaacataattcttgatcgggtcgaaaccgccacaaatcgaatagaagctcgtttaaaccctcctgtgcctttcgactcgtaagggaccttaagtgtatcttttcctgcaaaagcctcaaccaccattgatcctttgcaagcattgttggcgtctcaaccgcaaaagacagcacgtaagtcttcccaatgacagtccgaaccacttgagcgatggcactctctttacccgctacaagctcaatagctctgcctgccctgtggactgagaaatgtcaacgtctacggtcttgacagctttgag

SEQ ID NO: 22264 - DNA, 602 bp, Arabidopsis thaliana columbia
tttaatgttgttggctgcttgatggaaccagctagtcttccagttcaattctacacggcagtgttgtatactctggctacacttgttctctatgttcaatctatatactacgggcatatttacccgcggttgatgaaaaaccgaagaatcatcagatggttgatgtagaagagcctttgcttcgtgaagaagctaagcgtccttctaccaaatcgttgctatgtgtggtctcggtgttcttgtttcttggatcattcaacgtattgagtggttcaagaagtatggatttgagagggaaagatagagtgtttgtagttggaggagcaggagcaagaaagcttttggaggtctctagcggtaacttaggagaaaacaacaatattggaatgtggttgggttgggcaatggcggcgatttacatgggtggaaggcttcctcaaatatgtatgaatgtaaggagaggaaatgttgagggattgaatccattaatgttcttctttgcattcattggcaatgtgacttatgttgcaagcatactagtgaacagcgtcgaatggtcgaaaatcgaaccgaatctaccatggctagttgatttaggagga

SEQ ID NO: 22265 - DNA, 596 bp, Arabidopsis thaliana columbia
atatgcttgttatgctacatgatttgagtttttttggatggttttatggtatgtagtctttaagagatgtacaaagtgaggtttttgcagacatgattacatcttgtttgatgtcttctaatgaagatttaagggcttctgtgtatgcatgaatggtaaaggaaatgatgaagcttgctgtttttttcatatctcttcttcttatccttctgatctctgagacaacagggttgaacttagaaggtcaatatcttcttgaaatcaagagcaagtttgtggatgctaagcagaatttgagaaactggaattcaaatgattctgtaccttgtggatggactggcgtgatgtgcagcaactattcgagtgatccagaggttttgtccttgaatctgtcttcgatggttctctcgggtaagctatcaccaagcataggtggattggttcatctgaagcagctggatctgtcatataatgggttgtcagggaaaattcctaaggaaattggcaactgttcaagcttggagattctgaaactagacaataaccagtttgatggtgagatacctgtggaaataggtaagcttgtgtctttggag

SEQ ID NO: 22266 - DNA, 585 bp, Arabidopsis thaliana columbia
tgcgctcgtattccttgatatcagattcaaggtcagttcgggctttttccatctgaatgaaacggatggcaccctgaatcaattccattccatgacttttaacttcttttctggccctcgatgctgactttgccaatttggagtcccttagcttgaccaatgcgtgatactttaggttgagttcggtgagttgattgtgcgagatgttagcggcctactcggattgaagaagtctgtcttgaactctcgacagttctctttcgaagttgtcatacttgttgtattgcgcctgtagctcatcatctgacttattgagctcatatttgaagtggcaacctgatcttccatctcgtgtttcccttttagagaattcgaaagggcgtggtgatcagcttcgagggaagagatctctccaggcccttgtttcgtttccctactaagtagcaaccttcataatgctcaatcatatcattgagtttcattgagttcattactcgcctgaaagagggttaaagtcaaagaaggattagtacaggtggtggtaattcaagaaaacatcgtgtaaccgacaacaaaaccgttgat

SEQ ID NO: 22267 - DNA, 554 bp, Arabidopsis thaliana columbia
ggatcccggagcctaatccaatcttcataccaatattctttccgcctttaggaacatccttgcgagaaatgactgcaacaactccagtaggtaccaaatcgtccttgaagtgaataccttttatcctagcgaatggctttttgctatagataaatgctccatagagacagtttgtgggagatggaatatcgtccacataaacagcctcaccagaagcctgaagggaagctccaactttagtaacaggctgaccaactggattatattcattgtttataggaacattttgtgaagaagacaacattggcaacggttttggtggatccaagtggtaacgatttgaaggtttatctgtagtaggatgggtcattaaggtgtgaaggaacttgaaaaggaagccaggcgccaagcttgacctgtaagcaggattgcttgtaccgtcttcaggcaccacaacattgccaagtaaggtaatagcctcatacagaactttgtcagtgattactttaccagacaggaactcttcgatttcgtacacctaatggcgtgtttgg

SEQ ID NO: 22268 - DNA, 574 bp, Arabidopsis thaliana columbia
  unsure (1)..(574): unsure at all n locations
nnnnnnnnnnnnnnnnnnnnnnctaaagtcaccgtaccagagccggacggtgcgctgatgccatcaaaacgcacatccgccgcgctttgggtattcagcgtgacatgggagccatcttccagttgctgacggctgactgtgcctttggcggtgcggtaatctgcccgcagaccttcgccggtttccgactgccagagctgccagcctccgccagcgccgagcaacagcagtaatcctttcatcacgtgacggcgggtgaggcgggtatcgtgcaacgcccggctggcaacgtcgccaggcacaccgccaagctggttgcgcaggttttcaacctgctgccaggcccactggttatcctgatcctgttcataccactgttgccagcgcgcttcctgttgtgggctgacgcgctcgccgcttagcacggcataccagtgggaagctgaacgcagcgcctgacggcgggaatcggttaacaaaggattcataacccatactccagacggaacagcaggcagtgctcgacggctttcgcacgtatttttcacggagctgatggaacacagagtttgtg

SEQ ID NO: 22269 - DNA, 609 bp, Arabidopsis thaliana columbia
  unsure (1)..(609): unsure at all n locations
nnnnnnnnnnnnnnnnnnnnnctaaagccacaatattggctgtttatacagtatttcaggttttctcatggcattaaccgccgcgcttaaagccgaaattgccgcctggtataaggcgcttcaggaacagatccccgactttattccccgtgcgccgcagacggcagatgattgcggacgtcgccaaaacgctggccggagaagaagggcgacatctggcgattgaagcccccaccggcgttgggaaaacgctctcttatttgattcccggcatcgccattgcccgcgaagagcaaaaaacgctggtggtgagtaccgccaacgtggcattgcaggatcagatttacagcaaagatttaccgctgctgaaaaagatcattcccgatcttaaattcactgccgcttttgggcgtgggcgctacgtttgtccgcgtaatctgacggcgctcgccagtactgaacccacgcaacaggatctgctggcgtttcttgacgacgaactgacgccgaacaatcaggaagagcaaaaacgttgtgcgaacgtgaagggcgatctcgatacttataaatgggatggtctgcgcgatcatactgatatcgctatagatg

SEQ ID NO: 22270 - DNA, 611 bp, Arabidopsis thaliana
cttatcaattgagaaatcaatgaagtgaaattcataaatagtacaggtggagaaaccgtgtgtatggctaaagatacagggatgcagaacactgatatcataaaaaatcaaaacacccagagctaaaaataaactgaccggagctgcctgtgggaacatgccaagcgcatggtgcccagcactttcgtactgtgacaagcacaatctctgctttgcacgaggtgaaaagtattctgccacaaatttcctccaataggtaatgcaattttcctagaaaagaggtatcagcgatgggtgcatagatgtgatgaaataactggaagtccataggttaggattagcttacagcaggccgttgctgcagatgatacaagtacatcatcaatttccgagcacagacgccaacttcataaggacgtacattaggaggaatctgttgggttccttgttgctgtaactgctgtctcagctgctgctgttgctgaagttggagtctctgagagggtgacatggattgaagcatctgctgatgttgcctcagtctctgctgctgaagcaaagcttgcatctgcggattcctcccgtgggtcctgacgctggatcaactgctg

SEQ ID NO: 22271 - DNA, 1623 bp, Arabidopsis thaliana
tgaaagatacacaaagagatgtaattgatttttacaagatgttagattattgtacaacacgatctccatcacaatcctaaacaaaattacaaaacaaataccagttttatcataatactaatctttgcacaacctttgcctttgcctttctcttcacaatcttagtaaatatatatagctgttgccaaaggacttctcggcgggaattctgatcagtacttagaagaaaccttgggttgcatttagagtgtttgtatacatatgttttagccaacagattcttactctcaaaacagagcttcccttggtgcaccgattaagttaagtgcggttgctgcgatgtgagatggcatgagtccagcttcagctagttgatcagctggtgcaccgtgatcaatgtatcgatcaggcagtaccattggtctccactgtatattcaaacagttgcaaattagaaacagtattttttgaaaagacagaaaaatattagagagtttctggaagtaataagtaaccttgagtttgccatcaagaagaccatcgagagcaagaaactgaacaacgtgcgagccaaaacctccaatggaaccttcttcaaccgtgatcagaacctcgtgcgacttagctaagctgcgaatgagagcacggtccaatggcttgcaaaaccgtgcatccgctacagttacgtttaatccgcgttcttcgagcattacagccgctcctaaacagctctgaactgctgagccataacccaacaacgcaactctctctccttcctttaaaattctacctttcccaatctgaaatacacccaaagagattttctatctcaaaatgatgaaggaagagagacatatttgagaggaccaaagttatacctcaattggaacacctttgtttccgggaggtaatgcaactccaataccgttacctctagggtaacggaaacaagaaggacgatcatcaatcgcaacagcagttgcaaccatgttaaagagatctgcttcatctgatggagccatcactatcatgttaggaagacaagccataaatgtcacatcgaaagctccacaatgtgtcggaccatcagctccaacgagtccagctctatccattgcaaatctcaccggtaatttttgcaaatcaacatcatggacaacctacagagaaggccaccatatactctattagtttcttaaaatgttttattacaaagtaaaatgattaagatgttgaacttgcctggtcataagcacgctgcatgaaagacgaatagattgcacagaagggtttaaggccttcacaggctaaacccgcagcaaaagtaactgcgtgttgttccgctattcctacatcgaaacatcttgttgggaagcgacgttgaaagagatttaacccggttccacctcccatggctgcatgaatcgcaaccacatctttgtctacctctgcttctgcgactaatgcctccgcaaagtaagttgtgtaagattgagtcttattagtagttttgaactgtctacccgttgctggatcaaatttcacaacagctgaaagaaaaataatcaatatatatacccactgcttaggaactagagaaaacgttatctatctaacttgtgt

SEQ ID NO: 22272 - DNA, 532 bp, Arabidopsis thaliana
tataagcattttaaggcagaggtatgcataatcttcttaaaaatatgaccatctaacgctttctcttacttttatttcccatgaatgattaggttgatcttcttctacgagttcaccatacaaatttggtgagtcttgttggatattgcgatgaaagagatcacttggctctcatctatgagtttttgcccaagggagacttaagacaacatctatctggtaaacttgaatttcttcatgattcgaaagtgtatatatgtttcaacgttcccaaggatctaaagaatcaagtattcaggaaaaagcggtgggtcctttatcaactggggtaatcgtctacgaatagctctggaggctgcactaggttcgtaagcttattagccaatattggcagcttaaaatgactttccttctggtggactaacaaataatcattcctttgaataggattggaatatctacattctggatgcacaccaccaattgtacatagagatataaaaacgacaaacatattgctggacgaacagtt

SEQ ID NO: 22273 - DNA, 547 bp, Arabidopsis thaliana columbia
  unsure (1)..(547): unsure at all n locations
nnnnnnnnnnnnnnnnnnnnnttaaagccggttgaatggggtgaaaaagccattgcacattatgaaaagctgggaattgatccacagagtaaaacgctggttttctctgacaatctggatttacgcaaagcggttgagctataccgccacttctcttcccgcgtgcaattaagttttggtattgggactcgcctgacctgcgatatcccccaggtaaaacccctgaatattgtcattaagttggtagagtgtaacggtaaaccggtggcgaaactttctgacagccctggcaaaactatctgccatgataaagcgtttgttcgggcgctgcgcaaagcgttcgaccttccgcatattaaaaaagccagttaatatcatcagggagctaatcggctccctttttttacctttaattccgaaatctttcgctgcatttgcgaattctgcttgtctgattgcagatgccaggtaacataggtaccccccatttacgggtggacaagtgtttatttttccgactattacagagagaatattatgagcgttg

SEQ ID NO: 22274 - DNA, 588 bp, Arabidopsis thaliana
aacttcctggaaaccaaggtagccaatcaatctcctaacgccaaaaaaacaaaaatataaccaaagtgatcaaattttattataacctcaattgtgacatcatgatccaagatttgagttggttcaggagtgtagtccattggttcagacgttcttggcggaaccaattcttgatcccaacatacaaagtaaatatctccatctaaatcactcccagaacattcatttgggtgtggcctatgcacaaaagaacacaagattccaatgaaaagttcgagacttaaaacaataaaagctcgaaaaaaacacgaatcaagcatagaaaaatgtttacctcaagcccttttgcgggaacacaacgcagtccaccatatgatttaaagctgggacattgacagcttgaagaacacgcacgtcaccaggatgcaggcatgggtttttggcaacaacaacaggtccggtgatgatgaatcgcttcccggcctcatgggatctgaatactgcactactacctgaccatactccagtgttctggtctcgtctaggcacccatcatagatcttccacagaaatgaaaatccttgtttt

SEQ ID NO: 22275 - DNA, 596 bp, Arabidopsis thaliana columbia
tcatctgctcttacaggtcggtggaacacatcctgcaaagggacataagaaaagtaagaaacttttactcgaggcattgttttcgaagatggtaaaatcaagataatagacgatagagcaggtatgtaattatgtgtgcgcctgcgtgtatatatatgaattaagtcgtttgtacttatgtagggagaatgatacaaactcacacttcgctaagacaaaagaaaaagcttacgagtggtccaggctaagagcagctacactcatgccctctctccggtgagggtttaaactgatagtggcgaatatcaaatcggaagcaaatgcaaccacacatctgcaaaacaatggcgggcgacgcatgacaatcagatagactgcaagagatatatcatacatgtccaaacaaacgctctagttgccaatgttaagacaatctggattacatttcaactatatcaactggtgatacttaaatatcgctgataggtgaattccttggaatgctaaaggtgaacgctacaataattcagattgtctagatatgaataagtaccaagtttttaggcggctttctatttaataccactgaagtagag

SEQ ID NO: 22276 - DNA, 572 bp, Arabidopsis thaliana columbia
catctagactatccccatgctatgtggccagcagttattgtagacgaatccattatcggagagcggaaaggtctaaacaacaaggtatctggaggaggatcactcttggtccaattttttggaactcatgattttgctaggttagtcagcgtttcctatatacttaaaaaatctcgtttttctactgagatgttgagatcaatgttacacattatcaagctgaagttaacatcctttggttttatagaataaaagtaaagcaagcaatctcatttatcaaagggcttctttcgccatctcacctgaagtgcaaacaacctcggtttgaagagggcatgcaggaagcaaaaatgcaagtccctctcgcttttctttggcattctgctttcttgactttccagtacatgttgcattaacaattagaccaatcatttcttcatgatgtttcattttgaaacctggacatgttacctgtcctgaaatttctgttattttgcctcactcaggtatctgaaggcacacaggcttccagaaagaatgagtcaacttcaaaagggagctgattctgttga

SEQ ID NO: 22277 - DNA, 663 bp, Arabidopsis thaliana columbia
tgaggttgcagggtgagaagctgctcaatattgagtggggttatgcagtactggacgaaggccatcggatccggaacccaaattctgacattactttggtgtgcaaacagttacagaccgtccatcgaattattatgactggggcaccaatccagaataaactaacagaactctggtccttgttcgattttgttttcccgggaaaactgggggtcctgcctgtgtttgaggcagaattttctgttcccataactgtgggtggttatgccaatgcttctcctttacaagtgtcgactgcctataggtaaattacctggtctttcttttgaatcacttagttaactcatcacagtttgtgctctaaagaattcttgacaatgtgcaggtgtgctgttgttctccgtgatttgattatgccgtacctcctccgccgtatgaaggccgatgtaaacgcacatcttacaaaaaagactgaacacgttctcttttgcagtctcactgtggagcagcgatctacctacagggcattccttgcaagctccgaagtagaacagatttttgatggcacaggaattcgctttatgggattgatgtgatgcgtaagatatgcaacacccctgatctacttgagagagacaatctcaccagacctagattatggaa

SEQ ID NO: 22278 - DNA, 485 bp, Arabidopsis thaliana columbia
  unsure (1)..(485): unsure at all n locations
nnnnnnnnnnnnnnnnnnnnctaaagagctgtaggtaaagtactgccagaactgaatggcaaactgactggtatggcgttccgcgttccgaccccgaacgtatctgtagttgacctgaccgttcgtctggaaaaagctgcaacttacgagcagatcaaagctgccgttaaagctgctgctgaaggcgaaatgaaaggcgttctgggctacaccgaagatgacgtagtatctaccgatttcaacggcgaagtttgcacttccgtgttcgatgctaaagctggtatcgctctgaacgacaacttcgtgaaactggtatcctggtacgacaacgaaaccggttactccaacaaagttctggacctgatcgctcacatctccaaataagttgagatgacactgtgatctaaaaagagcgacttcggtcgctcttttttttacctgataaaatgaagttaaaggactgcgtcatgattaagaaaattttt

SEQ ID NO: 22279 - DNA, 642 bp, Arabidopsis thaliana
atcccctaaagaactagtataagattattatcactggttgtttcccttacatgtctcctaatcttatctgtagggtaatctggatgatgctttctctttgtatgagcaagtgattgctgttgaaaaggggaaagaacattccacaatactgccactgctgtatgcgcagtattcaaggttttcatacttggtacgtcacatggtctctacactactaagactttatagtactgatttttgaactcgttttgttttgttttcgtgatggagtatgtagtgatactttatagtactgatttttgaactcattttgtttttgttttcgtgatggagtatgtagtgatttggcttcttacttttcttaatattactttcaggtctccagggatgctgagaaagctaggaggattattgtcgaagcacttgaccatgtacaaccgtcaaaacctctcatggaagcactgattcattttgaggcgattcagcaccaccaagagagattgattaccttgagccacttgtagagaaagttataaagccagatgcagatgccaaaacattgcaagttccctgagagggaagagctaccttaatatatatagaggtaatggaaagaagaagacattcttgtttgacatgatg

SEQ ID NO: 22280 - DNA, 1031 bp, Arabidopsis thaliana
  unsure (1)..(1031): unsure at all n locations
cttgaaatcatctacaatggaaataaattccactgaattgtaatccacccaaatatcatttgcttcaacagccgaatcaccaaaaatatcagcaattgacgatgtcatcaacggatcttccaacattttactaatcactccctcttcttcatgatcagcgttataaccacaaccaaaatggcttctgatcagtaacaattctcttatttacctttttgcaattcgacttctcagtaacttccttctcttctggtttacgtacaccgcacggcttggtcaaatctactaggtctttttcctgtttaactaaacccaatcgttcatcaaactctcttttactcttttggtaagcttctgctgcttcttcttcagtaggaaacgttccaagccactttctcttcttctcaaacggatttcttatctccgccgcaaatttcccccacggcctccgtcgtacgcctttgaaacccgacgacgttttccggtttccggctgctttattccctgtagaattcgaaacgttctcataccttttgatcagcgtcgggacacagatctttgagacgtaacgtttcggtggttttggtttgatctgacggcgaggattattgccggagatagattcatcgtcgctagaggaatcggtggcgtctggatcattacagattacactaattgttttaatcaagttgagatcgatgttctcttctctgaaactgatcattgttctctctccgactaaactccggtactaagtaacagaatcttacaataaaaaccaaaaaaaaaacaatgtagtgttttgagttggtgatagagatagagattaaaaacctaaacatgggagaaaaacttgaacagaaaacatagttaagattcacatcgtacgttgttatggagagtgtgcaaaaataaaatcaaggagcttatggcaaactaaggaagacgnacatagaagacgttataatagttatgagaactgtttgttccgtnttaaatttgttagatatacataaagtaaactgtagtaa

SEQ ID NO: 22281 - DNA, 545 bp, Arabidopsis thaliana
ttttgtttgttaattacacaaaaacatcgattatacatgaatttattgattatgtatatttaaaatttatgtacttagattcctgtatttttagatacgtttcttctagacaagtacagaattcaattagattaattttccgttcttatggaatagtaagattcagttaaaggaaagaaaataaataaatgtaactagttaaaaaggaaataaccaaatttgtaaatagatcgacggctaagatcacaccatgaaccaaaaataaaggtattttactattttattgataccaataagactgaaaatagaaatcagatgtatctacagtatataaatagatcctacagtttgcaaggaaacacacaacaacaaaaaaaaacaaatttggttcctttttcttcttcagacgagtaatatcttttgtcttcatcatgctctattcacctaagaagctgttcttgttcttcctctcgtgcattgtgctgtatgcaactccaacaacagtggcttcgtaccgcagcaaatagcatcggcttgaactacgg

SEQ ID NO: 22282 - DNA, 1146 bp, Arabidopsis thaliana
tagttaaatgaagatctagaagaactagatgatgctaataatgatgatgataataattttgtcaacaaaagggtatgacaacattagtaatgatctttgtggctgcgcttcaggcaggttgggttctcctaaaagcagtatgatggtgggacaagttggagcctgatagaggttgttgtcagagatctctggtggatacaagaagacacaagtatgtcaaaagagtgtaatgcgcacacgtcactgcttacgaaacaaaaacatgtctcaaaataagaccgttgactcgacggccatgtggctgtatgtcaagtgatccaacaactataagtctataaatgtggtccatatttttccctgcttttaatcaaaaattcagaggaaaaaaaacacgatcgagaaatggagaataatccaagaagctcatcgtctctccctctagccgggcgtgtagctatagtgaccggagccaccagaggcatgggccgtgaaatcgcgattcacctccactctcttggtgcaagagtcaccatcaattatgtctcgagctcatcaaaagctgaactcttggtttcagaactaaacgactcatctcaattaaagtcagcgatcgcagttaaagcagatgtgtcagacccggaccagatcaacaacttgtttgatcaaacagaacaagagttcggatctaaagttcacatcgtcgtgaattgtgcaggtgttttggatccaaagtatccatctttatccgagacgacactagaagatttcgataacacattcacaataaacacaagagggtctttcttgtgttgcaaggaagcagctaaaagggttatgagaggaggtggtggaagaatcattatgatgtctacatcaatggttggtggtctcgccccgggttatggagtttacgcagcatcaaaggccgccgttgagacaatggtgaaagtgttggcgaaggagcttaagggaagccggataaccgcgaattgcgtggcgccagggccggttgcgacggagatgttttatgctggaaagagtgatgaaacggtgaaaatgcttgcaggggcttgtcctatggggaggatcggtgagcaaaggatataccgagattgtagggttttggccggtgatggtggtgaatga

SEQ ID NO: 22283 - DNA, 536 bp, Arabidopsis thaliana
gacagagacgacggagacgccgcgcaggacagcaggtgatggtggggctttgttattatatcttgtcattttaagtattattatatagtatttattcatactacgtggcactagttttatccactagaattggtccacctgtgaatcgaccgtcaaaataaacagatgtcaaacagagttttcaagaattgtcgactctgtttttgtactgaaaagtgaggtttcatatatataacctgatacatcagtagactatctacatggatacctctcgcgagagaggattcgttagcaaaaaatggtgtgatcacaatgtgacctgtacaaatattttttttctctatgcggatgacttgtaagaagttaaggacgacagaagaaaacgcaactttacataggagtgtcaatgatggatcgagtggcttttcttccagaggaaactgaatggtcttgtcattgtctttcttctggagattgatttagtcaaaggtgttacttctgactctggagctgaacctggcgcaggtatagccatt

SEQ ID NO: 22284 - DNA, 414 bp, Arabidopsis thaliana
gtccttcaacctcttcaaaaatacctcagcagtcgttttgatatattctggtagaacttctcgaaataccttaatatcgaagaataaatcatttccatcaatatctgaatgtgctccatgcttaagagacacttcaagattggtacataaattctttaagctctcatcgtttattgagttctattttcttagatcaaacaaaaaagcaaaagttttttcatactcttaaaattggtctgaccttgttttaagagaaactagagtttgatccatgattttgatgaaatactcgattctaaacttctcctagtcgctcagaattacagtttcatcatcaacttgtctttgctcttcatcagaataggttcttcttttatttacgcgcttcctttccacatggaaaatgagtttgat

SEQ ID NO: 22285 - DNA, 335 bp, Arabidopsis thaliana
gtgttgaaaagtagactatgtgtgagcataactgtttctaataatttcaggaatttaggctagcacatccagatgtcacagttcttgatcctccagatgcaatactacatctccgtaatcgtcagtcaatgcttcagtgtgttgcggacatgaatctgtctgatagtaatggtaaatattcatgtgtaatcacttgctatttgctgttagggacgctaaggttaaagattttattagtagagttctgtgtatctgagtagtagaagttgctctgattgtgcaggacgcgttggtgtgcccaagcaattggtaattaaaaaggatgcatcttcaat

SEQ ID NO: 22286 - DNA, 531 bp, Arabidopsis thaliana columbia
  unsure (1)..(531): unsure at all n locations
caactccaccatgtcagtcgcatagaatatggaacccggctcacggccaccatggcagatctccataacgttgagcgtagaaccaatgttgtggggaccgtggagaccaatcaagatccgaagttcagttgttggatcgagccattgaagcgccatgatgtgcacaggcacccgctttctagcgcgtttgatgatgtccatgaccacgaatggggagtagaccaccgtgaagacaatgataaatatgatcaatgcaccggtcgtacttttcaccctgttagtctgcatttgcatcaaacgaaaaagacagagagtaaagatcttactttgatgatagcttaaataacaaaacataaagagaaagcttgatggtacccgaatggctaaagctgccaagtagacatgaaaatggcctttagtggtcaaaagcagtcctaaggatgcggtttccgggacatgataaccgagtagtanacacacaagactgttccggtgacttttccggctataacagtgccaagaagagaaaag

SEQ ID NO: 22287 - DNA, 1083 bp, Arabidopsis thaliana
ctaaaggctgaccaccggcagataaccgttctccagcaaggagttgataagcttaggcgaacctggctgcgcagtccaacatgacctaactcttcatcaagctgggtcactttgacgctgtcgccgtcaccgagaaacaaacctacggccgcaatctgatgtttcttcgcccatgccaacagggttttatttgccgttcccgccagtgctccggtgataatgtctatctgatcagcaggcgtcacccgcaggccgtttttctttttcaccggcagattcagccctttcatcagctcatccaccacgcaaccgccgccgtgcacaatcaccagcggacgctgaatgtgactcacgataattcaccagtgcgctaaacagacgttccagcgcctcttcactatccagcagtacgccgcccagtttgataattaatggattcatcattgcacccttaaataagagactgcgtttccgcatagccgaaacgaatattggcgcactgtaccgcttgtgccgccgcgcctttcagtaagttgtcttcggtcgccacaataatcagatgctcgccctgaacggcaaacccgatatcgcaaaatggcagcccaacgacatttttcagcgccggaacgcctttgtcatacagccgcaccagcggtttatggcatacgcctgctgtaacacttgcgcgacttgcgcctgggtcacacccgatttcaggcggcaggtaatggtttcgagaatgccgcgcgggaaattgcccagatgtggggtgaagataacgtcagcaccgaggtgtgtggcgatctctggttgatggcgatgagtaaagacgccatacggttgcaggctaacttcacaaaagctgtttgaaatggccgctttacgccctgcacacgtcacgccgctggtggcgttgatcaccggccactgattgaggtcaagaagatcggcatcaatcaacggtttcagcgccagctgtgccgccgtcggataacagcccggcaccgcaatcaaattcgcttcttttaatttattaccgcaccactccgccagaccgtaggctgcctgttccaacagctttag

SEQ ID NO: 22288 - DNA, 3112 bp, Arabidopsis thaliana
tttctgggaacttcattttgtctttgccttcaaaattcagtttgataactcagtcgtattataattaaataactcagccactaaataacataatacgaatataactcagtcgtaagttaacatagtttatctataactcagccgtaacaggtaaaatgaactcaactcggccgtaacatgtaaaataaccgaacctttccacttccctaattatataactcggccataacatgtaaaatgaccgaacctttcgacttccctaattatataactcggccataacatgtaaaatgaccgaaccttttgacctccctatttaaataactcagacgtaacatgaaaaacggccagaatattttggcaaataactcagtcgggatgttaaataaatagcaatattatagtgctgagagtctacaatgtcacgaaatacataccacggttgccaaacaagggaaagaagacacatacggagtacaaacagtactatgcacggcaagttttaacattgtgccctgtttctttacatcgagaacatgcgtgttccttcctagggcgtttagtctcaacggcgacttctagtgctgatttcatccttagtttcttgggcctgcctggctggttcgcaacaatcggaggcaaacacggttggtcaattacaatttgaggaacagggacttctgtatctgaaggcatgattgcaccagcgtacgcattgaccaaatgactgctcttataataaggactgcacagggatatacgagacacacccatatgctctacagctgcgattgcatggatgcatggtaatttctctttgtcgaaaagacgacatgtgcatttttttcatccacatttacatcatgcaaagatgctccataagttacttgaacgctggaagcatcaatcgtttgtacatctagaagtcttgacgaggtgacgcgggtctattagagagaagagacaagaaacaaaacaaatacgttatggctaagttattccctttatggctgagttattctcgttatgactgggttatcgttattcgacgactgagttatgcactagttacagctgagttacctgtaagagtttctcaacaccacgtgtgagctgagtatgctgtttgctcgcatcatctctccgttcagcaaatcatcttgtcatcatctgtcttatcgcttctaacagtcgaactatgggaagatttctgccttgtgacagtgctctcttcattgatttcgctatattcgtagtcattaaattgtatattcgtaaacatgaaaattaggatcatttccttgtctagatgcacgaaccctccaaagacatctatccacccagcactcgtaagataactgtagtcttattagaagttggtacatcaaaatcaaacccatcccttatcgcaagaagtttgagtcgatactccaactcgaatttgctacgatatttttggcctaccgcgagtgttagcgtagacagctccaactttaaatcagtcaggctcccagcagatccgatcaattccatggtctgagatctcttcgaaggagaaggtttcgatgaatcttcgtcattattattaggctcgccgtatatagcaaagtcttcatcatcagatgaggcaccatcggagtcgtcgaaaaaatcaaaccggctagaaaattcatcatctgcttcttcgtcacttgcttctttgtcagatgcttcatcgacacctgattcatcgtcccctgcttcatcgtcccctgcttcatcgtcttgataatcgtaacagacaccttcaaacccccgacccggaacttcgaatctagattctgctcttgagtcagattcaatagggcgtttcgaaccccttcctcttgatccgtccttccgactaatatcacttgaatctttcgccgtaaactccacacagagacgtagctgctcgaatttcgtcaaacctagataacattgcaactgtcgatcattggagatataaactggtggagtatcgaagggcatagttttcagagtcttgttggagaacatgtaactcagccgtaactgatgggtcgactgattcactccgtaatcatcgaccaccatcttcaaaagactatcgtaaactgctctttccgcttctagctgcacaactctacaccctctttcgtcggggttaaatacgaatctctgtttctttacccacgaaccggaaacaactatgaccgtagcgggaccagccatatcaagagaaagatgaaagaaattgaagatgtatgagaagatgaatgaagaaaagaaagttccggtaatgttgtaacgttcaggcggtgaacacagtctgggaaaacgatttaaagaagcaagggacgtttcgtatttccgtcgaggatgctgacatggaatgatgacatggattattacagtcgacgccgttttgaagtgatgacgtggcaagtcagccaccaaacgaacagttcataacacagtcatgaagcaaatctttaagtcagccgcaacatgaatactattacagtaattaaaacaggaaaaaaaacaaagttaattcagccgtggtatgtcgtaactcaactaactcaaccgtaacgttcaacaacttggccataactgcatgatattatagtaattaatcttttgaaaataagtcagccataacatggctgagttatatcgtaatccagctattggcggctgatttatagcacttgaccataactcagccgtcacatccttccataactaagccaatcaaaactataactcgaccgtgtcgaggaaataagtcagcctttttctcataactcagccatattgttggctgggttatcgtataacttcttataactcggccgaccatccttaactcaaccataccgttgcctgagttatactataactcaggcaacattttacaactcagccgtaacgtctggctgagttatactcatacttcgccgttttgttatgactcatatattcttgacgtaagcagccgcaacataccgtaactcagccggctgagttcatttaatccacgtcagcaaattctgacgtggcagtggcattccctgtaattacgttttttccggtaacgtttagtagg

SEQ ID NO: 22289 - DNA, 2074 bp, Arabidopsis thaliana
tcatcatagatgtcgagtctctccatggtctcgggatgagggtatcgagttcctaaaaactcattgcgcttcagcagcttgtagtacttatttcgaggtgcacacttctccgattccatatcatcatcgcctcctttctccgtttgatcatcttcctctggtgaagccatatcttcctcggagtcttcatctaccagctccaacctcctccccacgggcttcatcccttgagtgatatctgccttgttcctcgagaattcccttttagaggacttaatcgaccttcgggatcgagtatttccagctggagagctgaaggtctcttcctgcatcacttcctcctctttgcttgattcactatcatcgagctcaaaacttgcttgttctctcctgctcgaccccaaaggtgacggttcagaaggtcctcgagctgctgcatgcgaagaaggtgttgggtacctcttcgatggggagagagctttgttccgaatccttgacaaaatcgagctccggttcattattgagaacaaaatgagagaaactcaaaaccaaaattccgtaggttaggagattgaatgatggaggaaacaaatggattgcaaaaagtttttgataagaaagggaagtgaaggagataaagagagaattgtaaggattcgagaatgatgggagttggagagatgaggttgttgagttcgggaatcgcaatagggggaccaaagtgattatgaggggggggggcaagaggacacagggacagcaacgtttcaatggggggggaaaaaaccacgaggcgtcagtgtctacgaagagggactctttggtttcttcactcgatcggacggtgagaaacgctccagcattaattgcttgatcaaacggcccagaatgaacctcaagaagttactcgatcaaacggtggtgatgctcctctgatttggtcatccaaaccaacggctaaaaatactcctcctcattctactcgatcaacaattgagatttcttgacttgatttgaatgtactcgaccgttgactcccttagggtcactaaaacaaacctgaaacacttaaacaaaaacatcaaaaataacaagaaaaatagaaagttatttacacggatagacatgggacttcctcccaagtgagcttgttttaagtcactaagcttgactcttgtagaagacttactcgactttcgggatcgagtatttctagctggagagctgaaggtctcttcttcttccatcacttcctcctcttggctcgattcactatgatcaatctcgaaacttgtttgatgtctcctactcgaccccaagagtgatggttcagaaggtcctcgagttgccgcatgcgaagaaggtgttgggtacctctttgatggggagagagctttgttccgaatctttgacaaaagcgagcgcctattcatcgtcaagaacaaatgtgggagaaattcaaaaccaaaattcaatagattaggagattcaatgagggaagaaacaaataaatttgtgaaatgtttttgataagaaagggaagtgaaggggtaaagagaggattataaggattcgagatgaggatgctttggtatgggagttggagagatgaggttgttgagtttggaattgcaatggggggaccaaagtgattattggggggggggaacaagaagacaaaagggacagcagcatttcaatggaggcgggtcacgaggcgtcggtgtctacaaagagggtctctttggtttcttctcttgatcggacggtgagaaatgctccatcttcaattactcgatcaaacggaccaaaacgaatcgcaagtaatcactcgatcaaacagtggtgatgcttctctcatttgatcattcaaatcaacggctcaaaatactcctcctcattctactcgattaacggttgaatttactcgaccgttgactcccttagggtcactaaaacaaacctgaaacacttaaacaaaaacatcaaaaataacaagaaaaatagaaagttatttacatggatagacatgggacttcctcccaagtgagcttgttttaagtcactaagcttg

SEQ ID NO: 22290 - DNA, 2229 bp, Arabidopsis thaliana
cgttctttagtccgaaggcatcactttgtagtagtacgttccacattccgtaatgaaggatgttttctcctgatcctccgggttcatcaggatttgattatatcccgaaaaggcgtccataaaagacagcatctcgtgccccgttgtggattcgacaaggcggtcaatgtgaggaagtggaaaaaaatcttttgaacatgctttgttgaggtcggtaaagtcaacacaaacacgccatttgccattctttttcttcacgaccacaggattagcgagccattcaggatatttgacttcgcggatccgaccgacttcgaggagcctaacgacttcgatattcactgcctgtgctcgatctggaccaagcttccggcgcttttgttttaccggtttgaaggttggatcgacatttagctcgtgcgagatcacctccgtactgattccagtcattttcccaactgtccaagcgaacgttgctttatttgttttgagaaaattgactaatttactttggaaatcttcgcccaaattcgctccaaagccaagaagctgatctgggtgatcgtcgtttataactacccgctctacgaggttgtcgcctacttttttgattggatttggggacgcttcgagctgtggttgctatttgatcttgagtttatgcccggtcatgtagcacattctagaggtacgttgacttcccaggacttgttcaattccacctggggttggaaacttgacacactggtggtaagtcgacggtacaactttcatctcgtataaccaaggagttccgagaattacgttgtatgcggcaggtcggtcgaaaactgtgaactcgaccatcttgacaactccttgcgcagttacaggaagaaccaccgtgccaagagacattgaagtttcgctggtgaaagatacgagtagactcggagctccttttatatcctttttggagattcccattcgcagcagagtatcgagaaaaattaaatcgactgagcttccagtatcaataagaattctttatatttcgcagttcgcaatgtcaagagttatcaccagagcatcgtcgtgcaggttcctgctgcgggttttcggagttcggtaggttttttggtggttgcgggctgaggcgcctttggtgcagcatttgaagcactgaactttttggctagaaaagcccgttcttcttctgcatttatccaattcgttgctcgatgaagagcatcttgaatcgtctcaggacggtttactgttaaagattcacggaatcgtgactcatgccaaagaccatttttgagtgcggactgagctgctaagtcagataagctgggtatttgaaccatgatttccttgaacgcggtaaatatacgtccgaagtggttcgtcagcggattgagaaaaattccaaagatgggcttcagtgatgtcactattgatgaagtattcgtactgcttgatgaacgcagtagagagttgcttaaaattgtcgatcgagccctcttccagttgggtaaaccaggtgagagcaagcccgaacaaattttccgagaacaatttgcaaagcccggcatcctcttcgtgcggctctagggggacccgtccggcgatgacttggaaggaagtcaaatgctctttcagatctccttttccattgtaaaccggaagtttgaagtctcggaattcacggatacgcaacttagagatccttggggtgaaaggtgttctcctcgttgcctcaataaccttctccacttcgggagccgaagtagtggcctgatggacttttgcgttcatggcccagatttgatcttgaaggttttgaagttccgaattgactgcgtttgatcaagtggaactggcgtccgagctatcgccctatctgaaactgcggcaagtcgtgctggtgaagacgaggtgacaggattctgagtcgatgtcgctccgacttcaaccggtggcggtggagtctgctggccagatgcttcctgggaattttggacgctcgggctgacggtgccctgaaaattgagtcgcgttcgagctccgcgtacgcgttgtgagccgatctgatttcagaatgattagtcgccaatgctgcgtgttggccgttgcattgctcttggaaggtcacgaacttgttggagagagacgtcacacaagctgttgtcggtcagtcttctcggacaactgttgaagcagctgcttgatgtcgtcgagggtgga

SEQ ID NO: 22291 - DNA, 2840 bp, Arabidopsis thaliana
taaagtactgttgcccatggtcatttactctattctttttggtttcatggctattttgtacatatactcaaatattaaaacgtaatctatatatacatttttgcagccattttgtgaaataaatcctggagatgggacttatttacaatggctgctactggcatttattatttagttttaaaaaattttaaaaagatattaaccaaacgatatctggcctaatttgtttctaaaaatctgtacacaatctttccatatatcttttaaaaaaaaaatcgtgaattttactccacaaaatatgcataaatccgatttataacaaatatttatatcaacattttgcatagcaataaaaatactaatttataataagtaaaatattcacataaaaatcatatacacatataggaaaaaaaaacttgtcagaacaaaatgtgcacttcttcaggttagcataaaggctttcattccgaagcgttttgagaattaactctaagtgttgaatgagatcagaatagctcttactgtaaataagtatgtcgtcaaagaaaacaacaacaaatttaccaataaaagaccttagaacctggttcattaagcgcatgaaggtgcttggcgcgttggttagcccgaacggcatgacaagccactcgtggagaccttgctttgtcttgaaggctgtcttccactcgtctccttctctcattcggacctggtgatagccactcctcaagtcaattttggaaaatatgatggcacccctaagctcatctaacatgtcgtctagtctcggaatggggtgttggtacttgatggtgatattgttgattgcacggcagtctacacacattctccacgtgacatccttctttgggaccaataggacatgtactgcacacgggctgaggctctctctgatgtaccctttgtccattaggtcacgcacttgcttctcaagctccttagactcctccgaattcatcctataggcgggcttgttaggtaaaccacagcctggtacaagatcaatctgatattctatgccacaaatacgtggtagtccgggtggaatctcctccgggaataagtctttgtaccgatctagtacacctagtacttcagtgggtagctcaggatcacctatccttgtactaagacattctttgtaaaccattagtagcacggtgcccttgcactcattagttttacaaacatctgtagagcttaaataaagattagaacttcttacctcgtcctccttggtcatgtgaatttgtaagtcataaacttctgagggactaagaggggcgaggttgtacttacggtcattaaaggtaaaagagtaatggttggtgcgcccattgtgatatgtaattcaatcaaactgccatggtcgtccaaggagaagatgtccagctctcattggcactacgtcacaaacgacttgatcgtggtactttcccacgctgaatgatacaatcacttgttaatcgattttaagttcagtattgtcattgagccacctaagcttgtatggtctcgagtgctttgttttctgaagacctagcctgtctaccatgtacttgctagcaacattagtacatgaacctccatcaataatcaagttacataccttgttctttatggtgcatctagtgtggaagatgttttctcgttgcactttttcttcggggttaacaaacacactcaatgtcctgcgaatcacaaggagttctcctacatccggatactcaacgtcctcatgctcattagaatcctcttgctcatcttgtgactcatagtcaccactaggagtgaggatcatcaccctttggttcggacattctctcaccatgtgtcccctaccttgacatttgaaacaagtaatgtcacgagaaggagatggattagtactagagaacttacctggttcgggcctagaggttttaggtgcctcattagacttgttcttgtacctaggatcactctctacggccttgcctttgtccatggctcggttgttgcttgcattccaaggtgtgttgtttctggatcggttgcttaaggatgccttacgcctgatttgctgctcgacttgtaccgctaggtgtagcaactcatggagtccattatattgggctctctccacctttcgctgaatcctctcttgtaatccgtctatgaattgagccatgagagcttcgttggattcctctaggtccaaggcgttcatgagcttctcaaactcttcaaagtactcatctacggtccttgttccctgagacaattttctaaaacgtttttgtaagtctctatgataatggtcagggacatacctcaaccttaagaggtacttcatgtctccccaagtgcttatgggaccaaatctttatctcctcctatcagctactgtcctatcccaccaagataaagcatttttggtgagctgagcgactgctaaggacaccttccgagattctccccaagtgcttatgtacttcatctatcgctcccaatccatgtacacctctggattagattttcctgcaaaaagtaggaggtgttagtttgatatctcggttctgttcacgcggttctactcctcgtgcacggtttctcgtctaatggatcttctctccgtttatgttggcgcctcaaagggtcgggtggttgatcatcatcatcatccaagtcaggaaactcctctacctcttcgcgggcattcccacgagcctggtcttgcccgcatttcaaccctaggatggggctgctccaaacgacctagccgttgccttaatcctcttaactcctccgtcaaagtagccatcatttgcattacg

SEQ ID NO: 22292 - DNA, 1500 bp, Arabidopsis thaliana
tttagttacgattagaaagacacttttctagctttatccatggatcctcttgttatacttattgaattgtaaatagtcatccaattcaaaaattatgtttcggaatttcataatccaaatttacaattgattagagtctttggatataaattacgagaatctataatcttccttgaatctttcattgaaagggaaaggactaaatccttttaagaaataaaatttttgatcggaagattaatcaaaccgagagaccctttaactattaaagggattaaaggaacgaatcacacttttaccactaaactatacccgctacaatgcaattattgcatataaattaaccttttgtcgaacaaagtaatcgggggtgtaataaaaaaatctgaaaaaatttagaaaaaactagagttgacttaagaaaattagtaaaagcgaattcaattccacttttttttttatttcaaatctttttttatctaaaaatccatcggatgagtctttttaattttaacaaaaaaaggcccggctggggactgaccaggccaggctattaaaataaaaaagatcttttacttgtgtttttgttttgacgagacaaaataaaaaaaggattctctatttctatgattatggttttatttatttcttttttgagttcgcgccttttttatctaatctttagctaaatttttaatgtaactagaattgctgagaaagttctataaaaacagttatataatagtaatatatatattatataatatatattatatatatattatatatataatagaggatttatataatttatatataggatatatattatatatatattatatatttaaatataggatatatatatttatataatcaaataatcaaaaagaatatatatatatataataatataataaaatatagaaaaaaatatagaaaatgaaaaaaaatatatatatatataatataaagataaagaatatctataacaaaaaaagaaagctttttaagaataaagtggagaaggttctttttcaagcctttttttttttttatggaacctaattaaatatcccttttcgattaggagagatggctgagtggactaaagcgttggattgctaatccattgtacgagttaatcgtaccgagggttcgaatccctctctttccccttctccttttgatggtgtgtaatagataaaatcctaataaaattcgagcatttccacgaattaaataaagcaataaaaaaactttcttttttattcttcacgtcccggattacgtcctggatcattagataggaatccaaatatgaagagagaaacaaagaatataactacagtgtatacaaaaagtttgagagtaagcattacacaatctccaagatcttactaaaaaaaaagagaatagattctctatttttatatcaaatatctaattttgatccaataaaaaaaaaggtttcagaaagttatttgtaattaagataat

SEQ ID NO: 22293 - DNA, 2696 bp, Arabidopsis thaliana
ttaaatataatggtaggaaaatagtcggaaacattttcgtccaatttcctacaaaactatttttaaaggagactcaaaggaaaagcgtaggaactgttctttccagttgtaacaccccggtttcaggaatatggtggtgcatccagagagatttaaaataattgatttggtcatctatgtcactaaagtgcacttatcttttcggttaaaggtcttgagagaactccagagttaagcgtgcttgggctggagttgtctcaggatgggtgactttccgagaagtgattttcgaacgatacgagtgaagacaaagtatggggaaagatcgtgtggtgacttgtagggtcggtaacaagtctttaaagcctcccgaacatggcgcaccgactgtcggacatgagtgggcccatggggaagagagaggacgtggggcccactagtaggggcgattggggcgttacaaatggtatcagagccgaacccagatgagtgtggaataaagaaggcaagcaccatcgggggttacgatcttgttgtgcaacgaggacgttgccatctgttagtgtggatgaattgtaacacccagttttaggaatatggtggtgcatgcggagaggtttaaaagaattgatttggccaactatgtcaccaaagtgcacttatctttttggtcaaagatcctgagagaactccacagttaagtgtgcttgagctggaatagtttcaggatggatgaccttccgagaagtgattttcggaaccatgcgagtgaggacaaagcatgggaaaagatcatgtggtgatttgtagagtcggtaacaagtctttaaagcctctcagacgtggcgcaccgaccgtcggacaggggtgggcccatgggcccgagagaggacgtggggcccactggtaggggcggttggggcgttacatcagtttccttcgaaaataactttctaagagaaccgaaggaataacgtaagagcctttcctaccaaaagtttcgtaggaaaatcgttggtttcttaaaaatgtgataaacgaatttttgacaactaggtggaggaaatatataattaggtaaaaaaaaaacatttttcatttaagtaggtggaatagtatttattttggtaggaaaactaaaagaaaaaaaaatcttatataaaactatttcagagtccatttaacattttctaaaaaaacctcactccccaaaaatacaaaatcattcactcgtacaattcccaaaaaatgtaaaaacattcccttctaaaataccaaaatattatatattctcaccaaaaaatatctagatatatatatatacgctacaagaataaagccgatttactagggatgaattagccgctaatccctcgcaattgggttgaagcaaggcaattgcgaggacaacgagttccttccaaatcgctcctcgcaaatggtaaaaatcttgcaattttgagagggaaattatttctagcaaaaccacacgcactttgtgagggaaataaatggtagcaaaatttttgcaattgtttgatctagtacttcgagggaaagttacggtagaaaacaccttgcattttactttcttgtacttgcctcacaaaatttgcgagggatttgcgatattgtttttatctccttgcaaatccctagcagaatttgcgatggatttgccagtattcggcaacgtctttcttttctattatggcttgatttgtgttgaactagactctaattatcttattctaattaattacttattaattagacctaaattaacaaattaatttgatatttagcttaatatgatttctgcttctcaaattaactcacatttgaaaactgaaatttcataagtaaatttaaaatgtatactagaattgtattgtttgaaaacctaaacatttgagaattgtattgttttgtgatagaaataacaagaaaaaaaacattggttttaaaatattgctgatgtagaggatcctcgtgcggtgttagctagggtcgcagcagttgtcgtctcgttgtagagttgcggtactggagcagtaaccacatgtgcttcatttgcgctgaccttttatgtctctgtcgaggaactacctcaaagaattgcagctaaagctggatccttgtcggtaagatagtcaaacaggatatcgaagctgttgatcttctcagcctgagtttgaatgcaagctttagcggcagacaacttttaagaaagtagaaccggatcatcacgaggaagcagtggacctgcaattgctgaggatgcttcaaactgcagagaccaaccccataaatccttcctttctttcgcggacaccctacaaagatcacaaaaactcacaagcacacaacacaaaaaccatgagaaaacagatacaaaacaacacaaaagaattcagacacaacacaacacaacacaaagtaattcagacacaagacaacacaacaatagaaccaatagaaagacaaagctaatcagacacaagtacataacataaagcgtttaagacaacagacaaaagatatagcaattcagatacaacactacacaaactaattcagacacaacataacaacaaaaccaatagaatgacaaagctaatcagacacaagtacaacacaaagcgcatgagtaaacagacaaaagacagcaattaagacacaacacaacacaaagt

SEQ ID NO: 22294 - DNA, 2561 bp, Arabidopsis thaliana
ggcgatctgaaaaggtggagctcctcccgagctcgtagtttgaggctcttggttggtcgaaacgagcgtcccttcgcggcgccacacttgttgagttacttctcttgaactcgggtcgaggtggtagtgatctctgtcttcgttgcagctcctgaatctgaaccgccatgccatccattgctctcttcatcttcctcaccttcttcttcaacccactgaacaacttcctctgaaacttgcccagacctttgagcattcccaacttcttgtgaacttgaccgggatctctctctggatcggactcagcataatcttcaaagaaaaactgctccgctgcagcttcgcacgaatcttcttgttcatcaaactgttcagcttgactgaactcagcttgctcaaactcgtcctggccatactcggcctgctgaaagttactcggccgagtatgagcttcctactcagcttcttcttcattccactctgctccttcttcttgagactcacttcctatgctcggctctgcttgtagaggcgcaaggacattgactaagatcgattgaggaggatcaaagtcaatgttgttcccaatcctaatggtggtgaacttcttgcaagggagtgctagcctagagagacctagcgtggagtgcttgaacttgaagtagagttgatccgctggagcagacctatccaagtagcacttcctcttcaaatactccatatcgatgtaggttgctgtgtgagtgggggtatgaagaggaactccagcggctattaggatgggcgtgatcactcctccagcacataagcttcctccatagccagattggtggattccggctgcatactccctaaaaccaatcaagtgatcaatcaacaccaccgaaagggatgtatcagccctatccccttccatctctatcccattcctcgtgtgccccaaaatgaagcataaggtgagatcaagcaacttcagctctccctcattaacatggccggttgtcttcttcgggaagaaggcacttgcaatgcaaaggtggagatacctaagcaccgggctccttatcaacgaactcttggccctagatgacttgtaggggagtggaccggcgattgtcaaccatagatcaaggagctcgtccttgctgaagttttggcggattccatacttggtggggaacttgaaaatagcatccaactgcctaatgggaaccgagtattgaattccaaacaccatgaatgtgatgtaaccaactcccttatgcagctctctctccctttcttcagcatagaaatggagcttcaaagtggctaggaattggcagctctcagttttgtatccttcatactggtaggagaagaaggtctccagcttggccatctccatgaggtagtcaacatctctacatatccccaaagcttgcatggtaggtctatggggatatcttgtcccctcaaaactcagctccatgagatattggtagtgctcttctatggtaggttctttctttctcctcatggtgttccttcttctacttgtaggaactatcgggacctcttcatcaacttgcacatcttccttagatgcttccttctctatctcaggcacttcttcttctgcaactggctcggactcccagaccctcttgcctcttgctatttcctcttgagcagccgcagaacgaccctcagaggactccggggccatactcggccattgtactcggcctgtcatccgagtaaaaccaggactcgcaacttcctgattctttgactgattcttctcattaatcatctcaaaccctcttgccacggctcgagcagaggctctccttcttgattcctcgggattcatgatcttggggtgatttactgcaggtagtcaccacaaaataaccaaaggtagctcaaagtagaagagaaattgatgtttaaaaatgaacaaagagtgtaagagaggctttgaaaaggtttgtaacaagagattttggcaaaatttctgagaaaactagagaagtgagagcaagaacttgaaacgtttggagagaaggagtagaattcgaaatttttgagtaaagagagagtgtgagtgacttagcttgttgagtgtggttttatagacaagaagatttgatcctagccctccaaacaccttagatcatcacccttcatttggtcaaggggacatgtctcactatttgcagcagaatctttgaagggctttgaggagcaggatttgattagtggggcccagcaaattcgaattcaaattcgaatttgaattgtgttgacctcgcacgtgtgaactcggtcgacatactcgacgcgcgtgtcgagtaaagtgttgggcctgatgggcttctttttctgactcggcttcgggccgagtgctgcatcttgttgggcctttgaacagtgaggtccatactcgaccttgggccgagtggtgtgggccgagtactattcaatcttgggcctttggtcaattgaagcccacactcggcctgtagccgagtagcacggtcgagtgtggcctgaaattctctagaagtctttttccc

SEQ ID NO: 22295 - DNA, 2812 bp, Arabidopsis thaliana
catctctccagcccatacttcactcgaccacagtcccacttcaccacctctcattcatagccacttcactcgattcactgcatctctctcatcttcgctcattccaattctcaccaagtactcgatttcaaatcatcatcaacttcaccgctttacttcattcactcaacttcacggcaagagcacatccacttttcaagctcacatacatcactcgaccgctcctctcttgcctttcacagccactcgacctcgccaagacacaccgcctcaccatctctttaacactcgatcgcgagttcaccaaaccgaaaaaaaagaaaaaaaaattctttttttggtacactcgtgttcacttgattggtttgtatttttggtttgctgttactaacgtattaacgcttatttttgagtttcgtctgttttcaggtttcatcatgagtaactacagtggagaatcctctatggaccccgattacaatgtggatgaagctgagtcctggtccgctagacctagagagcaacatgtttaccagagcttcaaggataaattcgaacgctctacagcccgacgtaatcagagaagagctgaaatcgccaaaggaaagagggcgatgtcaagtagatatgagctgattgatgaggatatcgaaactgagtatgagccagagtcatgccgcaaggagacgaagctgctgaacaaacccgacgaggttacagtggaggagtatatcagattctttgagatgaatgacttctggggaacgaggtatccgtgctatgagactttagcccagctggggttactggaagacgtgcagcatctgttcgagaagtgtcatctggtgacactcatgtcttacccttaccctgcctataaggaggagacaatcgagtttctttccacgctgcaagtggagatgtatgaggcaatcacagactatgagctggataccatggggttaggcttcttgacgttcttagtgaatgaacaacggtatcagctttcgatcaagaagttggaagaactgtttggtttccctagtggaaagggaaccaaacccagatttgacagagaagagcttaaggatttatgggccactatagggaacaatctacctctaaactcggcgcgatccaagagcaaccaaatccggagtcctgtgactactttcagagatcggttgccaacgtcttttactctagggaatctacaggcaccgtgtctaacacggatatggagatgatagattatgcgcttacggggattctccgctggacgaagggaaagaatgtcttgagaggcgatctcaacaacgcaccaccagtaatgcctctgttgatccatctgtgtggatacaggaagtgggcgttgacgaacggaaagaagaaggtgagaggagcacaatgcgtgggtggcgttgtgacgccaattctcgaagcttgtggagtaccgctcaaggaaccagggttagcaccgaggatgatggacttggatcatttgcgcagatgtgagttcttggagtttgacatggctggcaactttcaccgctacaggttcgagcattcatcgattagaatcgccaacattcttctcccctgcattaacgctactaggattctcgagggcaggaacattgacttcaagcctgcgcttgaagaactttatttcgagggtagtccgccaactgaggagatcagtcataccgaacgagctacaacagaagatattgatgagacggatgatatagatgcgacggagtttgacacgagcatgtatcatttcagtgagcatatacctcctgcgagggaaagcaggagtttgagcgaagctcacagaaacaacaacaagctgtagaagtggtgcatgaaacaggacaagttactcgccaagtgcctcagggctatcaagtttatgaagaacaagctctgctgctcctcttccactacagcgattccgcagggacatctccctcaggacatgccttcgaggagatatgacgcacccgagccaagtcgacgcaggcctttgcctagagagcaggagattccgcatgtcccttcgaggcattcatcattcaagcctcgtgaatctgggaggaagaggaggaccacactcactcgatctagcagtaggagcgcacgacttctgcagtctcgtagtttacgcgaccgcggtgctggccgcagcagaaggagagaggtcgagtttcctcagagcggtgctggccgccacagagctgatgaggtcgagtacccacctgctggagctgatacggaacaaggaggttcgtctatggcctgggagcaatcgcaggcagccattgacgagcaactacgttcattcttcgactgaggtaagcgcctcacttcaccattgtattataccgtatgttgtgatttgtttcttcattttttgtttctgtgattggatttgtcctgagtactctcttccaagtttattcacacagtggactgtgtgatttaagtttgggggagggctcaggaagtgtgtgttgcactgtgtataattttgagtctgcattcatctaaggcatagaaaaaaccaaaaaaatttgaaaaatttcagaaaatgatttcataaaaaaaatagagtgttcatgtagttgcatcacatttaggatcgagtctagagtgtttcatttaggattgttgcatatgcataggggatgatgatgagatagccttgtaagcattttgattcaccgaataaactcagtgccctcgttgctagttgtctgttgcatagtcaatgaatttgaaaaaaaaaaaaaactgaaccatgcctaga

SEQ ID NO: 22296 - DNA, 1259 bp, Arabidopsis thaliana
ctattatgcgtgtaacctcaggactggggagaaggatgctggctttcttatctatagagtgctcaaacctgaaacgaggcatgtcgcctaccgttgcgaactccaggatttcgctgtgatgcaggtgcttgatatccattgcccgtggctcaagtccatcagatgtgattgggacttcacatgcaatcagaattagtgtcacaacacctccaacgcaaagagcgcctcgtgctctcttgtggttattgctgacagcccagctcttgtatccacataggtggatcagaagaagtatagagagaggtgtgtcattggtttcaccttgaagagacatattgttcttagtttggcggagagtgcctttgagagccatagcgatcatctccatatcagaattggtaacagtccctgtgatctctcggaagtagaggacattggctatagaacgctggaaatacctgatgacccgactgcgtatttgattgctcttggatctagaagaattcaatggtacgaagctgccaatagtgacccataagtccttcaactcttctctgtcaaacttgggacaatacccgttccattggggaaaccaaacaatccttccaagcgcttgattgatagagcctataatcctgaccatacacagagaatcgcaagaatcccaatccttcgcattcctaatcatcagaggtcataccttggtaaagctccacttcaagtgtggaaaggaacttaatcgtttcttcctcataggctacatatgggtaagccatcagagtgtccaggtgacaactcttgtacaggtgttgaacatcctccagtaatccaagctgtgccagcgtagtcgagcaaggatatcttgtgctacagaactcattctgcatgaagagcctgatatactcctcagcaggcaatatatcaggtttgtgcagaagtttggtggctctacgagtatgctcaggcatatactcgtcttccagatcctcatttatcagctcatacctctttgtcattgctctcttccctcgagctatctcagcttttctcctgaagttatcatattctctctgttctctttctggccttgaagacgttgactctatctcatccatgttatagtcaggatcaattgaagaactgccactatagttactcatgattctcctgcgaaagattgagaactcaaaactcaaatgttaataggttagtctcaatgataccaggcaatgaaatggacctaattggtcgagtataac

SEQ ID NO: 22297 - DNA, 571 bp, Arabidopsis thaliana
gtgtttaaagggtggattgatggaactactttaactgcttcaaaaccgggttctggaattgttgttgcggttaagaagcttaaaactgaaggttatcaaggtcataaagagtggttggtacgtctttgtttccttcattctcttattgattttgatcatgaatggtgttaacattgtttgctgacatactttttttttggatttgtttggttttagactgaagtgaactatcttggtcagcttagtcacccaaatctcgtcaaacttgttgggtattgtgtagagggagaaaaccggttactggtatacgagttcatgccaaaaggaagcttggagaatcatctttttagacgtatgtaaaacctgtgattaccaaagcaatccttttcagaatcagcaaatcttatcttcttctttatactcttgttttgtaatcttggtcaatgcttttttgatcttccaggtggcgctcagcagcttacgtgggctataaggatgaaagttgcaataggggctgccaaggacttacttttctccatgatgcgaaatccaagtgatatcagagacttta

SEQ ID NO: 22298 - DNA, 525 bp, Arabidopsis thaliana columbia
ggttctcttgggattgagtctcctacaatcctcaatgcactcttctcggttgcaaggtttttgtgcaagtgataacagagcttcctctgttttcaatacaagtttaatccgctctttcactttctctccatctgcctccttccagtcttcagcttccttagattcatgcttctcatccacagcattccctagaatgatgtcatcttgtataatcgactgttcaaataaaagagagttggttgtgttattcgagaaaccaccctcttcacgctcttgatcctcacttgaattttctgattgttcaagaactgcaaagttacatgattcaatgccttcaccttctagtaagctcactatctctgcactctcagaatctaaatctttaacctctcccaattccatctctatattctcagcctcagaatcgattactttgatatcagtttctcgagtgcttctattttctttcttctcatcaacatagatttccacacaaccatcatcacattcaccacttgcatggga

SEQ ID NO: 22299 - DNA, 585 bp, Arabidopsis thaliana columbia
cctcattccttttattgatagattcaaatctaacctccaaaacttcatgagttctcttcatattaagagaataaggctcactaaatttcaacttcacaacttcatcaacctcccatttctcatgaatagcttcaacaagcgcctgcgtaattcctgcagaacctacttttactctctcaaccattctcaaagctacattcctcaaccttttcagctcatgttctggtacaatcctctcagcttctactgtattactcttcctcgttctccatattcccttattattccctgaatctatcatccctctttcaccatcatctaaatctgaatctacagctctatcgctagaatcgttatcccttctatatctatctacagtagtaacatcgtgaaaactcgaactttgaattccttgctcggagctagtcgtaaagttaacacctttagacccaccattgttaacccatggagcagacatgtatccgcttggtcttgggaactccacggctcattcgccgaatagagacgattggaatcggttctcttatcagataaaccattcccagaagaaagatttgaacttga

SEQ ID NO: 22300 - DNA, 517 bp, Arabidopsis thaliana columbia
ttaccctaggaagtgcttctaagggttattccagaaggaccagaaacagagttaccattcaagaagattcagtcccggatataggtgaagacaactcggaaccgacattaagatctctttccctaaagccgatttgacgaaacagttgacgaacttcaaagcatctcaagcactcaacttcatacacaacctttatcccaaacgcaacaagaagttgtttgtcttgtgtagttatgagcactatgctccctggaccaaaacagttaaaatattctgcaagagcatctaactgttcgagtttgtcgacattgttagccacaagtagaactttctgactcatgagccttttttttatcaaccctgaggtcttcatcctcgagtaccctccttgaatcctgataagaaactcgtctcttagattcgacatttgacaatcgtgagggatccctttgacgttttcgagaaaacaatgactttggaatttcttaaagatcttttgataaacgtatctagctag

SEQ ID NO: 22301 - DNA, 395 bp, Arabidopsis thaliana columbia
acaacctggtatgctcctcacatccggtacacagctctttaacaacacaatagtggggttgcgaatcctgctcgaagacagccaccacacatcacctctcagcgcatccctcaccaccgcatttaaaggcattcccactgagatagggccaactggacccgtgatatcaatgagaggaccaagacctatccagttgtcttgccagaaacttgcggtttcccctgaaccaatatcacaaatcaggaaaggtcgagctaaaggtcttagcttgcagagcttcctccaaatccagcttccagagtacgacgggtttaaatcccaaaaacatttgtggccaatgaggttaattctgatgcacgaaacccagagagaccctgcagcagtatacaacaacc

SEQ ID NO: 22302 - DNA, 784 bp, Arabidopsis thaliana
tctaaatgaacaaaagcgtgatcaccgtcatgtgcctttcaatttcgtactgcggacccgtgtattctttcagaagagcttgagcttctccaacttcaagcttcattgacctatcaagaaacagatcaataagaaaatcataccaatattctccatacatcaaaattaaaacttttattcttcttcttaatcctagtaattcaccatttggttctctgtaagctcttgactccaggaatctccttaagatcaacaataaaacctctatagccactcgtataagaaacaccagaaacttccttcgatgtaagcagcttaactttatcattctccatagcttttctaaaatcttccaaactcatctttggtaaatctttcacatttttctcaaactcctcttcttcagataactctggcccaaaaacttgctccggaacataaagctttcctttgtactccctcaaaatatcactcaaataaacagactcttcgcttttgtctgtctctgttttcttcttcgaatcaaacttccttttgataaattcaaacgcacccgtcgccgcattggtgcctttgcttaaatcttctctctccttcagattatacagcttatcaccaactcggtaacgaggttccacttggctaggattctccttcaaaaccctagttacgaaatcgtcagcagcaggggaattgttcgtctcgccggagctagatgacccagttttcaattcgcacaaaactgtaaacgaccgacgcagaattggagctctccatcgagttt

SEQ ID NO: 22303 - DNA, 444 bp, Arabidopsis thaliana columbia
tactccattatctcgaaaataacattgaacataatgattcaatgagtttaatttaccctttcgtactctctctctttgatccgatggtcataatcacagaatcgagatttcggatctggatctaagcatttatgcgtttaaattcctagatctactgaatcaattctgcgtatttaaatgtttataatttcattcttcttaaacgctgcgtttgatcctggcttcgtacactcccaagaacattctcatcaccggaactgctggtttcattgcgtctcctgtcgccaaccgtctcatacgaagctatcctgattacagaatcgttgtgcttgtcacgcttgattactgttcgaatctcgaggatctcgatccttctaagcactctccgaacttctcgtttgtcgatggtggtatcgctagtgtctgcttggtgagtcatcttct

SEQ ID NO: 22304 - DNA, 532 bp, Arabidopsis thaliana columbia
gattgtgattttttttttcaatctttgagctgtttcgagtcatggcatcgttgagtccctgtacgacagagatttgacttcaattcagacgtgtctgatagagtttggtgcttagtcctataacttgtctgattctctatttagctactagtggttacagagacgtgtaggtacattgctacggtttcaaattaccttaaaagccgaaattctatatgctatttgaacctaaatgcaagtttcttgattgcacattaggagatgcaatcttcgaagctttgagtttgttgtaatgttatttgagcgtgaggctacgttctgctttctaacatcatgtttacaactgttaaaacgaagtgaaatagcttaaccagttcttgtttgcatttctggtctggagattttatttccttttgacaccctttctttcctgcaggttgctaccttcaaccctgcagttgggtccatgtgtgggtggaggacccgatgaagcatggttagatggtgaagttgtagagatcacggtgaccag

SEQ ID NO: 22305 - DNA, 482 bp, Arabidopsis thaliana columbia
ccagcagaaacttgatgaatctaaaaaagcctacaaggaaggaactaagtgatcaccagttggggaaagccatcagagtgctcaattaagtgggaacaccaccatgtgctcaacaatggtgaacaccaccgagtgctcaatagtggggcggaccaccaagtattcaataatgggaaacaccaccaaatgctaaataacggggaacaccacctaatgctctacaatggaacacacaacaaaatgtttatcaatggaaaacaccaccaaatgcgtctcaatggagttcaccacaaatgatccacaatggggtttagcacagatgcttcacattgggggctgcaagcaaattttcaatcttggggttcacatctaacattcacgaagggcgcaatacaacaaattctcaacaagtaggctcattaggaacgactccaccaaatattcagtatggatgttcattaacaatcaaggagatccaataa

SEQ ID NO: 22306 - DNA, 581 bp, Arabidopsis thaliana columbia
cttaacagttccacccattcctttggctggatcagtgagaacaagctcagcaccaaaggatctcatcgtcactctcctctccaagctagtgtacgaaggcatcgtcattataatcctgtaccctttcatatcagccatgaaagccaaactgattcccatgtttcctgaagtaggctctatcagtgttgtctgaaaattaagcatcaaattcagagggtaagaaactcttgattcaccattaatttgagaattaactaagagaaaagaaaaaagctattaacttttccagggatgattagttttttcttctctgcatctgcaatcatggctatagctggtctaaagacaggaaatggaacaaaatcaatacttgctactagtgcttttgaaggatttgaagactaagatttcacaaagcacctgtctttaatgctacaagttggctggaaatgttcttgtttggctgcaacatacgcttcacaaccttcagtgactttgttgaggacacaagaggcgttttccaataagctcaacgttaaccagacgaatttgttaatcgcatcagaagaagacgagaaatt

SEQ ID NO: 22307 - DNA, 181 bp, Arabidopsis thaliana columbia
tgctacaatgcaacaacacagagttgatcaaaaaggtttcttctggtgattttcattttgtgttgaattattgcatcagaaccctacctttggaggcttacggagcattgagatcatggatttacaggtaataaggaatgccttcacattgtaactcactgagtttaaatctccctcggct

SEQ ID NO: 22308 - DNA, 537 bp, Arabidopsis thaliana columbia
tttgcatcggtcgtgagcaagagtgtgccccggagttatttcgtgtgccagatcatgacccgaattggaaactccgggtcatcgagaatctgtacccggctcttagtaggaatctcgagacccaatcgacccaacctgagacgggaacaagtcggacaatagtcggattcggattccacgacgtagtgatcgaatcccctgttcattcgattcagctctccgatatcgatccggtgggtatcggcgatatcttgatcgcttataagaagaggatcaatcagattgcgcaacatgattccatcaattacatccaggtaagcattatccatagatcccaatgtagtagctctattagtgtgaatttatacattgtttagccgtcaatacttgtgttatgtgtggatattttgtgttgcttgcatagttacattcatctgctacgtttgttttcgtatgttgaaggttttcaagaaccaaggtgcgtcggctggagcatcaatgagtcactccacagtcaaatgatggctctaccagttg

SEQ ID NO: 22309 - DNA, 520 bp, Arabidopsis thaliana columbia
agaggatcccagcatcgtaaggcaatcactggtaaatagattaatgaaaagttatttctaagggttatgacaaacaaaaaacgggtttaatttatgaatggtcagtaatagtatcacgaagatttcaatgtttgaagaaatgatttaacttgttggtaaaaaaattgagagtaatagttgaaggaaagtactcaccaagataccattactaaaccggatgagaacggtgaaggtgatagagtaagcagccaactctataggaccaagatggccgatgaaagattgacttattattgaaactccgaacgttgagaatctcgtgaagatcgctggcgccgccacaatccatagcttctttgattcaatccaaaccttttgcttcaaccctaactcatccttctcttctccgccgttctccgccgtcttgttcaacaaagccgccgtgagctctcctcctcctccggccatcttggagtctctgttgttgtatctgatggaggaccagagggaaggaggggaa

SEQ ID NO: 22310 - DNA, 574 bp, Arabidopsis thaliana columbia
cgtcatctgccccaatagatcctccaccaaactatgtagacattgccaagaaagaacgagctcgagttgaagaacttatacaaagtaaaggaactcaatatggttcttacccacggttcaatgttgctgtaagaggtcaaaaggtttccgcaatgatccctctttttttgtttctctagtttcaagaatttgggtatatgactaacttctgagtgttccttgatgcatatttgtgatgagacaaatgtttgttctatgttttagattacgttgaagttccaagttccttctacttgtgaagtcgcacaattaatatcaaacattggatcccaactaggtgtgaaagtctcagatcgtactggtggttcagatatgctattgcgtgcttgggacaagtaattttctttctctactcaattttctccaagatccaatatttgaagactgatctatagttaaaattaatctctactccattcttgttacctcagtccagtcgcttggcaaataacacttcgcagtgtggaaaacaagaagaaacttggagagagtgaagatgattcagatgatgact

SEQ ID NO: 22311 - DNA, 571 bp, Arabidopsis thaliana columbia
  unsure (1)..(571): unsure at all n locations
tacattcgacctaccaacgtgtgctcatgttcacgagtttgttgccgatatgaataatggatttttcttcttggaagtttttctgtaattaaggatatagaaacgtagcatgtaatgtttgttagtgtaacgacatgtaatgtttttttagcttccagctcaaattaaatagtgatttatagaccaaagtaaattaattaatgatcattgttgattcataccacagggaatggtgcttttatggctaactgcaatgttaccacaagtgaagccatcgccttgcgatcccacagcagccggaagccactgtgggtcttcgaccgcatctcagctggctcttttgtattccgcatttgcccttatatcgatcgggtcaggcgggatcagaccatgttccttagcatttggagctgatcaactagacaacaaagagaacccaaaaaatgaaagagttctcgagagtttctttggttggtctacgcttcctcagctgtggcggttctcatcgcgttcacgggtattgtatacattcaggagcatctcgggtggnaaatcgggtttggagtactgc

SEQ ID NO: 22312 - DNA, 623 bp, Arabidopsis thaliana columbia
  unsure (1)..(623): unsure at all n locations
ttttttgaaagaatgttaaattttattcaatcaaaaagtcttttgtagaatgaatgcttcagttttttgaagttatgttgagaggaaatacatagtgagcctagaggagaacttttgacttattgctgccaagcttgtctacggaattggtcgagtggagaaccacaaccttaggccgtcatcataccaacggcctcccagatttttgattgagttgatcaggttgcgaacattcttgtcaatgagatttataagttgaacatgtggagaattcatttcaccgtgtcttcgtgcattcctttcacaccaaaggttgtaaagggtgccttggaacacatatttatcaaaaatagacgaagcgntggggtgtttggttgttgagcaaagctaccaattggttccagtccgtggagtagtcatcatggagaagtcgttgagctagttctttccagattccggctgagtatgaacaagcaaagaacacatggtctcttgtctcctcatagttgtcacagagaaaacattcagtctgtttcctgagctccaattctttattcgatcatcggttgctaaacggttgtgaagagcgaccattgtagaaatgagtcattaggaatggagta

SEQ ID NO: 22313 - DNA, 600 bp, Arabidopsis thaliana columbia
  unsure (1)..(600): unsure at all n locations
nnnnnnnnnnnnnnnnnnnnnnctaaagtcgggaaaatttgttcctgagctatagcactaactgacgtgaaatgtcgtgcggccccgtgatgctgttgaacgtcaaatgacgtcatcaggagcgtaacgcatccataaagcacaacaccggtctgaacggcgactgatgagattttctgaatgagaacaaagagaaatgtatcagttcgcttgctcatgcaaagactaacaatccattaaaatagtaagtgctccggacaattttccatggattattttctgaacatttttctttggcaaagatgatgaattttgatggtaaggaatattacttctggttctcagtaaaatcctttcgtaatactatgtaatcaagaagtttatggctggtaaaaataacgtcttgcattcaccaataatatgtaaataaacccatctatagatggtaaaaataggttgtggcaattatcattgcatcattcccttttcgaatgagtttctattatgcaacaacctgtagttcgcgttggcgaatggcttgttacccgtccataaaccaaattagccgcaatgggcgtcaacttacccttgagccgagat

SEQ ID NO: 22314 - DNA, 785 bp, Arabidopsis thaliana
tgtaagattttgtgactaattcgaatttgaccccttatgttttattgtgaataatttaacccaagttctttcccgactttacgttttttcatgttagaccctataatgtttgacgttttacataatatggtacttaaattgtaaatcctaccataacaacctctttgtagattaatctcattacatataaaagaaaaagaaaaagattttgtttggatttgggaagaagctttgaattaaaaaatagaagcaatagtttttgggggacaagcccggccgacgaatcggcggcgagacgttctttgtcaccgattgacatattcaaaaacgacgaagctaggtaaaggaacggagagaagagtcgataatagaagcgtagagatgggaaatcagaagctcaaatggacggcggaggaagaggaggcgttactcgccggagttaggaagcatggccctggaaagtggaagaatattctccgcgatcctgaattagctgagcagctctctagtcgctctaacatcgacctcaaggtttttatttatcttctttttaattacctctttttattgctgttgttgaaacattggaaaccctaattatcaagttcaaggcacaacgggaatggaaaatttgttaattgagtacgtcggatttagttcaagaatctttgggttcgattttatgtatttaagttgcagacatttgaaattttaatgattgggataatctctttccatgctttggtttgaaacattttatgagtatgctcggatcgaattgagta

SEQ ID NO: 22315 - DNA, 590 bp, Arabidopsis thaliana columbia
tttaatatggtatatttttattctcactataacgttagtatgggtaaaattgtctataaaatactatattcttacgaaatgtgataaatatagaaagaacttttaattgtgttatatttgtaaaggttttgtcggtatcatcatgatatttatccaactagaagcaataataacgttgcaacttgtaaaaaaacgacaaaaggggatacttgtagaacgttgcccttttgatctctgtttttgattatcacgctcgcagcaaacactttgagtttgattatcactatgtccgtgaacgtgttaccttgggatcgttagttgtcaaacacattccggcaacagactgctgatatattcaccaaatcgttgccatatcaaactttttgtgatcaaaaatgtgacacgtcggatcaaacattggcgagccaaaaactgccgtttacttcaaaacaatggtcgtcaactgcagtaaacgtcggtaaaagatcgcatgtgctccgatgtccactatcttaccactatcattaatatacacgtttacacgcacgaacagtactgttattgaaggttttttaatttatttattaaat

SEQ ID NO: 22316 - DNA, 341 bp, Arabidopsis thaliana columbia
gataccgtcgcggatggcgttacagacatctagagctttgatgctccgttcgaagtaatctgaaatcaaacggtccatcggagatttagagatctgagatcggtggttgaatacgatagctcgaaactcttcttgacaacagaggaaagtatcaagaagctttccgatccattcgagagagagaaggtcgtttgaagaagcgttgagatcgatgaatttctcagcgacttgtctttgaaacgaatctagctcaacctcctatggtgctctggctcgtggtggctactacttccggagacgactggttgatgagtcaacttggtctcgccgtaaatttagca

SEQ ID NO: 22317 - DNA, 1740 bp, Arabidopsis thaliana
ttttcgtggggaaaccagctcatgtctgtaagaatgtcaggaacactggactcctgtaaacaccaagtacttaagctcagtgattatctgttatcatgtcatatgacaaagtatactgcagtcttgcagatcatgttcagggcttggaaaagttctggtctgcgaagaaacatggacacaatttttgcaaactataatcctaaaagttacagtttatcacttattcaagaaatgagaagacatcattaccagaaacaagacggttgcacagtacttgacaacttcaagattcatccggacatcatctaagctcctggtgaatcatatccattgtttagtcccatattgaaacaactgttgaatcgctaaaaggctcagggcatcgtttagatttacctgtgagcttgatctcctagcccgaagtatgtagcaagtgatgccatctacattagttaaaaggagtaaactttagcaactctgatgtgaatctaacaagaaagctacaggcattgaggtttatcattgagaatcgggaaaaagagagaccttcatgtcaccagctctcttcccaaacttctgagacaacaatgaaagcgaatcaattgtagctttcggctctggcggagagagaccaatttctgcaaatgcttctcttattcttacacaatcgaatcgaattatgttatgtcccgcccaaattcgtcctacaaaaacaccaaaatcaacacttttagcttcgtgagaaagaaagcgaggaagagagagaatcccttaccgtgaagaatgtcatagaccttatcggcgatttcagagaatgtatgtgcagagagaactccgtcgcgcgtaatgccgctacgtcgctttgtgagcgtagagattaaggaaagatcagtaggtcgaaccaaagtggagtaactatagagctcctctagcctccttgggcaaactaagatggccccaaactccaaaatcgcgaaaggctcccctgatttggtcggaaccgccgtctcaaggtcgaaaaacgctatctcgcttctctcatcgccgcccagactcgaagccattgttgaaaagtgaaaactgatagaaagaaggagaagctaataggtgggttttaaagcgaatgagcttcacgcgccacgtcctctttttacggaaaaaatctaaactttgagagacgcaactgtagaatgaggtttatcttgcgtcatctgcattcacttggagtgatcaacaaatttgattcctttcttctacattttcacaccaaatcgcttaaatctaaccacactttgaagcaatatcttgaatctggggaccaatcaaagctcttttagatttccggcaccgattcagacaaagtcctagttttgttgacagtttttctgttttgtttgccattaaagtttcgtcagctcagaaagcttcctcacttgatggtagacagatccacgctcttgtaagaaaactaggtttcaatgccgttattcaaattcaaacatctttagtgggattctactcttccgtgggtgatgtcgattatgcacgccaagtgttcgacgaaacgcctgagaaacagaacattgtcttgtggacagcgatgatttcagcttacactgagaatgagaactctgtggaagctattgagctgtttaaacgaatggaagcggaaaagatcgaacttgatggagtgattgtgactgtggctttatcagcttgtgctgatctcggggcggtgca

SEQ ID NO: 22318 - DNA, 438 bp, Arabidopsis thaliana columbia
tcattcatgttcacttgtattttttggtccgacaaatttcatgagccaagagatcggcttgtgccatatatataatcagtatcagcactaaatcatacaattaacattttattgtaccaatgatagaaaaattaaagtgaacgacaaaagtaaagatgagtctaactcaagagttctatgcccacttagccatcacagacattcccgcggcacctatgaaggtagcaacataaccgaggacatgaagtttcatattcccttgtatctttggtccgtataattcatgagccaagagattaacaagggccagatcaatcaataatcctgcagaacacgcattcaacatccccatcaagatcaacgctgtcggacttgtctcaccatatatcttttgtatctgcatccctaaagcaatcccaaattgcattgtgacacacc

SEQ ID NO: 22319 - DNA, 481 bp, Arabidopsis thaliana columbia
cgattatgcacaacagaggtgtaagtatactcatctttcacttccatcgactcaaaatatctcatcgcccggtccacatgacccgctttacacaatccatcaaccaaacagttacaagtcacgagattcaatccaatccccatctctcccatacttacaaaatgctcctcagctcttctcgtctgtcctgtccttaacaaaccattaactataatcgtgtgtgtatactcatccgctttcattcctctccgctctatctctcctaacaaatcatcgaccgcatccaaattcccgtctttaaaatacagattcaacaatgtgttatacgaaacaatgtcatgtctcctacctttcctaactaactcttgcatatactcataagcctctttcgttctacccgtcttaatcaaagcactaacaaccgcgaagtacgcatacccatcataagtgtaccttctcttttcatctctaagaacaactg

SEQ ID NO: 22320 - DNA, 791 bp, Arabidopsis thaliana
tcgtatgtttatggaccatttatcatagttaggtctaggaagcaagggttgagagataagagttccaggattatcactgtgagtaagatcgtacgaagatattgtacgcctttgaacataagaaaatcgagttaaagacttccttttcagaatggaagaacaatctgtaacaggatttaaagtctcgacgtccgacattagggagaagagatgagaaaaaaaaaattatgagagtttcagattgtttagaagaccaaaagatatagatcccaaagaaaacgaaaaaccaaatacctagagattaggttttggctctataccatgtcaagaaaccttgggagttcttaaagagatttttttattcagtttgattcacagcaaacgccttttatacaagattagacataggttatgtgtggttctcaacctaataaacaagacatgagatattagaaggagatgtggcccattaggacccaataaattcatcaggaagatgtataagatgtataagatgtccaatttctccaatctttttctcttctataatggatgtagaacaaaagtttcctaaccacttcattttttatttatattttgcttcaatcaatatttgcgtttatttttcatcatttattttatttataattgataagttcttatttatattaactaaaaaatgataacatatataatattatatgttccagaatatacgaccaatattacttactatttaatttgtttccaaattattaatcgaaaaatattgcaaaatagtttcttaaaat

SEQ ID NO: 22321 - DNA, 613 bp, Arabidopsis thaliana columbia
tctagaggatggcctgttacaaatttgtactagagaactggagaatctcctactttatagagcctcaaagttaagcacaaaaatcttactggtgacttatatgtaatgtaccactggaactagagtatgttttgaataaagctgagtttatacaaatggttctttacgttctttcaatattcttgtggagtggttccagttagaatagagcagatttgcttatgattcttgagattattcctccaagttcctctccacaatcttcttgtacatgatggccagcctgataagggaaaaatcagttttcaagttagctttattgtttagcaatgtctcacagatatatatatcaggaagtaaccggtacatttggtaattcgacgaggttgtgtcccgaactcttgcagaactcttcaactccttcatagcttaaccacctatctcgttgtcccagcacacggtgatcgggatttccagtttttaccattagtgatgcctcatctcttctgcatatttctgcaggtaaaagttctaatgaaatgccaattctctagatatcacttgaaatcttgatttttgacagtatgaatgaagaaagagaggctttatgaga

SEQ ID NO: 22322 - DNA, 640 bp, Arabidopsis thaliana columbia
aaggacatcggagcaaacgccggagttttctctgggcttttatacacatacgctacgtccaatcgtctccgtggacggggaggaggaattggaggcgctggaggaccttgggtggtgcttgctgttggggcaattcagtgcttcgccggttactttctcatttgggcttctgttaccggacttattagaaagcctccggtgccgctgatgtgcctgtttatgttcttagcagctcagtcgcaaacgttcttcaatacggctaatgttgttagtgccgttgagaatttcgctgactatggtggtacagccgttggcattatgaaggtgagtttttgatgaagcttttcgatatattgaatggatctgtattgttggatcacgtctcagtttgtttccttgggacctaaagaccaatatttggctatgatgatgatcctggtagagtctaaatgaggaggctttggtaacatttggaaagagattgatgctttgaactttggatcaatcgagatctagatcttctagttgatatatattgcgtagtaaatatttgttctcttctgataaccttgcaaatgaggatgcacctcgacttttaagatgagaacttcactaaccgcgaagtatgtaatagtgggag

SEQ ID NO: 22323 - DNA, 935 bp, Arabidopsis thaliana
tgagagtgttcttgtataataaaagctttgtcttataaaaatatttatcccactctagtctcttccataaacacttaatctctttcatatactaatttatatattttgatcctataaaacatcatacgtggttgtactatgtgtttgtaatttaaataaagtatgaagtgaaatgaagaattgatgtaaaatatataaagagattgttgtaaaacagatcccaatacgaacacgagcctcactctgtttgctctcaatctctcaattgaagtttgtttgtgtgaatcaaagaagaaacagagaacgaaaaacagagaacaacacacaagaatttgttacccagttcaatctaatcgatgtgatagatctacgtcaagggccagatagatccggcaatctactatatgagatctttacaagcttctctgagctcaatacaagatcaacaaagaaccctaattttctgggtttaagagaaattgtcaacaactttctaacggaatgaagaagaagaagataacagacttctatttatatgtgtttgacttcgagtctcgaagcctctttctgaatgagagtcttccaatcaaacttccttcttctgtaaaccaaagctaaccgcttcaataaccaactccaatctgctgctaaaccaaatatcaccagaccaacattaaacccgaattggatcataatcataacaatctccaccttgatcccattcccatctcaatatcatgaactgcacttacttggactttacctctcgcttgagctgaccaaactcagtcccacttcatcagcttcagaacacctaaagctgacttgaacttgttcacaggaatgcacttggttaatgcatctacaggatttctcgacgtgtgaatcttcaacacatccacatcaccagactctacaacatctctgatgtaatt

SEQ ID NO: 22324 - DNA, 565 bp, Arabidopsis thaliana columbia
ctagtggatccctactgaattttggaaatgtcaagggaagattggggaagaccagggaacttttgtttaagcaagaccaagatcgtctcggctctctcttcgaacaactctcgtttctccaagctcacagctgatccccaagaagatttgttgtcttttagatgaagttttcttttccatataacgattgaggcctcaatcctattcttcacatccaacactttgtgctctgtagataagtcaagtgttgacaagaactgctctggatcaaaccactcttctgttatgctcttgtataacgaatccccaaggcttactcttccattctgaaaataatctaagtcttcttaataaccattattgatttgcttaaaatagtatatgatattttaaaatagatgcaagcaaatcatccaaactatataccggttttaagacaaaaaaggaagatcacctttggaagagactcgatatagctatcagggatagccatttctgacagaacttgcgcgttaatagccatggcggctttttggacttgtgagactgaatctttttgaaaatg

SEQ ID NO: 22325 - DNA, 511 bp, Arabidopsis thaliana
ttttggtgtctcagactcagacatctgcacctaccatatgagacagagacccattacttacaatttttataatatacaacttgatttcttgaagttgtaaaaattgcattttataaaaacaatagcatttacttgtgaaggcaattaactaagcttttgtttagtaactttctcaatctccagacttagtttgattctgatgctcttgtagatacatttcagctaaggcagcaaacgttgctgatccaatgggaagcacattctcgtcgaggaagaaataaggcgaatgaaccgaacgcacagaaccgatttcttcgtttcttataccgattcctatgtagtaaccgggtattttttgttgatagaaagcaaaatcctcacccgccattaccttgttagccggtttcaccttctcgggtccaagcaagagtttcaaaaccttttcagtgaattcgtgtagcttgtgatcgttcactgttgctggatacataggatgatcgtcttcatgcat

SEQ ID NO: 22326 - DNA, 310 bp, Arabidopsis thaliana columbia
  unsure (1)..(310): unsure at all n locations
tgaggtttgaacccgaaaatcccatgtactcacgtaaggaagcttggaacaagttaaaggccgcacttgaatcatggttactccatatctcataggacatgattttaaaggaaatttcttatgagcatctgaatcctttgactgcaatgattttaaggaacaatgtgttttaagtcgtaatcttcgcagagaaaaatgatctgtaacaagagcagttggtactctgaaagcgctngactgaagggtctgggtgcttgcaatccgcttgttctgctcccagtccgaaccgtggcgctcgcttagttcctcg

SEQ ID NO: 22327 - DNA, 454 bp, Arabidopsis thaliana
tcattgggcgagttcagctcctctttatgtttccacctcagcgttatataggttctcaaagaaactgaagactttaaagccgcacttacgggaactaggaaaggaaaaattgggagatctacctaagagaacgagggaagctcatattttactttgtgaaaaacaagctactactttggcgaatccgtcgcaggaaacaattgcagaggagttaaaggcttacactgattggactcacctttcggagttggaagaaggcttcttaaagcaaaaatccaaactccactggatgaatgtaggagacggtaataattcatacttccataaggcagcgcaggtgcgtaaaatgagaaactcgatacgcgagattcggggtccaaatgctgaaacgttgcagactagtgaggaaattaagggagaagcggaacggtttttcaacgaatttcttaaaccg

SEQ ID NO: 22328 - DNA, 569 bp, Arabidopsis thaliana columbia
gctgatgagctcagtaaacctgaaagagaaagagaaaaagaaagagaagaagaaagagaattgcgtacaaggaacccgaattcttacaagaaaggactagtgctctgtacatcaagattgtaaaccttttgattatggattatgtaagagctgtttcatgaaagtttctgttggacttgaaggtggctcggatcctccctccttccagcgagcagagaaagagagaatggaggaaaaagcttctacagaagaaaacgacaaacaacaaaattcggatgaatcaagcactttgtctgacctcgatgatggagagttggattgttattttcggaacccgaaagaagtgcacctggttgagattatctttgatcacgaaaaccccggatatgatgagaaggaagcagcagctttaaacgcttgcaataatgcaagcaaccttttcgaagcttctaaagcagcggcggcgaaatctagaaaagataaacgacaacaacgtgctgaggaagaaaagaacgcgcctcctccagctacagccatggaagctgttgatagcatggtcaagagaaaga

SEQ ID NO: 22329 - DNA, 564 bp, Arabidopsis thaliana
cggatctacaagaaactagtcggctttgagggaaacacacttgaattgagttctcgtgtgatggaatgcatgcaatattccagagtaagttagtggttcctgatagatttaaactcttctttctgttctgtgaaggttagtagtatttcttgttttttgcacagctcttttcggaaactgtgtcttcgagtaaagattccgcaaatccgtaccagaagaagtctgatacaccaaaactttgcggtctaaggttcatgaaagacgtgctgctcggtaaaagaagtgatcatacattccggacagtagttgttggtgatccgtccttgaagctcaacgagattggcatacccgagagtatcgcaaaaaggcttcaagtatcagagcatctcaaccagtgcaataaagaaaggcttgtcacttcctttgtccccacactgttggacaataaagagatgcatgtgagaagaggagatagattggtggctattcaagtcaatgacctccagaccggagacaaaatattccggagtttaatggatggagacactgtgctgatgaacagac

SEQ ID NO: 22330 - DNA, 570 bp, Arabidopsis thaliana
tatttattcttgatgtattgctgtggattttatacattcatcgtgttgaggtactagatatgttaccaattcaatttaatatgttcttgaatcaaaaattattatttatttattttttgaaaaaatgtaaaattatattcaacaaaaaaagacgttttttacaatgaatgcatcatgagtttagagaattcaaaattgtcgaatagattgaaaaagagaacttcctaacatcgggtatgaaaccaatactgcaacccaccatggagtcttgtattccctgtcctttgaatcgtgctgaaccggttttgaatagttttgtcaatgaacttagcaagtttcgcagccggaatagcagtttccccgtgtcgcctgcagttacattctcgccaaagactatggatcgaagcttggaatgcatagggaagagtgaagactatggatcgaagctcataagataagcaacaaattatattattgttgtaaatcctaacaatcaaaatctatattcaagacaagaatcttagtccaaaacaaattggttttactactccgtattattcattatgtctt

SEQ ID NO: 22331 - DNA, 502 bp, Arabidopsis thaliana
tatagtaagatagttgttttgttttcattttattgattaatttgggcatctcaatagcaggatagtaaccctaataactaatttatctcgattttacatttttgtaatgctcaattatactgttttgatgtcttttagaattcatttgtattttggttatttcatatttccacaagttatatataaaacaaaatgcaaaatgagctatttagatatataacaaatgagtaaacacaaaagatcatgcatactatcaaaaggaggacttttatagagttggataaagctcaaagccattagagactcactcaaagcaagcttaaattacataaaacgacaacgtttgcatggtgtaaaaactttaaaacccatcaccgatcaaagcccatctatgaatcttttaaccgcaacaaacgaagatccaccgtccatcacagcctcttttcccgcctccgcaatctccttcagtttcctctcggcacatcctcacctgtcatcaaag

SEQ ID NO: 22332 - DNA, 529 bp, Arabidopsis thaliana columbia
tgagacctttttttttgttttcgatagctttggttagccttttcggtattctcatttgcctgagtttgtggaaaatgaagatatacagctatcagtatcggattcaacatgaaagcattccgttaaccgaggagaagcagattctcaaagagatcaggctgcttgaagggacaagagataaggtcattgctaatgccgctatgagagccaaaatcaaagaatctatgggtcagaaggatgatatccaaggtcaagttaaggtaagagagttgtggccggattcttgctgttatatagtctgtagaagttggtttcatatgtgatgctttttgcagttaatgggtgctggtttggatggagtgaaaaaggagaggcaagcaatttcagcaaggattattgagctgagtgtgaagttgaaacctaccaaagatgtgattacggtactggaaaatgagctcaagactgtgagcgcaaagagagacaaagcctattcaaacattcatgacctcaggaggcaacgcgatgagac

SEQ ID NO: 22333 - DNA, 2558 bp, Arabidopsis thaliana
tgaggaacttagaagtaagctgaatcagttgcagaaagaagctcaacctaaaggcgggattgacactatcccgagaaagaagttcacttcaagatggtctgaagagacagattaccctccagaggagaaaaaagcatattttgaagagaggggaattgagtattctgctgcacaattctccagggaggacgctgagtatgatgatggtatcagagaggattatgcagaccctctctatagttcattttcctcttgataagtgtgaggtgtcaagctagagactttaaacaagctcacttgggaggaagtcccatgattatccttgtgaataatttttactttcttgttatttttgatttgtttttgttgtgtttgtggttctcaggattagaggaataacgtgaggctagagtaaaaattcaaaacttttactctacagagagcctagagatcgagtacattggtcgagtgtgagtgatatttaaaacccaaaaaaatttaaatcattattttacccgaccaacagaagctacagagacttgcagggagaagctacagagacttgcagggatttcctgcagtttacagtaggttttctgcaaattttctcagtcaacagagtgtgggccacgcgcttaggataaactggagagagaatctaaaactcaacctcaaccactctttttgaagcttcactcgacttcaacaaatccactcgacctacctcttttcatctcaccaccgacactccaatctctctacaccacgaatcgccgttcaaagagccactcgatccagataacttcactcgacctcctagagccactcgacctccgcgccgccgttaccagttcattccctccgtcacccgaccagaccacttcactcgattccttttatatactcgacaaattcatccacatcaaccgccgtctctttcaaaagaagctactcgaccttgtttcccagtctcgtagccgcactcgaccgacgccgcctcaaccgatttcaacaattcactcgacgaccataaagcactcgacccctacaaaagcaactcggtttcttgttcttgaattcaacagagcctttcaacttcagagaagttactcgacctctaggcttcacgactcactcgacctactgaagcattccaactcaaattcggagaagatactcgatccaattcgtctaaggggaactcaggaacagctcagtctactcgagtacagaattgtactcgatcaatagggtctatttcattgcatattgataacaattttggcttcattgctatctttgagactaacctattgacatttgagctttgagttctaaatttctacaggggaatcatgagcaattacagtggcagttcttctgttgatcctgactacaacatggatgacacagagtcgtcttcttcaaggcctgagagagaacaaagagaatatgaaagctttagaagaaaagctgagatagcccgagggaagagagcgatgacagagaggtatgagcttatagacgaatatctggaagatgagtacatgcctgagcatactcgcagagctaccaaacttctgcacaagcccgacgtattgcctgctgaggaatatattaggctcttcaagctgaatgagttctgtagcatgaggtatccttgcctgaccacacttgcacaactcggattgttggaggatgttcagcacctgtaccagagttgtcatatggacactctgatggcttatccgtatgtagcatatgaagatgagacaattcagttcctctccacgctgcaagtggagctttaccaaggtatgacctctgatgagttggattgtgaaggattgggattcttgagattctctgtgtatggtcgtgagtataggttatcaatcaagcgattggaagaattgtttggtttcccagtggaacgggatctaaggcccaagtatgacagagaagagttgaaagacttgtggatcaccattggcagctctgtaccgctgaattcttccaggtcaaagagcaatcagatacgcagcgctgtcatcaagtacttcctacgttctatagccaatgtactctactcccaagagatcacagggacggttactaattctgatatggagatgatcgctatggctctcaagggaactcttggccaaactaagaacgacatgtctctccaaggtgaaatcaatgacacacctatctctgtacttcttctgatcaatctgtgtggatacaagagctgggctgtcagcaataaccacaagagagcacgaggcgctctgtgcatagatggtgttttgacatcgattttgatcgcttgtggagtcccaatcacatctgatggacttgagccacgggcaatggatattgagcatctacgtcactgtgaattcctggagttcgcaatggttggcgacttgcaccggttcaggtttgagcactctacagacaagcgagctagcatccttctccctagccctatggttactcggataatagagggagataacattgattttcggcctgagattggaagcctctag

SEQ ID NO: 22334 - DNA, 2081 bp, Arabidopsis thaliana
atattttttgttaaaaatgtattactctataacttttagaccgtgagccaaacttggcatgtgataccttttcggaaagccgaaagagtgctctcaaacgaatgaggaatgggttgtttttctactccaaattttgacctaaatgtactttttatggccttttcttgatctttgctatattacgggacaaaaattatatgttcggacattgtttttgaatattttgcatgtatcaaagctcttataaacaagatagggtattcctacatatctggtgggacctgataatatgtttttagtcaattattcctaaaacaccaatcatgtcgttttaatattttaggtgtcaatccaaatgggtgtgatgcaaacagatgagatgtgatcagaagtcactaagtcaaaccaagcaataacagttttggggtttctaacagtcctaagcgaacatgcagaaaacagaagcaataacagaattactaaaatcactcgaccacaacaggctgatgccagaagtaggatgtggtcgagtaacaggtcgagtaatagacaggatatgaaacagctatactcgactgcacagtctgttgccagacactgggtgtggtcgagtaagttggtcgagtgattgtaaaaactaagaaacaggcaatgagaacgattaagcgataacgataaaacagagaaataagatagacgagaaattcctaaggatggggtaatcgagtagagtggtgtcctagcctattcgaatggttaacaagcgcaatcaagctatccctagacaacaggttcaacaacagaccaattcactcccgtgatagaaatcctcaagtaaagctagcccagactaattcccattaacagaatctaactatgcaggcaatacgaacagactgataaagtcaataaacgctctaaacggccaatccattgggatagagacgcatatctcaggaactagtggatcaagcattccatcgaacaccttctgggtgcgggaatgcttgggatcgaattccagttgatcagaaagaaataagcagtaaacgcaactagtcgtaaagggattcaatcaattctaaaacttaaccattctacagagtacggattccacaactactttatcccatccctaagaattctaagtcactactcaaacaacatgctcaaagacataaacgcagataaatgataatattgcataagtaaagagataaatagtagagaaacaggatgacagatgaaatcaaatgtggaatctgaataacttggaaaaatctcgaattacaggttgtagaagcaaaagcggcgtacgagagtaaaacaaaaaataaaactgaagcaaaaactcaatgtcgactagatgtctccagacagaaccctaagacatctatttatacaaaacgaaataaaatgatagtagacgggccaataacctaatcgcccggcccatagaatgatagagtgaatggtcgagtgtggtcaagtggtgtggcgaagtgatactcgaccaaggggtcgagtaatgtggtagagtgaatggccaagtgttgtcaggtggtgtggcgaagtgatactcgtccagggggtcgagtaacgtcatcgagtggcttgggctgaggttactcgaccagggggtcgagtagaagggaaaaatggctccaaagtcactcgaccagggggtcgagtagaagggaagaatggctccaaagtcactcgaccaagagtacgagtatggtgctggatgcacacgaccaggtggtcgagtatatcttctagttctgactcgtttcttccaatttgctcgcaaacagctccaaatcacctgaaaacaactcagaaatgcaatatgtatgcaaagttatcctaatcatgcaaagtatgcaagaatgatgagaaatgatataaaacagtgatgaatgatacgaaactggactcaaaacgatgatgaatggacactgaaaacatgcaaattatagacatataaactcccccaaacttagtctttgcttgccctcaagcaaataagaagacatagttgaaggagaggtttgaaggcggggactcagaaccaaagg

SEQ ID NO: 22335 - DNA, 2649 bp, Arabidopsis thaliana
gtgaaccgctttcttcgccccttgtgcagtcgaagtcaggtccatcacctttttggagagctcttccctcctctgctccaagcgatgaatctggttcctcgccgtctgcttgtcggcttgcaaccccccgatctccatctccatgaacccgatcttctcatcataacctttctcgaggtcttttgaagtggatagctccattttcagcctttcgatctccacctgaaataacaatcagatcagaatcatcgaatcatcgacaaattatatacaaacaaatcaaaaccgaggtgtacctggaacgagacttcgcgatcctgaccagccttcacactcgacgtcagctcccggatgagggtctttccttcttcgagctcattcgctgaggggacctggcttagacgctgctcatagagagcgaccagcttgtttgtggcagctatcgcctaccgaaagcaaaacagaaaatcacaactagcataaagatggaattagaaggagacagttatcgattattacatggccctccttcgccatcatgtcagcataggccgccgcctcggccatgttcttcactccaggaacctgacaattcctccctttgacgtggcgaagcaagttcgctaacccagcctcgtcctcaacgattgggtgatcacggtcgtgagcccaggcgttgactcgttgaacacgaaggcttggacgcctcattcttctgatgagcgggagttctgaagtggagctggagtcaggaggaactgagcagatagagcacgacatttgttagtaaccaattcaagttgcgcaactgtctcaataactcgtacttttaaaaaaaaaaatatatatagcggaactcgtacctataggcaggttagcttcgggaaccggttcaatccgcgaaacctcttcgattggatctagctgtgcttctggaggaacgattgcgggaactgctggagctacgggaactgctggagctacggcaagagcagctacgatgcgattgctgctgaaagcggaccagtcagtctgaccacgtcggagaagggataacagctcaagttcggtctccgagagagtaacttccttggtccttgctacaaatcatcaaaaacaagcaattagtttcagtactaacgattagcaaaagcaatcaaggattcaacacaaacaacaaagaaaaatcaagaggctcaggtctccatctgacccaggttggtagaccaggtccttgttatcctcccgggatcaaaattgccaactgaatgacgatctactctgaaaaagaaatacttggatcgccaattggtgtctcggcaggatttcaaaccgccgaggaccagagatccgggacgtgcactaatgtagtacgtcccttggtcactcctaacattggtcttgacctggcagagctgaagcaggtcatggcagctgaattctctgtttacttcccgagcccgggtgaataacgccagcacatggcggacgaagttcggacactcatggtggtgtcgatcgacactctcttcgtttcctgcaagaacaataggagaaacaagctttcgaagaactctaggcttgttattttatgaagcagactttaaagaatcgaaagaattaatcgaaggtaaagcaagagaagagataatagagtcattatcacagagggctgcaagaggtgttggttgaagagaatgtgcagaatcctctgtgtgtgaatcccgagggtgtcgatcgacaggagggatggtgtcgatcaacaccgttgctctgcaactctcattgggagatgagctaatgggagcgggacgtgtgtgtgtggctctttctgaggattctgagcagtctaaggaggtgtgtctgtgctagaggcaatactactgatagtcttagtgaactccgaaccattcataccaaactccatctccaaatgacatcctttgagagagatcctacctctcttcacatcaatcctagcaccagctgtagctatgaatgctcttccaaggataagaggatccttggggtccttatcgtagtctaggaccacgaaatcagcagggattagggagttatcaaacttaacaggaacatttttcaaggattccttcagggatgcgtttggaacgatccgcgaagaaaagagtgattctagtctgcctgtagttagtcatgcctagtctctgagcaacagacttaggaatgaggttgatacttgatcccaggtcacacaaagagcggctaaacctgcttgtggagatagagcaatcaagaacaaagctacctagatctggaagcttctcagtggtctgatcgggagtgatagtacagatgtactaagcaatgtccactctttgtgccttttctttcttaaccttaagaagcatgattgcactgatgttccttgtcagcaatttagcttcatcggagctaataccattgtcaacaagtcgcttggcatacctgttgagtggagtagaagatgtctgagaaacatccttaggaagagaagtgaggatcttctccatgatggctgtgcacttagtagcatggatctcctgcttagaacgacgcgtcctcggataagagacagggggagtgtaagcagactcaagcttcatcagaattcacacctcatatggtgca

SEQ ID NO: 22336 - DNA, 2558 bp, Arabidopsis thaliana
gttgcagccggtaaagagagaaaattgcaaaaaacattatgtgatagaaaattacaaaaaacattagacatgtttttacaaacaaatggacaattcacttttgtcatttgattggaaaaaaaaaccataatcacatattataattcacacaaaattagtaatttacacccatttatatcaaaccaaaacataaaaaaaggaaaaataagataacattttaccaaaaaaaggtaaacaacaaagagatgcccaaaaaaacaattttttaaaaaaagctagaactgggaggaataagcaaaacccccataaaaccctccttgaaactgagtccgacttagcccagtcgcttcaagcatacggttccactcacgcgcctccgcattttccccaaactcactctctcctccgcctcctcctctcatcgccagcagaatcttcgacgccttctccttcacccgttcattcccattctcttccacttccatcaacacttcctccgctcccgcctcactcgccaaccccctaaacctcaaattcccttgacacaacgtcaacagaaccgccacacaattctcacgcgccgcctctgaatcaccacctccgacttctctaagcttccctaccaaaatcgccaccgcgtttccatctaacatcgcaccttttccgtctggacaagcggccaggttacatagtaccagcaaaatccggctagtcgaatcacccgatcttaccatcgaaagcagagtcggcaccgcaccagctctaaccagcctagttctattgctcggaatcagggacaaatggtaaagcgcaagagctgcatcttgccgcgctctttcactctccgacgaccgaagcgcgtgaagaagcggctccaccgcaccaagaactccgatcaccattttgttctcatcttccaacgccaaactaaacaaagctccggcaacatgttcctgcgcctccgtcgttcccgatttcaaaacatcgatcaacagaggaacaaatcctgaccgtacgatcttaactttgttctgtttttccaacgagagattaaccaccgaagcagcggcgttagtctgaacaagattgtaccgtgaaacaagcagcgatcggagaaaagagagaatccgatctgtacaaagcgaaacccgaagatcttcactagatctcgtcatcttcctaagaagaatcaaaccttgctcgtggtcgaaaatgtcggtacctctcaatttattgaagatctcttcttcttccggtgacatcggagaagaagagtgatcagtggaagagaaagacatagcgtttcgaaatggactatcagcaccagcgaaaactccagaggaagaagaagtagttgaagaagagaacatactaacggctcgaaccgggtgatatgaactctgaccaatcgtcaccgattcaagagacgtcgtcggcgacattgaattctttgatcgagctcgaatcgcttccatcacagcatcgtaatccgaaggtgaattctcttctacaggagggagaatctcaggctccggatccttatcacccggacccggactttgacccggacttggattaggatctttatccattcgggcacgaaccacgccttcgacgtaagcggcatcaggaggacgaggatggtcaactttttgccgatcacaccaactgaaaatggtggatttcattgcgagattggggatgacggtggaaagatcgggtcgggtaccgtctaggagatccggtatataccctaagttacgacagacttgaacagagagacgctcgaaggtttgaccggaagagacgacgacgggatccgacatgaggaatccggtgatgggacaaagaaactccggtggagtctcgtcgtgtttgtgttgtggtaaagtagtagtggtggcggatgaggatcgttggtggaaagagaaccatctctgcttgtttccacccatcggcgaaaaaacttgggttattgagaggaggaagaagatgaagaaagaagaagcggctccgagctaaaaaaatcaaagctcgtaatattcagtctttgatacagtccaaaaggttttggatgattaaaccgaaccaatagattaaccggaaaaatcaaccgaaccaagttagattaaaccggaaaactatctatttgatttttgtttattagctaaatcaagggacaacaaaacggaattggtaacgctgatagtaacgactctgacattcttgactttttcatggtttacttttttgagaagaattaatattgtaaaggtgatgaattgatgatcatcattaatggacacctaataataatcaccatgagccataaatagtttctcatttaacacagtatcaaatcaagaacttacaaatagggaataaatactccaaaaaggtatctttgacatttaattttaccaacctaggatatactattttgcaaggaatttattacgcaaaaattatgagctatagttcaagctttgttaagttaatcgtaattagaaatttgacaaaagaaaagtagactgagtaatgcacacactcatatgata

SEQ ID NO: 22337 - DNA, 3371 bp, Arabidopsis thaliana
tgcttagatcaagttcttttttaattttctttttaactactaactgtgtgtttttcttgttgtcttcttgatccaggtacacctctactgtatgcgaactcgatcaacaggcaaccagaacctccttttcaacgacaacatcaaccgcactgcccgcgaaatcagaaaaaggagaaccacagtcaacactgtacctcagcaaccactcgttatggctgaagaacagaatcaacaaaatggccatgcaacattggtgttggagatgcaccacgtgatcaccgtcagaggaagggaatcgcacctcctgctatccagaataacaacttcgagattaagagtggtctcatctcgatgattcaggggaacaaatttcatggtttgccaatggaggatccactcgaccaccttgatgaattcgacaggctctacaacctaacgaagatcaatgctggtagtctagtcagatatgcggtccggcctggcacaaaatcgttgggaggtaaagcacacatctaggagaaggatacgccccatgactcaatcaccaccaaggtcctgctgctcctgaggctgatatgaaacaaatgctacgacagctgcttcacgggcaagcctctggctccatggagatagcaaagaagatatctgagttacataaaaagctggactgtagctacaatgatctcaatgtcaagatggaaacactgaataccaaagtccgttacttagagggacattctgcatcttcttcacctccaaaacagacaacccaactaccaggcaaagcaattcagaatccaaaagaatatgctcatgctatcacactgcgtagtggtaaagcacttccaactagggaggaaccaaagacggtcattgaggacagtgaagatcaagatggggaggatttaagtttcaagcaaccactcaacctgtcattcgagcaaccactcgacctgtcactcgagcaaccactcgacctgtcactcgagcaaccactcgatctgccactcgacagcgttactcgaccaaccactcgacctgtcatcccaacaacatcaccaattgctccaaaaccagttgctgtcaaaaacaaagaaaaggtctttgtccctcctccctacaaaccacaacttccatttcctggccgtcacaagaaagcgttggcagataaatatagagctatgttcgccaagaatattaaggaggttgagttacggatacctcttgttgacgctctagcgctaatcccagactctcacaagtttctgaaagacttgatcgtggaaagaattcaagaagtgcaagggatggtggtattgagtcatgaatgcagcgctatcatacagaagaagatcattgctaagaagcttagtgatcctggttcattcactctaccatgctctttaggtccattggctttcaatagatgcctatgcgatttaggagcatcagtcagtctcatgccactctctgtcgccaaaagattggggttcactcaatacaagtcctgcaatatatccctcatcctagctgacagatcagtaagaatccctcatggtttgctcgaaaactctcaatcaggatcggtgctgtggagataccaactgactttgtagtcctggagatggatgaagagcccaaggaccctttgattctagggcgacctttcttagccactgcaggagctatgattgatgtcaagaaatggaagattgatctaaaccttggcaaagcctttaggatgacctttgatgttaaagacgcgatgaagaagcctaccataaaagggcaacacttttggatcgaagaaatggatcagttagctgatgaattactggaagagctgggagaagaagatcatcttaacagtgctttaaccaaaagtggtgaagatgggtttctgcatttggaaacattgggataccagaagctgttagactcccataaagcgatggaagaatcagaaccctttgaggaattgaatggaccagcaacgaaggtaatggtaatgagcgaagaagggtcaacacgagttcaacctgcactctcgaggacatactcgaccagccactcgaccttgtctgccaacgaatctgaggagccgatcattccaacttcagatgacttgtcttaactaaaagcaccgaagtctgatctcaaaccacttcctaaaggtctaaggggaatcatgagcaattacagtggcagttcttctgttgatcctgactacaacatggatgagacagagtcgtcatcttcaaggccagaaagagaacagagagaatatgatagcttcagaagaaaggctgatatagctcgagggaagagagcgatgacagagaggtatgagcttatagatgaggatcaggatgacgagtacatgcctaagcatagtcgcagagccaccaaactgctaaacaaacccgatgtattgcctgctgaggaatatattaggttcttcaagctaaacgagttctgtagcacgaggtatccttgctcaaccacacttgcacaactcagattgctggaagatgttcagcacctgtaccagagttatcatctggacactctgatggcttatccgtatgtagcatatgaagatgagacaattcaattcctctccacgctgcaagtggagctctaccaaggtatgacctgtgatgagttggattgtgaaggattgggattcttgcgattctctatatatggtcatgagtataggttatcaatcaagcaattggaaggattgtttggcttccccagtggaacgggaactaagcccaagtatgacagagaagagttgaaagacttgtggatcaccattggcagctctgtaccgctgaattcttccaggtcaaagagcaatcagatacgcagccctatcatcaggtacttccagcgttctaaatgtgctttactcggagagatcacagggactgttactaattctgatatggagatgatcgcaatggctctcaagggaactcttcgccaaactaagaatggcatgtctctccaaggtgaaatcaatgacacacctctctctgtacttcttctgatccatctgtgtggatacaagagcatggccgtcagcaataacgacaagagagcatgaggcgctctgtgcataggaggtgttgtgacaccgattctgatcgcttttggagtccgatcacttctgatggtatcgagccgcgagcaatggatatcgagcatctaggtcactgcgaattcttggagtttgcaatggttgacgacttgcacaggttcaggtttgagcattctacagacaagagagcgtagcatccttctcccagccttgaggttacacggataatcgagggagatacattgatttttggcctgaggtt

SEQ ID NO: 22338 - DNA, 3404 bp, Arabidopsis thaliana columbia
catctatcaaacatattaaaaaagagcattttggaggattcttgcccaattggatcggagtctcaatcaagcacaaggcgtagggttaattattcacctacaaattaaccctataaagactaatgataattcaagaagggtcaaagaccagcgagtcgagtcaccatattgtggggatatgaccgttgcactatttttcccttacctaggatgtgtcccaatgagtttacctaaaaaggtttttaacgaggcaacatcaagtcatcaaggaatcatttaccaagaaaatgattcgaagatatcacgagtacatatatctgatgtacttgctaacagactggctgaactacccgctgaactaccttctcaagtaccgcacaaaatgaagccaaacaaggaaatcttccttattctacacttggacgcacctcaaagctacatatggaaccagtagaacatctacaccacacaatacatgtaccacacgaactttggacatcttaccacacaagaacccgcagagttactacttgctatatatggagccgaaggagatcaatttccaacaactctttccttctttgtttgtgcgcttatgtgagaatcttgagaccctccagtacattccaagacgtcacaacttcctctccaagttgacaagatacaaggcccacctcactcaccttatttggacatattctacaattaatgtccaatattttcatttatgctttgtttctttctttgaagtcttagacattgtactcagctctatataagttgatttctcattcattgtaaagcacccttgatcattttaaagtaatagaaaatgttttcttgtcaaagttgagtctttgtcatttgttctgtagttctttgtgagtgagtcactaagtacttcaggaatctgcggattaagtttgttgagtgattcaacatccttcatttgttcattgatcgagtgagtcgattaccccactgattgagttagtcaatcacccttctatccatcatttccccttgaattgatcccacacgagagaagcgatcgccagcgtgtcagatcaccaccttcatcatcccaccttccgcgtggcaagtttggaactcttgatcatcaagtgatcaaaggatggattagctccaattcttgcatcagttagtgttttggagtcgaatatgaattgatgtcatgtgtatgattgagtataagaacttaaaccgcaagcggatcttaaaggcctaagaattgtatacttgtaagaacaacaaagcaaaagactcatacggattttggctacaccatgaaagctttgagaagcaagaagaaggttggttagtgttttggagtcgaatatgaattgatgtcatgtgtatgattgagtataagaacataaaccacaacccgatcttataagcctaagtagtgtttccttgttagaagatacaaagccaaagactcatacggactttggctacaccatgaaagctttgagaagctagaagaaggttggttagtgttttggagtcgaatatgacttgatgttatgtgtatgattgagtataagaacttaaaccgcaacgcgatcttataagcctaagtagtgtttccttgttagaacatacaaagccaaagactcatattgtaacgcccgcgatcctcaataggatcgttggctaggacttggtccgagagaagaaggtggagtctcggacaagtgagaaagagctggctataagctcggacaaaggggaaatcatgcgggctaagctaggatcgtaaagaaatcacttgggtcagctcgcccaaagctcaagctcagctggaaggagtgacagttactcaggtcgagtgacagtccagctcgggcagctggacgagtgacggatgagctcgaggtagctggacgagtgacggacgagctcgaggtagctggacgagtgacggacaaactgggcggttatgggcgaagagatacaactcttcggaaaggtgcaactcttcggaagggcgcaactcttcggaaaggtgcaactcttcggaaaggtgcaaggaatggatgtgttgattcgggaagcatccattcgccccctatataaggaagggcgcccaggaccattccactcaccacaacacaccgaaacacaagaaactcaccattaaaactctctccctcttgggagaataaatagtcttaggattcggtagccgggctgtggccggcaataaagaaggagggtcggatcgacctaacctcgagaaggaaggtaagggatcctagactttgagtctaagggttctaggatgtgagttagtagtcggatccttgaaaggatcgactagagggctgggtagtatccgggtcatgtgcatcctacacaagactcggtccgggtagggatcggctgaggtggggacgcggctcggcggaggaccggcaggtcttaactgacctgccgagaatcggccggactgatgcgcgatcttcccctctctaaattctctccacggatccgagtagtgtatggcatatagagcattgcatggacttgcatatgattaagtaaatgagattacttatggctctatgactttcaggaacgaatggtgatcgtgggaaggacttggcttaggcgcgagagactcaaggccgggatgatgggtggtgatagttcggatagtctagggatcgattatatgacttgtaatagcttatatgcaaactcataggttgtatcgaatcctttgcttaatcaataaagtatccgattgtttgtttactctattcgtctcatatattgaatctcggaatcatatgaaacggattagactaggaaagaacctcataaacggatagggccgaggcacttagtggcttgggtcgagagaactcgcccggactttaggcaggccggatcggggcctttcaaaaaccctaactttgtctctaagcaaccttgttcttcttttcattgaatctttggtcactaaatagcgagagagttaagtaaatttgtttatcccctttaaacaaatttattgtgtgattttcagaatcaggattgttgattctgtaatcaaacaatgaatttgtactaagggatttagacaaattcactcctctcttagctcacaaataatcaaaggaaaagaactaagttgcttgaacaaaaagctagggtttgctctgtaatagtagtctcttgtattaggttaaaaatggtctcaatggggggtttgaccctctatttatacaatgggtcgaatataccaaaatatgataaacttctaattatcctaggtctaaatcttcattacttctattcttcataagatcctcttctcttaaatggaagtatccctttacacgacctaagaagttggttatggcgatcttgat

SEQ ID NO: 22339 - DNA, 676 bp, Arabidopsis thaliana
cagataccaacttacttttcttttctggctttaaattaactttaaagccataaatctgctcatcataatatcgaactggtgatctacctgggctgctactcccgctggagcttctagttcgaccagtatatggcttctccaaaaagcgttcaacaggagaaacctaaaagaagtgggtgacgtgagattgatcttgccgggagaagaaacttgtgacacataccagcaggaaaagctaaaaggaaaattagctaactaaatctggttatgctcaccttgatcgactgaagctcaggtgatcgtgcaagtaaggaccttatgtacaatatcctgactcgagaaacaagcattgtatccattactctccttggttccattttccggataaatgaaaagacagaatctctgatctcagcaaggatttcatgctctctggaagcaccagcctttatgacagctgctaagacctgcaagtcaacaataacatttgttaacatataaacatataaatatttgaacacctatcccaatcagcgataaatgtatttttatcttcaaatactggtagaatcaattcagttatttacatccctgaaaaatctaaatgggtactcaatatcaaactattaacccgatggcagtaccagcatcagaagcttgtttgcgccatcagcta

SEQ ID NO: 22340 - DNA, 3109 bp, Arabidopsis thaliana
tatccgggaggatgtgcagataagggatgggatgatgatcgattcggattgtgaggatgattttgtgatcacgggagtgaggacggtggagcagaagctggcttcggagggacatgaaatcgtgatggtccatgactatgtgagtgtttcctcgaaaagttctgcctcgccatcctttgcacttagcctatattcaccaatatcctatgagtcagatccgaaggaggatcaggatccacctatttctccatacgtcccggaggctgttgatcactctcccgatagcccttttgcactgttatgggagggcacgtcccccatactccgtttcgaggctgatatgaggctgacgctattccgacctttgatgggggcttcacatcgggtatcaagatactgttctgcttcatctgtggcgaggatggtcattacccgcaagactgtcagttctacacgcagtacatcccatggccattgcttgtctctactgtggagagtatgagcattatgcggctacctgtatgctgatgagagatgacggtcagattcttgcaccgacgtatacttccctatctcacgtagcaggaccatcatccccattgattcccaacaccgaggatgatctttttctaggttgtacctgttcgaggtgtagcttagggttaccgtgattcccctaggaatcataaaccttagtaaatatttggaaactaacccaagaaaaggcttatgatttatgatggcgtggcagaactgctagaggaaacactcacatagtcatggaccatcacgatctcatgtgcccctggagccagctaatgctccaccgtcctcaatcccgtgatcacacaatcatcctcacaatccgaatcgatcatcatcccataccctatctacacatcctcccggataatccgctctgacatagcaattatccatgcaagaccagaataagcaactgtatcgctcgatccaatcttcgacataactcgggaatactcggccacatccctcctcacccacctacccatgactctctcacgaacgttatatcgcctggacggcagacccaaggaccctccctcatcctccacagactccctaccacgagatctctttagcggcatactataatacaaacaaaaaggtttagacacgaaaatataagcaaaagggtaagccacctataatagtaacaataagggtaagccaacctaaacaaaaagggtaaatcctataggccaatctacctaaactctagcaagtgactgaagcaatttcctaacagctttttgcgatacatttactcgattaaacattgaaaactatggtttctcgttgcatcataaaccatgctctgataccaccttgtaacacccctatccctctataaaaatataaacaaaataggagcttcatgtcagacgcccgcagtcggccaacccaggtttccgaaacaaattcgttcacctgagttgtccaaccgcaagagtccagcctcccgctcgtggcctaaggcttttcaacgcgtaccgcggacgcgagttgtgtaagccggataagacttatatgagtcagtataaccatataaattttagaaatcggagtcttatacatatatatatatatcatacgagaaatggttaccaaaacgtatatagttttcagatcctttttgaaaaccatacataatctacttagtaagaatttacaaaaagccgtaaaacctacattggtttgtcctaactcacgagcaccctctgcaaggtcggtttactatggcatcctgaaaagaataagtagcatcataagtaatctagcattacttagtgaaccccggatctagacagtgttatcctaataccctttcttaccccctaagcagcaaacaacacgtaacaataatacaacctaacaagcaagacataaaaaaagataacacgtaacacacaacacaagcaaaatataaagcacaatgcaaaatgtatgcagactcaaatttcctaatatgcagcagacaactaatgcaagcatgcttctatcaacctaggtaaggccttctacaaatccatgatctcccaaggacatgcctccatactcttagacacaaagtctataagagacatagcattcttttatactacatcgtcatgtagcgcccggtcggtaacgatccaacctcgagccttcgtatgccataacggaacggagttacatgcgacgcacaacatacagacgggatcctcatggttcggctaatgctagtcatctaattaaagactaactaacatgacaacagactcacatactatcatgcattaatcttatatgcaaaactctactagtcaaacaactaagcatacttaattactactaatcgtaattattccccctaattatggtttaactagccctaatcatgcttaggaaatactaatcctaattagtcatcactaatcctaagtaacaattactaaacctaattaactatcctaatcaaggattaagcgaataattaagctaagtaatcataattaacctcctaagctatattaaggaaataaatgaataaactatcctattcacgtgctacttcacgtgactcaaaactcacttggatttcccgagcggtttggcttataaaggtttcctcccgcgaactaagctcttctcagcgatttttgggtctgaagaatcaaatgagcagagagggtatttatatgggcgttaggtcggctatggggaagcacgaggtggctcggaccagtctgaacgcaacaaatatcgtcccacgggcattccgggacactaatcggcctctgattggttccttccgttttttggataaacatcatccaaaagtggataagcaagaacctaaatggataaggatgaacggcttgtagataagcttgagccttaacggataaacatgagccacaattcactcatggtcgtccgtttcctcattccggcaaaacctacgatctgtcactggaccgcaagaacattgataagacacactccgtccccaatgtctcatgagggccatgatacaaatcaaggcttcgttaggactatacacgttgcatgcagaattaactgagta

SEQ ID NO: 22341 - DNA, 2906 bp, Arabidopsis thaliana
actctctatgaaagacaagggtaattcgcctaatatgaacatctcaatagaagcttctctaatcactgattcagagactttatacactttaagactaccatcagcaccatcatgacccaaaacagtttgagtattctctttattgctactttgccataccttgtatgctttgcaggtcaattcaaaatgtttcttcaaggtagaggtgcctgacttggaaggacaagccaattgtttcccacagtaataacaattgcacttgttttcatttttttttgtctggaaaagagatcccaaacataagaccgactacttgtcttctttttcttcttagagctactacctccgtctccttcatctccagtttctttattcttcctcttatttccagaagtgggaacatcatcatcatcattgtcacttaatccaacgtcatcaaaatcatctggaggttgagtttcatttgacgccatctacaaaatcaaattaacaacattaagaagagaatacacttaacaattattttgagtggacaacattgaattgaaacacgagtaacatgacccaatcatgttatgaaaagcaacaatatgaaaaacaaaaatatatgaaaaacacgacaatcttaatacgagtactcaacgtccacattctcaacgttcacacgccatcaaaaacacgagtacacgacaacataatcaaaaatacaatagcatgacccgacgtcccaacgagaatacaaatcaaacaatataatatatgaaaaacaacaataatcttaatatttcacttcagaagcctaacctttttctaaacattctcaaaccccaaaagtatttaattattataaatctgtaacacccccgaaccgtcctaggactaaggaacgaatccggaagcgtcacgtatggttggcgaccgcccgcagacgaattcggccaaagatcacccaaggccaggcccgaccgcagaagaccgcccctggcgaccacgggacttaaaggctttgcaacccgtaccgcgaccccgagttgggattagtccggactagactaatgagaggaaacacgagagttttaagaaaaccaatttcttattcatagataatgtattgaaatacattaccaaatacaagtataggttttgggtatgaaaacaaagctccatcgagtcgtaaatactatgatacaaagatatcgattttacaaaggcaatgaaaactacaccggcttccctaacatccatgcttaaactaaggtttctaactaaggttacctacaaaagagagatgggggaatgagcgctaatcgcccagtaagtcctagctccctccaacatgcaataattccccaacccaaaacccaaaataacaagcaacatgcggaagtataacaatattgaaagcataacctcaagcaatcaataaaataaacaatcaagctggttaccatgagtacgtcgactacatggaaccacatgcaacacgcaatcaagcataactagaaacttaccttaattcggttgaacggtttagactcgatctaatcctaatcctaatcagcctctaatcgtctaactaatctactcggcagagcctcggcattactcgaaagctcctcgggacgaactagtcgtacccgactctcaactctcactcatggactttttagagagattttagtgcgtttggtgtgaatgaggaagaatgaggcggaatgactatttataggggtggtggggcggtttgggaagcacgaggtggccagataggctcaatcgagcttatccgtaactctatccaaaaacccgcggatagacttgatcgaccttatccgtacgcggataaactcggacgatcttatctatatggaacggatagacatgaacgaacttatccacaagtcgatccttatccgcttccataattatccaaaattcatacttatccacactcgttcttatttgtaccttgtccctatccactcacgtccctatccacttttgtccctatccgttctcgttcctagccaaaaccatacttatccaaatctcatctctatccgattccgctcttaactaaaataatacctatctgcccacgactatactaggccactaattctattaaaatccccgatcatcaggcatgatctacgtgatccaaatgctgatcgcttgggcacaagtaaagctcgtcgaacacgtagcggcttatttggaaaatagtacagaagcagcgcctagtaagggatgagatattactaagggccacggtaccgggtgaaacacatcccacgcactcagggacattaccgttaccaacggtgatcatcttgtagaaccgtaaccacgacgggtttacgcgttccctcaatgcatcaacacattaatctcagtcacccaagtccccgttccacttgactcacccatccggttccccgaccacttgttcataactatctccaaaactgccagaccgttggtccgacaaacaatactcttcccataaggactttttccgaccgttccgattgtacggcttgctaaatcgtcgagtaaaattcctcggcctagtcctagtcctggccaggggtattacaatatctatcccgacctttgaaatcatatagccgcttatagaatactttctcctcaggctatgacaaagaaaaaggtgcaggtggaagatagattattttacctcttttaataggatgtaaatcttttctaacgcaaaaaagttgtaaatctttgcgagtctttaacccattctttggtttcccacagtgcaacaatgcttgcacacacaattctcttaacatgtatgacattgaaactgtgtttaactgccagatcttgaaaaataaaataaaagtaaatatagataaatgctaaactttgtaagc

SEQ ID NO: 22342 - DNA, 1058 bp, Arabidopsis thaliana
atatactgatatgtaatattctgtctccgggagaactagtaggggtgaaggatattcggcagaagccgttgctttaccatctacaccaaataagaataacggagcgattacgttagtaaaatctggcactgatttagtaaaaaccactccagctggagaatacttgacagctgcattgaatgactttgaccctgaagaatatgaaggtcttgctgccattgctgacggcgcaaacaagctactaatgctggtacttggttaagaactagtttcttagtatctttattagacttttcagtggtgtagttatatgacatgacaccattgttctatcataatatgaagaatgaaggttatgatggattcctgatgtctctagacactaatatcggttaaggacatgtttttatatcaacttatattggcaagcatttttcctattgttgactcgcaggttttggcagctgtcatcaaggctggtgcttccagagagcatgaaatccttgctgagattagagattctgtcttttcatttattcggaaaatggaaccaagaagagtaatggataccatgcttgtttcccgagttaggatactatacataaggtccttactggcacgatcaccggagcttcagactatcagggtgagcataggcatccgagttgtatctgatttttattttagctttggccttagcttgtatgactatgttatttctcctggtaaaattaaccctatcctcctcatttaggtctctcctgtcgagtgctttcttgagaagcctaatactggtagaagtaaaagcactagcaggggtagcagcccaggtagatcccctgttcgatatcttgatacgcagatccatggctttaaagtaaatataaaggcagaaaggagaaacaagttggcatctgtggtatcaagaatgcgtggacttgaacaggtggatttaccttggaagagcacttgaatttcaaagatgcttgagtttatctaacatgttatatattaagagagacttatgctctcgattgttatcatctaggatgctggga

SEQ ID NO: 22343 - DNA, 2261 bp, Arabidopsis thaliana
atgtttccctccgtcactgatcacaactctcgggactccaaatctagggaagataattgtcttgaacagctttagcacaactctagcatcattggtggggttggctatggcttccacccatttgatacatagtctactgcgaccagtatgtacttgttcccgtaagaggaaggaaacagacccataaaatcaattccccaaacgtcaaagatctcaacttctaagatcggattctgaggcatctcattccttctgctgatgtttcctcttctctgacatgaatcacatttcgagataaattcctgagcatccttaaacattgatggccaccaaaaaccagcttgcaggattttcgatactgtcttgaacgttgcgaagtggccaccataggcagacccatggcaatgcaataggatgccttcgatttcgtcttctgagacgcatctcctgtagatcttatctttgcagagtgtgtagagataaggttcgtcccagtagaaatggttaatgtccttgaagaacttcttcttctcatagctcgacagattcggaggctcctcaccactaaccaagtagttgacgtgatcagcataccacggaagcttttcttcaattgtacatacttgatcgagtgatttccgaatttgtgcactctcgttaagttgctgaattgccattagctgttcttctggcatggagtcgtcaatagggacctcgtcttcaatcctcatcctagacagatgatcagctacaccgttttcaattcccttcttatcaactatctccatatcaaattcttggagcaataagatccatctcaacagcctaggtttggtatccttcttcgcgtatatatgcctcagagcagcatgatcagtgtagactgtcactttagaacccactaggtagcttctaaatttttcaaatgcaaataccacagctagcagttccttctctgtagtggcataccttacttgtgcatcatccatcgttctgctcgcgtagtagatcacatgcagctttttatcaatccgctggcccaagactgctcctactgcgtaatctgaagcatcgcacatgatctcgaatgggaagtcccagtttggagcttggactattggtgcagtgatcaaagcttccttgattaacttaaaggctgtcaaacattcgtcatcaaatgcaaactcggtttccttgcacagtagtctggtgagcggtcttgccaacttggagaaatctttgatgaatcttctgtaaaatcctgcatgtccaagaaaactcctgatgtctttgacagttttgggtggctgtaactgcatcatcacgtcaaccttagccttatcaaccacatttttccaatatcctgtcttgaaacttattccaagcactcatcgaaccaatattcttttgcgcaacagtcagactcttactcactcttggtggtggtttgtgttcctcaaaatgtaatctacttgcattgtagttctcccaatccatgaagtgacacttctctcagttgagtaccaaattggtttcctcacacctttctagaaccctgcacaagtttaacaaacatgaggtgaaagaggatctataaactgaaaaatggtccatgaatacctccattatctcctcaataaaatccgagaatatcgaaatcatacttctctggaaagtcccaggagcattacataaaccaaaaggcattctcttataagcaaaggttccataggggcaggtgaaagtggttttttcttgatcattagggtgaattgcaatttgaaagaaaccactatagccatcaagaacacagtaataaacatggttagctaacctgtctaacatttgatcagtgaatggcaagggaacatggtcctttctagttacagcatttagtttcatgtaatcaatgcgcattctatgtcatgttatagttctagtgggaatgagctcatctaaatcatttttaactacagtcattcctcccttcttgggtacacagtgcacaggagagacccatgtactgtcagaaattgggtagattatatcagaatcaagcaatttaagaatttcctttttaaccacatctttcaaattgggattcaatctcctatgtggttcaatactagtatatgattcattttcaagatggatcctatgagtacataaactcggtgaaattcctttaatatcagctaaagaatacccaattgctctcctatactttctaagttcattcaacaactggcggacgttactag

SEQ ID NO: 22344 - DNA, 1925 bp, Arabidopsis thaliana
aaatttagaagtggctgacttgtcatagcattgcggctgggttttcactgatttgtggctgagttatgtcgtcatacagtatgtcactacttagcgtgttgctttaggttgggtttatcgagattatttattatatcattatcgagataacaaacagcaactttatggggaaccgccagtaatgatttggtccacatgtacaggtacacacgcccgtagttaatattcaaaataattcaaacgagttcgaaattattccttaactaaaccctctaataatcaaataacgtaacggctgagttattcaataagatttcgtgttttggccgagttatgagataccatatgttattatgatatatcaaactgaccaccaaattgttagttatattattagcttgaagatgtaagtatataattgatttgagggttttattggtttcgttgttaattgcggatgtgattgaatatacaggaccatttgtttaaatgggtcgaagatggtacatacgaagtggttgtagacagttggctgaaattgtccgccatgttttggatgagttaattatacgctatgactgagttaatcatacgctatgactgagttatgataaaatttaacaagtaacctcaagcgataaccgcagactttactgagaaggcgaaggcgatcgtagataatatgagatataaagccatcacaaaaaaaaaaacagagaaacatattgagttcatcggaatgagataaagggacgataagtaagagacacaaaagcattcaagacatgaaaccgacatcatctggaccaaattcagtaaacatgtccaccaaatcattccaaactgttgtcgtcatccacctcgacttatccaaaccacgcgcccatcgccgtttcatcgcccgcatattgtctcggtacaacgttctagccaccaaattaaactgcgtccacaccgtcagcgtgtgccttgaatcccaggtgtgcatacagagagtgctacaaagagaacaaatagtaagaatttggtctacggtttacaggaagtgctttatataaaaactcgatgcttaccgtgagaaaaaaaccatcttgccttgaaaacaacgggaatcatccggtacgtcggccacgcatggtgaagttgcgctggagtatatctccaattgcgacagatagttggtgattgaatctgaaccacgtatcaacccatgtacccaagccagggtttagaactgggagattcgcccgatcaggagcagtgagtacggcttcgacatctttgataaattgtccgtcaatgtgaggaacaaccatgtcgtcaggaagagagggtgagacgtgtaaatgatgagatgaagtaacaaatatatagaaaaaaaaaagataggtaaaggaatacgaaaggttctgtgtccgaccgtttagcgggaaagttttctaggttacggctaagtttggcggcaaaatatattgttacggctgagttacactcaagacatgtaacaatgttacggctgagttgtcaataattataaaataaaacatttaaaggaatacgaaaggttgcatgtttggcgggaaagttttctaggttacggctgtgtttggcggcaaattgtactgttacggatgagttaacccacattacggctgagttgtcaataaagcttgaagttccattcgatttactgactaaccgatttacggttatatccgacctaattaacaacggttcaatacacctataaaaacggctgctcctataaacttccgaaggctaaactctcacaaacagaagatcacaatcaaaatatttctttacttttcaaagactcggaatttcatcatggcgtatttcgacggcatttgcgacttgtctcctttcataactagctggacgatttgtgttatgattcttagaac

SEQ ID NO: 22345 - DNA, 458 bp, Arabidopsis thaliana columbia
ttgatgcagctatgtaaatggggctaggattatcgtcagcggtcccgatttggctcgagcgttgaagttgcctatgaataaagactttgttgttacagaggaggagagagaacttctggaaatcgatgaatcggttaggtttattgatgagattgtttcaacttgtgtgctactgcaaatagatgatatgtggatgatgcctgtagagattgttgaatggacaagggatatatagcaaaagcatttgggaaagttagactggcccaaattgctctggttcatggttgagaaagaactgaaagcggcgctccgcttggtgattgtatttttgcttctcatctgcagctgttgatcagatctcagaaagaagatttgctaaaggagaagtgtaaggctgatgatgaggaggatgatgatggtgatgatgacgatgtataggaggttggttttttggtaaa

SEQ ID NO: 22346 - DNA, 965 bp, Arabidopsis thaliana
tttattctcagatgtatatagaagatgatgtgattttcttatgtaggctatgaagcgcccatttacaccgatgaaggaacttaacatggaagaggtcattgcggacatcgtagagaagattaagtaacacagctagtaggttctaccaatgccgagtctttcgtttcctccttggccctcggctaataggcttcaatatctgactatctagagcaactgcaggattttttaggcttaattttgatatattggtgaaaaccatttgagcacggtttcgtcgtttggtagtgcttgatcggctttgtgcagtttctttatgctaaaacttcctgatatatatgggattaagtctgtcttcgtaatgctagtttgaagcaattcgtttcgtttcatttattgttggattgtgtttggcgttcaattacgttacggattggatgaatgaagataaaacatttagttacaatgtggtaatacaagcttcacaggacagaacatcacactttcattgtctaatgataaatgattgaggtacaataatgtgagtagaaattgttagtgtctttgatccacttcgtatcaccattgcctctgtctatgttcgagtctcattatcagtttaatttatcctcgactcgctgtcttaaatcatcttagaacccaacaaagctagccacaaacccgagaacaaggacagcaccgaagctcaaaccggtgttagaagcagaagaaggtggttcagcctcatcagctgctgccatcttcttcttgccagacttatctggagctggagctggagaatcactttctgatggtgcagatgcaggtgcggtttctggagctaaaccaggaggagcatctgcataatccccttcatcagcaggagctggagctggagtggctgcaccttcttgggagatggggccggtggtgaagacatgggtggtggtggaggaaccttaccg

SEQ ID NO: 22347 - DNA, 553 bp, Arabidopsis thaliana columbia
tcgattaggacttcatcttcacaaggtaattttttttcccaaactacagtttcaggatgtttagcaatgaggacgtgaccataggtgcgtggatgctggcaatgaacgttaaccacgagaaccttcacaccctttgtgaaccagagtgctcaccatactccattgctgtttgggatataccaaaatgctcaggttcgtttttctccgtccccgtcttgaagaatggatctaaagtcacactgcataagcatttctacaacaattgatcacaatttgcattgaaaatgttactggtgcaggcctctgtaacccagagaaaaggatgttggaacttcacatgctagagagctgctcaaaaagcccgactttgccatcggatgatgagtgatctaccattctgccatctaatattttcttctttaatgatctaagatccgaggcgtaacaatttgcagatctctttctctgacatgtcaccattgaagtagctcacagagattgtgcaagtcttttcacttactctgatctgttattttcggtgggaatgcaagaa

SEQ ID NO: 22348 - DNA, 471 bp, Arabidopsis thaliana columbia
tcccccatattagttattaaaaccaaatatatatttttaagacactacacacatttatcaaaacttggatccgtaaaaacaaatgtgaatgtaatcacatatcattgtattgtgcatatcagatattgaaaccaaatatatgtatttttaagacacatacacacatttaccaaactgagatcggtaacagcaaatgtgccagtatttttgaagctacatgccttttcggtacgaccatgactctgataatgagcattcatcacaaatgatgcatgatttacaagactattagggatataacaggatccgcctggttgaattggcccacaatcaactccttcactacatccaaaattaatatttccttgtagttgcgcattcgttgcgttcatgtttgctacacaccattttgtggaactcgccacatggaggtggttgatcattatggaagatagaatgatgagaagaagt

SEQ ID NO: 22349 - DNA, 516 bp, Arabidopsis thaliana columbia
tgttgcaggaaaatctgaaaccggaccagttttctattgtcgggtttctttcgtcttgtgcaagcttaggagcccttgatctaggtgaatggggaattagtttaatagataggcatgagtttttgaccaatctgtttatggccaatgccctgatcgacatgtacgcgaaatgtggggctatggctcgaaggttttgaagtatttcccgacatgaaggagaaagatatagttatcatgaatgctgcaatttctggtctggccaagaatggccacgttaagctctcatttgcggtttttggacaaacagagaagttaggtatctcacctgatgcgtccacgttccttggactgctctgtgggtgcgttcaccgaggcctaatccaagacgggcttcggtttttcaatgccataagctgtgtttatgctttgaaacgcacggttgagcactatggttgcatggtagatctttggggcagacacggaatgttagatgacgcataccgtttgacctgcgat

SEQ ID NO: 22350 - DNA, 551 bp, Arabidopsis thaliana columbia
cctcatcaacaacagccaccacaaactcatcatgagtggcggctcaaaccagaagtcaaggaagcaattaagtgaatctgaccatactttcccttgtgaaccttcataaagcactttaagatgtattgctcacattcactccatggcagcttccgcagttgcttcagtacgtttgcaatggaatctttatcaagatcagagaatagcaattttcgaacatactgcagaaatttgaacagaagtataagaataacaaatttcaatacaattgcgcaatggaaaattattgaaacataaaagatatggaagttggagattagtaagtacctgatgcaatggtggacgaactttagaaattcttgctgatctttcaggaggtttcacaagtagtaggcatttccacaagagtgctttgacgaggatctaaattcttgacatttttcaggcgcatcaatatgtccagcatatttgtcatcctgagtgtggttcaggagccgataaaggaaacgccacatgcgccagaagattcaagcacatcaatgttatggtga

SEQ ID NO: 22351 - DNA, 536 bp, Arabidopsis thaliana columbia
tctcgaagtcggaatattagagagtatcctagcgagagtaaaagcagtggccacatctccttcgtcttccattctctcagaagttccagtaggaaagaatggaagaacaagtgtaaacgaagaaacaaaaagcttaggcagagcataaataacccgaaagctgctcgaagatcacagcaggtgaactgaatgaagccaagaaagcaacatgctgcccacgaatgccttgagcattttgtatgaacaaattagggaatccatcatcaaatttcctaaaaacaagaacaacggttgtaaattactttgtgatcaagaacctaaacctcttccaaccattatacacatcaaacaaacccaatttgactctgcttaaaagcctaaatgcaaaattccttacggtgacttagagctatctcatctcaaggttctcgaatttgagcaacagaataagagcattgaccaaaaacacatacgaaactcatctgaaagttcaaatttttaagcaaaagacatcagattgatagagagattgatgg

SEQ ID NO: 22352 - DNA, 525 bp, Arabidopsis thaliana columbia
tgaccgaatcatatatatgacgaaccacattcacattaagtttttatctcaaaactatttaatgtgcaaggagcatagctagttaactaaatatcttctatatacttgattggttgatcatttgccattttgttactttcattatcaattatttttagaatgttacaaatcggaaatggagttgaatctaacattttaaataatggacatgaaattatctatttattaccactcgagatttggtttaaataccctagaagtttttatgtagtagttatatatatatatgtacataccaaatctccatcgagcttggacaagagcgacctcagggttgtggataagaaaggggatagcgcgttggaggtaatcgggctcgggctggaaatcagcatcaaagatggcaagatattggcactgcttgacgtaactgtgcctcatgccgtgcttaagagctccagccttgtagccatttctgttctctcgcctctcataatttatatttatgtcttttgatgcccattt

SEQ ID NO: 22353 - DNA, 493 bp, Arabidopsis thaliana columbia
atcgtcgtcttcttcttattcttctccaatttgattaattagagattggatttggtaatttggttatcttatacgaatggactcattacaattacacatttaaattgtcaaatcaatgctcgaatgttgttatatcgcttaaatccaatttcagtgatgttcctttaaaccttatgtgcaggcgattttggtgaaatcattcatgttcaacttgcgatagatcgagctgtaagtatcttatcaattgctcttggctggtttgcagatttgtttcctaagtactttactcataatttcgattgacattaacaggctaatctttcaagaggagatgcatatgttgaattcaaggcaaaaatagctgatgctgagaaaccactgctgtacatggatggtgtatgtatcaagtgatccaaagggagatgctttaaaatctgataatgttggtactgacattgagaaatatgataatcacctctgcctatgagtggtg

SEQ ID NO: 22354 - DNA, 584 bp, Arabidopsis thaliana columbia
ctcctctccaaaacccacaaaatcttttttttattgaggatcagttttttgacctgccatgcaagcgcacctgacatggcaaaggtcggatgacagagatgcaatcaggaagctattagctatccacaaaacatcttctacaccctaatctcaattcaatccaacacacacacatccgtctgcaacagattcgtctcctagtaatccagaaatgatgcctcaacttgaacaattcacagaatcttgcatgtgaagaagccgcgaaggacgatccagatctagatctgataatcaagaacaatattcgcgattacataacaaggttatggaaaacgaccataagaaaagctcacggtacaaggaggaaagattttacctatagaaaacggcagatctgcgacagatcaaacgatgtaagcgaagatccgtcgtcaacgatggaatcacagatcagatctacaaattcgttgagaattcggatcggatttgcagatcgggaggatctctacggtgattagaagcgagaaagacaaaatcgtcgccatattagctagatctaaagaaacattggcgaaaagagggag

SEQ ID NO: 22355 - DNA, 644 bp, Arabidopsis thaliana columbia
gattaaattatcaattaacatagagctatcgttttccaaaaggctaatcgttctaaaccaaacaccacccactcttaaacaacattaccaaatcatattcaaaagggaatcataagaacacaacagaagattatgatccaccattagaaagaagcttttagctatcccaaaaaagaaagaaagagagatccattcattggtaatggcagattccgacatagagacgagcagcaaccaaaatagcaatagcaacaccagccattcaactacttcaaccacgagtgttcatgttacggctctcgatgggattgtaagtgctaattctctcttcacggttgcagtctttgtcggaatctccttcgaccagccaagtgacctcaccctcacggacagaacagagtgcagtgcaggacgagacgtggaacgtgacctggttgtgtttgaagtcatctcatttgccttctttctcttctcctcccgttgtggctcaagggatgaagctagccatcaaccttttgaacagcaaagaaacggacgaagtgtttaaagcgaatatcaacagagatgtgcttcgtttcggtgtggttggtgcagctggtggatctatcttgggttgtgtattcttctgttgcaattgttgatgt

SEQ ID NO: 22356 - DNA, 572 bp, Arabidopsis thaliana columbia
ccgggtcgggtcaaagatactttctttaccgaaatctgtattcgtaccggatcataccggagcaggtcagacgatggtggattcaggtacccaatttacgttcctaatgggtccggtttacactgccttaaaaaacgagtttattacgcaaaccaaatcggttctcaggcttgtagacgacccggatttcgtgttccaagggacaatggacctttgttacaaggttgggtcaacgacacggcccaatttctcgggtttacccatggttagtttaatgttccgtggcgcggagatgagtgtgtcgggtcagaaactgttgtaccgggtaaacggagccgggtcggaaggaaaagaagaagtatattgcttcacgtttgggaactctgatcttttggggatagaagcatttgttataggtcacatcatcagcaaaacgtgtggatggagtttgatttagctaaatcaagggttggtttcgctggtaacgtcagatgtgacttagctagtcaacggctcggattaagagattgctaggacttgtttaagtcttctgtgtcgtgtgtgacatgaga

SEQ ID NO: 22357 - DNA, 517 bp, Arabidopsis thaliana
taaatctcactctaaaatgtttaatatccttgctggatgaaacagatacggtggtatgagaactttcttgtatcaaataaggatcagactttttgttcacatctcttttcttcccttttgttacaggtggtgcctaatacaagaagcagaagtcaaatgggtgagactactgacgggggtttgtatgagatttttcaacaagactatggacccgtcggctcaaccacctttgaaacagcacgggagaacttcctcatcagtagtgccggttatgcagtggctagtcttttactccagcccaaagacagacacaatggaaatctcctcttcgatgagtatgtttcctatttttgcacattccctttgttctttgattctttccacttggtgcattggaaaaaagtttatcaaaacctctcgatggaaaaatatagtgttggaaatttcatggaagtacacaactttataccatgtgttatgctaatcagcgtgggaaacttgtcacatcgactttggt

SEQ ID NO: 22358 - DNA, 531 bp, Arabidopsis thaliana columbia
tgtgctctaaagtctgcttggaaagtttagcgccttgtggattaagcgccagggcagatgaatgtaatctggcactttccagccaaaaagctggtacagcgagatttgccttactgttggttcaatcagatcagccccacgcactatttctgtaacgccctggaaatgatcatcaaccacaacagccaggttgtaggcgaacaacccatcacggcgatgaatgataaaatcttcccgtgccagtttttcgtcggcgtgaataatgccgcgcagctggtcagtaaattgcgtgaccggatgctgctggcggataccactgcggcgttgtctggtccatgatgcaacacccggcaatgaccgtcgtaaataccgccaatgctttgaatacgcgcacgcgtacaggtgcagtaataacttagtccttgttcatgtaaccaggcgagtgcttcacgataggcgtcgtgacgttgcgattgccagagaacatcgccgtcccagtgcagaccgtaatgttcagctggcgcaggatag

SEQ ID NO: 22359 - DNA, 569 bp, Arabidopsis thaliana columbia
cacgagtttctttacgtagttatatttatacctaaatagatgctaaacaaaagtagacattcatataccatatatatcataccttgaatccaactatattgtacaaacataaatactagtcagctttcatctctcatacactcaaaatcaccatcgcatttgaataacacattgccattataagactctatgaataagatcattttggtgaagtaaaactaatcgtcgacagactcgaatctgcttatgaaatgaattaaactctgacaaaaagaaagaacaatcttatttctctattcgcaaccgcacaaatgttggcgctgctgtggaaataattacaaaggatcatcaccacctgattcttcattgattgctcaagtttttgatgagatatgaaagtatgtctctgtggttgaagtaagcgagttccacctatgcacgtttacccttactttacaatgaaatctgagtttcttcaccaaacaacattttgaacaatgggagtggacaatatcctcagtgtcaaagcggactatgcaggtggaaaattcccagtgtctgtattggta

SEQ ID NO: 22360 - DNA, 571 bp, Arabidopsis thaliana
ggttgtgccaaatacacgaagcagaagtcaaatggtgtgaaacaaccgacgggggtttgtatgagatttttcaacaaaactatggactcgttggctcaaccacctttgaaacagcacgagcgaacttcctcataagcagtgccgggtatgctgtggctagtcttttactccagcccaaagatagacacaacggaaatctccttttcgatgagtaagctcccgattttgcactttccttttcttcttcacttggtgcaatgaaaattaatatcaaaaactttctatggacaaaatatatgtatttaccatgtgttatgctattgcagcgtgggaagacttgtccacatcgactttggtttcattttggaaacttcacctggtggaaacatgaggttcgaaaatgctcatttcaaactgagccacgaaatgacccagttgctagatccttcaggtgttatgaaaagcaaaacatggcatcagtttgtgagcttgtgcgtcaagggatacttagctgctcgccggtacatggacgaaatcattagcacggtgcaaatgatgctagaaagtggat

SEQ ID NO: 22361 - DNA, 406 bp, Arabidopsis thaliana columbia
cccatgttaagtaaattttgttttctgtttttaatatatagatattttaaagtagagatcatattatttatctctatatgtaggtctggttatgctataaatggcatattcaaatcaattttacggatgttgcatgggatgctccaacatccgtatcttacgtacaatgatatgcctcgcaacaatcaagacatatggtttagaacttttgcggtaacgaacgtattattacgtaccattattcagttggctaccctttctaacataataccacttgcatgaagcacgaattaagtcgggatcatgtccacacaccctctggccgtgttgggcttcacaagtatgctgcatcaaaattttcagaccacatgcacattcggagagaaaagtgggcagcaggcgagtg

SEQ ID NO: 22362 - DNA, 498 bp, Arabidopsis thaliana columbia
agaacaaaacaggaatctcaacgtctctcctttacaaggctacacagtttccagaaaagacgtaacccaacagatagacatacttcactgtatatacagggccttgggaaaccagaatacgtaacacaagagcatcgccacaaaaccaactcacaccaagaaaacttctcgcttctatctttgcttttcactactcatacagagtcaaataggccaagttctacctcaaaacgatatgttctgtgtgtggcagccattattagatcccgcatatccagtcttattcgatttgggttttcttgtttttcttataacacaagtttacaaaggaaaaacgtaaatgtatgtacactcaaatgactagcaacttcctgtggaatccgttgttaaagaagatcaatagcttacttgaaaactaaacgtcaactcatcagcttccaccaagaactctcttgaggtcattcttctgttctgacgttagccttgacgggaacaaga

SEQ ID NO: 22363 - DNA, 551 bp, Arabidopsis thaliana columbia
ctttaattcatttattttacaaatattgccgttttgatacatttcataaatattaaataaattgttaaaacatttatctttaaaagtgagaatggaagttatgtttttttgtcaagaggttgtagaaacaagggagcatctatttttctctcgtccctactccactcaagtatggtcagctctaacccaggatatgcttggtttatggtttactacacgctgggagtctctaatccctctaatcatggcctcgactactccacaagttgtatgatcatttattaattagagaaacaaattaatactagatatagaacataccattcatatctagagacaaggcatttccacgcccacatacttgaatcatatttttttgtggcaattcactcctagccaattgaagttgtgtgatgaatgttttatctagggtgttaagtggcttcattcgaatggaacatattgtttcttaatgcattgggatgatatccaaaagttgagcccaagcatctcatcttggcattcaaaacttttattagcttcagacttgc

SEQ ID NO: 22364 - DNA, 604 bp, Arabidopsis thaliana columbia
cttgagacttttgagaagatgaaaaccaaaggaatagctccgaacattgtagcctgtaatgcgtctctctacagtctagctaaagcgggaagggaccgagaagcgaaacaaatcttctatggcttgaaagacataggactggtccctgattcagtaacttataacatgatgatgaagtgctacagtaaggttggggagatagatgaagccatcaagctgctttctgagatgatggagaatggttgtgaacctgatgttattgttgttaattctttgatcaatacactttacaaagctgatagagtagatgaggcgtggaagatgtttatgagaatgaaggaaatgaagctgaagcctacagttgtgacttacaacacattgctcgcaggtctaggcaaaaatggaaaaattcaagaggccattgagttgttcgaggggatggtgcagaaaggttgtccactaacacaattactttcaacactctctttgattgcctttgcaaaaatgacgaggtgactctagccttgaagatgttgtcaagatgatggacatgggttgtgtccagatgttttacttacatacgattactttggttggtgaagat

SEQ ID NO: 22365 - DNA, 626 bp, Arabidopsis thaliana columbia
tcatcagcaagtttcacagttgttgttgaaagcccgagagtcccacaagttatctgcatttcccttgtaagttccatgagaagaatataccttcaacacaagcaaaagctacgattctctcaacgaaggtttgagatccttcgatccatttcatagcccactatacttttttcatcacacaaggaatgattttgattgcgcgaaagagatgatatttctctgtttgttttttgctttagattaaagcagaagttcttagctatctactttaaaccctaacataaacttaagctgtgaattcaaacacaatacataacaattcatcagaaacatataagaacagtgacataaataggatcttctaattctgtaatcaaccaataaagaacataaatttccacgaaataccaaaatctaaacaaaaaccagatgcaaaacaattgaaagaaacaaagactgtttaggatgaatcgtaaaaataaaaacctaacctccaaaattcctcaacagtcgaaaacgtgtcgcaaggaacttccctatatggttattgaactagaaattccacaaatgttctagaggatgcgatttatgagccgcggatttcgttgatttgcctatgacatacg

SEQ ID NO: 22366 - DNA, 517 bp, Arabidopsis thaliana columbia
gttagctcattttcatgatttgagagtcaaaattctttttgttcaccaactgtttgatgaaatgtctgagagagtgcaagttttaaacataacttttttatgcttgaagctatactgaagtagtgttccatgtctaccatggtggatattgggtgaagcattatactggggatttatcctaatctggatggtcatgaaatgaagagtataacatgtaaattggaggagttttttacagttatgtcaacggagatgagcgaggagttagatgggcagaagatttggtataagttgccattcgaagaagctaagcaacagaagagcttgagtaatgtggatataagttttaagaacatgtgtgaagcgggaaaatgggtcggatttctggatgtgtatctcgttaattcaatagagcatcctcatgacatggacgtgaatgacccatttgaagaagagattagagttgaaaggaatatggcttcttttgttgatgaagatcaaattttgactaccatga

SEQ ID NO: 22367 - DNA, 2961 bp, Arabidopsis thaliana
aacctgtctatatcttaagattatgctacgttttatcattcagaggatgatttgatgagatctcacattcagtttgaatcacagttcttgaatgacagtggctgttaatttcaagtgttgatttggttgaatttgtggttctatatggtttagtcctaccttatgttgcaatcatattatgtacatatgttggttgtctactacgtctctgggtttctgttgtgatttgtttttgggcctggtataaggccctgtctgttgtttaacggatctggtttagtgtattgcagcctgtcttggttttcgtgctgttttagggtttcccttgatgcgctcgtgcctcttaaacctagcagctctcacagaaggctcattctccttctctgctactcaaacctcaaaattcaaagggtttctttctctaaaaacacaagtcactatcaatcaagaagcgacctcgttaactggagtctctggtgctggtcagccttccgctgcgactccttctgaccctccaccgcctccggttgctccaatgttcattcccaagactgaaccaggcatctgcatgtctaagaaaaccaagtccaaggtctctactttgactcagcgcaagagacagtgtacggctgcatctgccaagtttagatctaaagcgcgtgctcctgctctccgacatctgtcaagcaggaaatccaaccgatctgcctctcctgctggataatctgaagaacttgtccgtgactcttcagatctgcaagatggtgatgtcaccgagattgctccgcctctctttctttcttgttaccgagagaaccgtcggcttcttgctgttcgtgatcgtaagtatccggagctcaaattcccatcggagactccctacagtagctgttttctgactgaggaaggtcttgggcgctacaaggtcatcgggaatcgctgcttcaacgacatgcgtttccttcctctggatggaaacaacactgcgagtactcagcaacttctcttcaatggtggtttgcttcctactgtcaccgaaattgactcttatgtgcatgaggttgtcatggagttctatgcaaaccttcccgatggtgaagaaggtgataatcttgcctactcagttttcgtcagacgaaacatgtatgaattctccctggctatcatcaaccaaatgtttcagctccctaatccttcctatccgctggatggtatgtctgagattcaagttcctgagtccatggatgaagttgcgattgctctgtcaaacggcaaagccaactcctggaagatgctcacttctcggttgttatctcctgagctagctctgctcaacaagatctgctgtcacaattggagtcccactgtgaaccgctctgttctgaagccggagaggatgactctgctttacatggtggccaaagctctaccgttcaacttcggcaaactcatctttgatgaaaatttgggcgtattcgaatgtagttgcgaacccctcctctactctttgtcttgtccttccgaacctgattgatcaaatgctgcgctttcagccgattgtccgctctgatgaaggagataccacttcgtctgcaccgttgaagttcaccatggaagtgaaacctgttcctttgctacagtctgacagtccaaccttggatgcagctctggagaccctcattgcatctctcacaacgatgcatgttcgtctagcaggtaagcctctctcactcaacttacactctgttttcttttgagaatggttttttatatgagtgtgcactcaagcagggggagagtattctgatgtgtcgtactctgttccggatgatgtgggagatgaggatgtggaggaagaggacgatgatgatgagttagatgacaacacttaattgcttagtcctggtcattttttttttagttgggcattgtgttagggggagtttgtcactgattgtttttgtgtgtttgtgaaaactccttgatcttgtttcttatcggcttcttatcggatcttctgtgtgtttaatgattggtcttatgtatggaaccaagaacttatttatgtttcatgtttaaatggttatgtcttttggcagtagttgcttaaacttgagcctttggtttctatgtttggtatggaatattgcttggcttgtattgtggtctctactcttttgcagattacttgaggtgtcacactcaaataaaaagggggagattgaagaaacagagtgtctgaagttctacaggcgtgtctgaaacaacacagagcagaacagaggaacagaggaagcgggaaagtagcagttgcttttgccagcgtggcatgttgattggagtgaaggaaaggcgtatcgctttagacaaaggagacgaagtcgttagacataggacgtgggcctagttgtcaagataatgatgaggagctacacttggacctactggataaagtgaagcatcctgccttttccgtgaaatgatataagagaagtttcggtctcttattagggttagccactttacttgtgaaaagtggaagagaagaaaagttaagtagaacttgttcttgtgggtttcattggtgagtgaacaaagagagcacacggctgttgctgtgtttgtgaggtgggtagttttagtatctgataggagcaaatcaggttgttgatgttgcgtaacactgtccaaacttatctctgattgatcagtttgaaagttgttctaataaagtgtgtttattggagttgtgttctttgtctagtcaaagtacttagggatcttttacttcagattagacccttaacccggctccggggaactctcgggtaagccactaggctctgatctcttcttgtctctgttcagttttgtctgtctgatggtgttttgatttgtaggtttgacgatgactcttcagttgcaactactgtccggagcatttttgaaagagatttctct

SEQ ID NO: 22368 - DNA, 629 bp, Arabidopsis thaliana
tatctctatgcagatatcctttggaatgtacatattctattctagttagctgtaaaatcggaataagaaaatcataagcacattagatgataaatgtataactcaagagaaatgattagtatttaaacagaaccagacgcaataaatgtgattaaaactcatgccataccatttgatcagccaacatcaagaccgtctttggtgaaaattttctcccacagtagacgaaaagatcttcgagacttggaccgagcaaatccatcactaaagcattctctgttccatcaactccaaaccatcttatgcgcggaattccacctgcaaaatgagcattgtactgataatcaatccctccaatgaccaacaacgacagaatgggaaaagataggaatgagaaacatacttcctccttcaagagttctatatagcttagcttcatagagaagctgaggatgttttgttttactgttctcctgcaaaacaatccaaatgatctgagttaaagacaaattgtcagctaaaaagtaccatttcaaggagcttgactgataaatttagagttaacaattcaaagaccacacgaaacaatgaacatgatacaaaattcccagagtagattcgtttaatag

SEQ ID NO: 22369 - DNA, 513 bp, Arabidopsis thaliana
ggacttgttttcaaaagtattatgttgaacttgtaaaaaaaatttatatagctgttgaaatttccaagaaaataaggttttacacctaaacccttccactatatatataaaccccacttttgtctctatatctttactaatttcttaaaccctctcaacaatacgtaacaatggcctccaaatccgtcgtcgttttcctcttcctcgctctcgtggcttcctctgtcgttgctcaagctcccggaccagctccgaccatatctcccttgccagccactcctacaccgtctcaatcgcctagagccaccgcaccggcaccttcaccatcagccaatcctcctccctcagctcctaccactgctcctccggttagtcagccgcctactgaatctccaccagctcctccgacgtctacttccccatccggagctccgggcacaaatgttccgtctggagaagctggacctgctcagtctccctaagtggctctcaaacgcagctgcagttagcaga

SEQ ID NO: 22370 - DNA, 1095 bp, Arabidopsis thaliana
tgaccaaacccaccattacccatcaaacctcttccacccatcccattaggcctattcctcattggaccacctggtcctctaccacccattccttgagcattgcctctaccccaattacctctaccaaatcctctattttccccaccttggaaattcccgccaatgggtgtgttgttgttgttattgttgttgttggccacgagtggtttacttggaggatcagcaggccctcctctcttagcttgtgcaattacagattgagcctgttgggtcctattcacctgtgcctctcccattctcttaaccgaatatggggacgcatactcaacaacacaaggcctaccgttgaatggatacccattcagcgcatctttgcaagccgaagctgccacaggatcatagaactctacttgacaataccctttcgacttcccactagctttctcatcaaagaacttaacctccttcactgcaccatacttgcacaactctgcctcaaactccgcatcagttgtccaccaatgcagatcccctacgaaaagaaaagctccaccgcctcctccaccaccagttcccccgccaacaacaccaggcatagcgatattagctccgttcccaaccatgttactaccaggtccaggaggaatcccgccattaacattacccatcacaggtctcatcaaattctcgttattccccaacacaggcggtggtggcaagagaccctgcgaaatattattccctctaggtgcctcgagatcattagcccgattagaagcttgccctagctcaactctcagcccacctccagtaccagtaccaattccaccaggaatctcctggctaacatcgcttaccttaacctcctgagctccatatccactagaagcgaccaccacatcagtaccacttccacttcctcctcctcctgactctgcttctgcttctttctcaacgctctcaccaaccaaaccaggtatcgaaatcgaaacctcagcttcacctaaaactggttcaaccctatcttcctcctccatattaaccttctccttttcctcgtttctagatcccgcttcgtcgttctttttcatagac

SEQ ID NO: 22371 - DNA, 3410 bp, Arabidopsis thaliana
taaaatcctaacacacataaaccatttcagaaaataagtttgtcctctacacataaactacgcataacattcccaaatacacaaaaagaaagtcctattttgacagacacctaatagtccacacacacacataagcaagaaagaattttcaaagtcctaattcttctgtctcttcctcgtttgcttcccctcagttgtaaactcttcccccttatacttggaaggtttccttccacgtttttccccagattccagagtaggaccaacatgctttctcttcttcttcgatatctgcttcttcttcttcttcttcttatcctcttcatcggactcatcgctgccatcacctacaaaaatatgtaaccaaacatctaagaactattgtgaaagcatcactacacaaaagttcaacaaaaactcacttagagactcaatagttggaggtgctgggtcacggattccactgtgaataaccaaggccttgctctgagtatcccttggctgataagacggtggcacaaaatcagcagctgaaccaggacgcatatcttcatatttgtctttttctgcctctttctcaagctgatctgccacatattcctctattccttgtactctcacacaaatccgcttgatttcgctatccatcacagcaagcttgtccgtgagcttgtcaaatcctctctccatagcttccttgaacgagagaatcgatgtcccagggatttcaggttcaggtacagctggaacatcatcaacagtttcaatacgtctaccatcaatgtccgcttggtagagactacgccagaaaatcttctttttctctacgataagcctctctccaactatcaacaatcggatcgatatatccaataccatcatcaacatgcttctctacaacgcgtgacaacatttttctctcatccatatcaggttccaagatgcttgaaatatcctgtcaagtaaacatatatttcaaacaccacaaagattataaacatagatttcaagagaacaaagctaaccgttatatctccaagtgcttcatttatttcttccaaagtaaatcccttcatgcaactttcactgaacttgtgcttgcacattcttggacattccttgtctgcacgtacagcttctctaaatctcttcccaagctgcggaatgcactcaaatgccagaatctagacacaaaaacataaaagtaaatgaaagttcacaataacaaaatctagccactcatataatttactcgactacttacctcaagtggagtaataaatccataaaaagcagtctgtgccttgggtttcaccacacctttcatgttcttcattactctccgcaccccttccatacactgctcaaaggaaaaacgtccccacgggaatgtctcacaagctctgacattatccacaatcctaagcaaaaactcctctatcttcgaatcccctttagaatcagctttcataaccttagctaagaataacagaattgccaacttcaacctagcagtagacttctcactcttaaactcttccagcttctcttccacgtctttaatcttgatgtcctcagtcctcttaaacaacctctccacaaacttcaaactgcctaaagtcttatagttttttgggtactcacggcagttcaaacaggtcaacaatgcatgctctctaattgagtaccttataggtactccattgacaacaaaccaacactctctctccaattctgtcttagccgtgcgaaccataagcatccacatgccttgaatcatgtgattgggctccttaggcatgtggaatatgtgcttaaattggtcatgattcctaaaccacttcagttctgcatccaaagtctctataaattccactgtttgtaccaactgacacctcgttcctatcttacacaccttcgtgtaggtagttggatcaaagtacataacttctggcggcaatggttgattatcatcatcatcatcatcatcatcctgcatattctgcggctgaagatcatcatcaccatcctgcatattctgcggcaggttatcatcatcaccatcatcctgcatattcaattcaaaatactttcaatttcacattaactacctagttgtactacttgttcctgaatgaccattcacaaatttacgacctagttgtactacttgttttatctgaagcaccattcacaaatccaatcatttaccaatgcatgcataatatcctaaaacgagcctaatcaaaaaaaataacggtcttctatcataccttatttgctccatcatcatgttgaacaactgcattcgttgcctcttcttcttctgcacaagaatcggcatttgggtctgaaagatcgtcatttgattcccatgcgacggcgtttgaattacccaaatcggcggcgtcacaatcgccggttgtaggctgaatttctccggcttcctcttctgttgtaaaaagctctgcgccttcttcatctcttcggggaatctcggcggcggtctcgtcgactgatggaggaatttcgccggtcgattcaaccctagttgattcatattctccagatgagtcttttactctagccattggaaaataaatatgcggatatgaaagagacaaagacgaacgaaaacggagaagaaagaagaatagaagagattgatttttccggtgaaattggtgtcgtcggagacgagagaagacgacgacggagagaagaggaagaagtcgagaagtgaaaaggggaagaacttaggttttttctgtagtttctagggtaaataatacaactgggccgagtatttacatttttctttgggcccgagtccaacaaattaagttttcttgtagttttcgtggtttcgcaagggtttttcgtcctttcctcaattttcgattttaataaaaatcaataatattattccaaacataagaatggcacgagtgattatttcttctccaatagtggcataagaggtgagctctccagacatttagtctcttcgtcaaccatgcgaattccacaagctcttatctcgcagggtgaaaactgaaactcctctggaaattgaagagaggattcgagtcgcaaatcttcgattttgtcggtgtttatgctactgggtacgtggatgataaccaggtgatgtgatgttacagtctcttcttcctcaatctccgatgaaagattgagatttggtgtgaggttaatcgaaattacttcatcatctttgcggttccaatcataactaaacgctgggaattggaggtagaaggacctctcgcaagaaatcaagatacaggcagcgaaactcagaagtgtcggtgtaaactagctgatcttcgtcgatgtccgatgtgactgattatcgaatttctgggtacttcagttcctggtaagcaaag

SEQ ID NO: 22372 - DNA, 471 bp, Arabidopsis thaliana
tccactttttctagcatgaaacacaccttcggacgtgttctcattccttgaagatacacgattctgatccgcttgaagagtccctatcaactctgtcacaggcagtatggtaaaatccttcgtttgttccatcactgccactatgctatcgaacctcgccgggagggatatgagaatgttttggacgatttgatagtccgtcttctcttcaccatgaacctttaactgatttcctgtaaaaacattgacgttttcaccttaattcatcttcatatttacatactctcttcttaatgattgaaggtattgtatgggacggatttggagaatcccatacttggaagcggtttctccaaaggggtaaaaattccaaccagaagaaatgatatggataaatacatatcttctggttggaatttgaacaactcgcccgtctgcagggatctctactatcctttgaggaatgtgaga

SEQ ID NO: 22373 - DNA, 526 bp, Arabidopsis thaliana
  unsure (1)..(526): unsure at all n locations
tacaatctgcatttactgcagctcagaagaaactgcagaatcaattaataagaatctgcataactcatattgaactaagtggaacacaaactctcaaagccatcggattctacagaagaaaccaatcatcgccgacgtcaacaataaatgagtgtcagatatctggattcctccaaaaattgaagacgttgaccaacacagaggccgagagcgagaagaacttacggcgttacggagctcggtgttgagttgctgaataacgagagaaaagcttcgagaaaccttgtggagcatcgaatagcagaaaccccagtgtggctcaggagggatctgcttctccgctttctcaatcgctcgtttcatcttcaggagcggatatatgtcatccggatatctcagcatcgtccccaagctccccanttgtttccagaaaattttgattcagaaaatggaggattcgttgacgacgatctgagattcagagaccacgagggataaattgcaggaaccctcacctgcgatgtgg

SEQ ID NO: 22374 - DNA, 541 bp, Arabidopsis thaliana
gtatcaaggtgctatttatcacaaccattgagtcaaacatctcagataccttgttgcttgagtcaaggccaataaagctgtgagaatggcaacaactgtgtgtattgtccttttaactgcttcaccagccgtggataagtacacaaatgtaccaaccacggccatgaaagagagccagaaatccatgaactgaagcaaaaaaattaccatctcgtaattaagtataatgtcacatagaagatgacaatgatgcagctctcaactacccgtacctgtaaaacattgtaacttaaaacacaccaggtgcctacatcacatgcatgatacagagcgctcgagattccgctggatgtaaacagaacccactctggatactcctgtttacgacatgaatcagcagcatttagatggaaaaaagaaaaaaaacaagagccccggattaaagtgttaaaccaagaacattaccgctgccgaagagccagtaagctggcaaaagagccgctgcatttgatgcgatgagagcaatagactgaacaatatg

SEQ ID NO: 22375 - DNA, 3190 bp, Arabidopsis thaliana
gcattcatgactcaataccaccatcccttgcacttcttcaattctctccacgatcaagtctgttagaaacttatgagagtctgggattagcgctagagcgtcaacaagaggtatccgcaactcaacctccttgatgttcttggcaaatatagctctatacttgtctgctaacgctttcttgtgacggccaggaaatggaagctgtggtttgtaaggaggagggacaaagaccttttctttgttcttgacggcaactggttttggagcagttgatgatgttgatgggaagataggtcgagttgttggtcgagtaacatggtcgagtggcagctcgagtggttgctcgagtggttgctcgagtggttgctcgagtggtttttcagcttgatcctccccatcttgaccttcactgtcctcagtgactgtttttggttcctcctagttggaagtctggaaatttccattgctggcggtatccagaagcattctgatgcgtggtaggactcctctgtaaagagtgctgagcagagaggctttagtaaagccatgatgagggcattggttggtgtaacccttgaaacgctcccatgcttcacataagctttcaccagtcttctgtgagaaaccagaaatctcatttctgagtcttgcagttctggcattggagaagaactttgatagaaaagccttcttacaatcatcccaagtggtgattgagtcatggagcaaattcttctcccagatgtgtgctttgtcgcccaaggagaatggaaacaaacggagcttgaatacgtcttcactaacaccattgatctttgttaggttgcagagcctatcgaattcatcaaggtggtcgagtggatcctccattggcagaccatggaatttgttccccggaatcatcgagatgagaccactcttaatctcgaagttgttgttctggatagcaggaggtgcaatttctttcctctgacagtgatcacgtggtgcatctccagcaccaatgttggtagggccattttgttgattctgttcgtaagccatatcgagtggttgttgaggtacagggttgactgtgtttctcctttctctgagttcgcgagctatgcggtcgatgttgtcgttgaaaaggaggttctaattgtctgttgatcgagttcgcatacagcagaggtgtacctggatcaagaagacaacaagaaaaacacactgttagtaaccgaaaagaaaattgaaaaagaacttgatctaagcaagtctaaaatctcaaatgtaacaaacaaacacccaattggcaacggcgccaaattgataataggtttttagtcaattatcctaaaacaccaatcatatcgttgtagtattttaggttgtcaatccaaatgggtgtgatgctaacaatcaagatgtgatcagaagtcactaagtcaagccaagcaataacaggttttggtctgttctagcagtcctaagtgaacatgtagaaaacagaaaatcaaacagaaacagtgaaacactcgaccaacacagctctttgcagagcactgggtgaggtcgagtgacaagtcgagtaacagacagaaaataaaacacagatactcgactgcacagtctgttgcgagacaactgggtggtcgagtacgaggttgagtaaatagaaagaattgcagaaattaagcgacagataacaggatgcagtaaacaacagtagagtaaacaaagaattcaatcagataaagaattcccaaggatggcgtaattgagtagtttcgtttcctcagtttacaagtgattgacatgctcaataaattaaccctagacaacaagttcattaaccaaatctaagtgccaccgcaaaagagactctcaagttaacctagtcccagactcaatcaccattgacgagagctaacctaacatgcattacgaatcaacaagttaaagccaaaacgctccctgcaaccaataccttggtacagggccacaaatctctggaattagtggttcagacatttcatcgaacaccttttgggcgcggaaatgtctgggctcaaattccagttgatcaggaagcaataggcattaagaacaactaatccagaagggatctatcaatcaatactcaatcacctagcatactgagaattctacactactctaacccatcctcagaaacctattcactactcagacatcataacagaaagcataaatgttgaacaagttgaaaacatgataacaacagtgtaacagcaggatgataacagaatgaacaatagtaaacaaaatcaagaagaaaagctgaatactgaatactgaatagataaagagaaatccggattacaaaaggtctagaacacaatgtctgcggaaataaaactagataaaaaacttctctgcaaaaatgtgaagtacatgctacttatagccaaatattctgaaaccctaatacttaaaacgacaaagtattgggacggattaagaactgtactcgacccatgtggtcgagtgggaggtcgagtgaatagctggagtcttcttttcttccttgtgctcgagtgtctggttgagtgcggaatgaagaaggctctgaagcttgtcatcgagtatgtagtcgagtggtggtgatggtgatactcgacttccaggtagagtgacgaggtcgagtagtggtctggcaatgaaggtgaagacactcggcctaggggtcgagtgaagtgatcgagtgatggtccggcgatgggatcaagacactcgacctcggggtcgagtgatgtggtgaagtagtgatgtcctctactcgacctggtggtcgagtgatctgttgagatcttgaagctcctactctacctcggggtcgagtggtttgacatgatcaggcccgcttcttccagatagctcatcaacagctccaaatcacctgaaatcaacgcaaatatgcaacatacatgcaaatctatcctaaacatgtaaagtgatgacaaatgatgagaaatggtataaaacagtgatgatatgatgctaaagtgattacaaatggatgctcaaaacatgcaaaatacacacttatcatattgctaaggatatcgttgaagtcaccagagagaaaccaaggtgccgctctttattctgcaataactttgagagactcccaaacaatgcatcttttactttgatcagggtcccatag

SEQ ID NO: 22376 - DNA, 3804 bp, Arabidopsis thaliana
cttagagtatttttggtccttgtggatcaacatcgaatattctacttaacggttagatattttgggtaattactcgagcaatcattagggtttctcattaggaattcttctggtttagtagatcgcccctttgctaggttatctgtagaatttttcatctttaattgttcttaatgctagttctagagtaattaagtagaacttgaatccagacaatagatatccccgccataggtatctgtagttggatctattatttgatgagcctggtttataggtgtgtaataagaattggtctatctactaaggtgaacaattgaactcgtttagaatgcatctctaggtataagatctctcggcttctctagttattcttggctataggcatagggagtttcgcggaaccgcaccggttattccataattagagtttgagtttaagaatggttcgataacaacctagctttcattagatctactaaccaatagtttcctgagaataccttgttcctagctctttattaaatcgtttacaacacaatcaatttgctgtctttttactttgttctcttttattttcactcataccctgctagcttaatctcgacatttaactcactgtttaaacaaaagaaccccgtgaattcgatcctaaaatactacaattgatctcttatttgagagagtagttctaggtaatttgaacgatatcaaatttggcgccgttgccgaagttcttgggattcatctttgagttttgtttagagatttcgtctagtttttacttctattttgttactcacgcgtttcttgttttcttcttttctgtgtttcacgtgtatgcctaggcaaacaaggagcacaaaacagaaagagcttatcaacttgtctgttctagactggggaaaacttgaacacaccaaccgaaaaactcagaacttagcaatggctgacagagtcatcagagctgatgcagaaggagttttgagaggtgaggatgggcaagcctacaatgaggctggttagagattggatgatcatggagtcatcctacctgaggacgccaataaggatcaggcgcgcctcaatgcgcagttagctgctagagacgcagcaaagctcggtgttgagcgacaccaactaggtgtcgatcgacaccatcgggagcatcacgccgatgcaatcggtgtcgaacgacacaacagaggtgtcgatcgatagcaataccaaattcttgcagctattcctccaactgcggaaccacgtcgtactcttggggatttcaacaggcctggctactttgctttagttggcaagcatcctttccatggcttatctcattagcagccaatatatcatatcgagcgatttgaggatcttgttctgagcatcaaggctaatggagtctcaaaggactacctgaaggaattgaactatctacgaagatgaacaattgaactcattaagaatgcatatttaggttgatagtttctcagcttctccggttattattagctatagatatagggagtttcgcggcacacccaccggttattccataattagagtgtgagtttaagaatggttcgataacaacctagctttcattagatctactaaccaatagtttcctgagaataccctgttcctagctctttattttacaacacaatcaatctgctgtctttttactttgttttcttttattttcactcataccctgctagcttaatctcgacatttaactcactgtttgaacaaaagaactccgtgaattcgatcctaaaatactacaattgatctcttatttgagagaatagttctaggtaatttgaaccatatcaccattctgttgtgaaatcttcgtcctccttgatagctagtgcagtttccatcttctctgaatcaataccatttgaaaacttttaactcttttttcaaacattcatagttgatctttcagcttcatcacctttgaagataatccctctatgactctgctttgccatttaaatttttttctcatctcataccagtcatcttttgtaggatcttcagtctgagctaacctttctattgctctcttcttatggtcaaaagttctcttcagcttgctgagttgagaagtatagttaactcttggtggggtttctgtttctgtttcttcatcattatccatgtcctgaatcccaaaactctgacctactgttgttgatttccctgaagcttctctgatgtcgaacttcatcttgatgcctttttcaaggttcagattaatttttccattcctgacatctatgactgctccagctgaagctaagaatggtctgcctaggatcaggggatccttgccttcttcatccacgtccaataccacaaaatctgtaggtatctcaacatttccaatcttgacaggcagattttctattagaccatgaggatgtgcaacagaaccatcagctaagagtaaagctaagttgcagaacttgtattccatgatccgtagccttttagctgtagagagaggcataaggctaaaagatgctcccaaatcacaaaggcacgtattgaatgtcaatggtcctagagagcatggtagagtgaatgaaccgggatcatcaagcttttcttggatgactttcttcttgtatgtttcttgggtggaggcactgctaatcatctcttgattctggtccttcttgagtttttcaattttgaactttttccagaatggtgagtattcagcaaaggtgtgtgctctatagtccggatgaattgttgggtggcaggtgcagcaatttgagttgaatcccccttcttgaatcataatgtcctcagtattgagagtctaatgacttgatggagactcatcttcatggtggatagtgatagcattagcagtagcatagtccttaggattctggactgctttccctggaagttgctgagggtgcttcggagcagaggttgatgcaaattgactctccacatacctgatttttgagttcaaagcttcgaatttgacatttagatcgttataagaacaatcgatcttgttgtgtaattcagctatcttcttgtcaagccatagctccagtagcttgtccttgaatgatttgtcgaatgagttgcttaatttcaggatcttgagctgctggggcttgttgtggttgtggagtgaaccatggtggtggattatgctgttggtagcctccattgacctgttgtttagggacataactttggttgtactgaacaaaagtgataataggtttttaagatcaattaatcctaaagcactatcatgtggatgtagtattttaggtgtcaatccaaatgggtgtgatgcaaacaaatgagatgtgatcagaagtcatgaagtcaagccaagcaataacagttttggggtttctaacagtcctaagcgaacatgtagaaaactgaaacattatcaaaattactaaattcactcgaccacaacaggctgatgccagaagcaggatgtggtcgagtaacacgtcgagtaacagacaggaaacgagacaactgcactcgactgcacagtctgttgccagatactgggtgtggtcgagtaagttggtcgagtaattgcaaaaactaagaaacaggcaatgagaacgattaagtgacaacgataaaatagagaaatcagatagacaagaaatttctaaggatggggtaatcgaatagagtggtacctagcctatttgaatggttaagaagtgcaatcaagctatctttagacaacaggttcacaacagatcaattcactcgcgtgataga

SEQ ID NO: 22377 - DNA, 1622 bp, Arabidopsis thaliana
ttcagactatcattcacttgttcctcagtcgcgttctcggttggcaccgcaaataactcaccatccccgatgatcatccgctcaacatggtttgcttcttcactagataacggattagcatcttccatactttccaaacatctgacggatctgattcaatcgatgtgtcagactcagtggaatcactatcttctgccataaactgatcattcatggccacaaacaaactttcatcgtcagtactgcttgacggagcggagttctcaagattgggcacattaacactgtgcaatagactaacggtgttgcttcctttgctagacgacatctgcaaaacgaggtaaacctatcccccacttagtcatctaaaagaagaacaaccaaaatcttatgttgcattctgcgactcaaatttacttggtaaaattattgaaaacccgagtgtccacgagcatcgcataaccctgctctgataccaagaattctaacgccctcgaataaaataataaatcatcaagtaaacttagttgagtccatattcactaagcctagccatgcactagttcatttcattccttaatgatattaactatcaagttcgtcaaatgctcatattattttaagagtcaagttctaacttaagccaaattctgattagttaagtttaagtgagtaagcatgcatataatctaaagactagctctagaaaacatgcaaacaaaaacacaattcgaccacaactgacagattcggtaagttttttagtcgcgggcagaatctcttaatcacggtcgacgacttctcactaggacgagttctcttgaccacatacgattattttgcacttacgatcagactttcctagaccacgggcaagatttactgaattcgggcaagttttcttggtttcggacgagttatcggtcagacagccttacagtctctctcgccttcaaaaatgaaaatgggctgagaatagcatcattttatagtccgcccaaggtcggccatgtagcaccgcccgctgccacatgtctagacagttgccgcacccacatgcgacaggtgtctcgggcgatggcgtggcgacaggtgtctacgggtgtcattccattgccccatcagcttcggctccaagactcagccgaattcgactccaaggttggtgacttgagtcgcatggcaccgcaagtgaggtgtccacacatgtcggttccgcggccagcgtggcaaacttcgcccgcggcatgccaaacttttcccatctttgcccattcgtgcccattcttgcccatgtttgccctttgacagtttagcattttttgggcacatgcggtccattggccatgcattcgagcaactttttctcattcggtcctttgccgtacccgatgcccttatgcgggtcactatagggtcattgctcggatgttcagagaagaagcaagaaggcgcccttctttgtggtggactgacatcgaagatgagataatgatgaggtacacaatctctgtctctaagtggatatgccagaaagcaagcaggatggctttaaatttggtgatagaaacgcagaaacaacaatttgcaaagctatacaattatgaggctgaactgcacat

SEQ ID NO: 22378 - DNA, 2249 bp, Arabidopsis thaliana
atctcaggattttccccgagtccctttcgacattcggtccatgatccgtaccggccatgcttccaccgtcatgttctcctttaacccgggaggtatatcttccacgctttcttcttgatcacttaaatacttccgtaattgtgacacatggaagacgttgtgaaacacatttagttttggaggaaggtcaagtttgtatgccaccgcccctactcgttcgatcaccttgtacgggccaacataccttgggcttaactttttccttgaggtgaatcgccctgcccctttgtaggtcatcgcctttaagtacaccaaatctcctacttggaattccaattcctttcgacgtttgttggcgtagttttctgtcgatcttgggcttcctttaacttgatttttaagaacttcattctctccgtggtttcatccacgatcgtaggtccaaacaaccgacgttcgcccacggcgtccaacacaacggtgttctacaagctcggccatacaacgcctcatagggagacataccaatactagcttgaaaactattattgtatgcaaactctactaaccttagatatttctcccagtttcctccccaatccaaggcgcatgccctcaacatgtcctcgagggtttgaatcgttcgttcggactgtccgtccgtctgtgggtggtaggcagtacttaggttcactcgagttcctaaggccttttggaaagccttccaaaactttgacgtgaaccttgtgtctcagtctgacactatactaactggaatcccatgtaaccgcacgatctcgtctatatacttctcggcaatgatttctgctccatccttatccgagatcgccatgaagtgcgcagacttagtcaatcggtctaccagtgacgaagtccatcgttatgtggtcccacttccattccggtataggtaggttttgtaacaacccacttggtacttgatgctctgctttgaccagttgacaagtcgggcacttggccacccatctggccacgtctttcttcattcctacccaatggtagtaccttttaaggtcgcagtacatcttgttcgacccaggatggattgagaacttcgattgatgggcctctcttaggatctcctcctttaatgccctatcgttcggcacacatactcgaccgttcaccacgattgtaccattattcgaggtttggtactcggtcttattgtttagtgcccatccttttatctcctcgtcccgttcctgagccagccggatcctgctaagcaggtcggcctgatcggcggctcccaaccctaagggttcaacttctttagacaaggcattcacatgcaatgtccccatcatgttaaccaagtccacttggctccgttccgcctcaacttccgaacgcctcctactcagggcgtcggcgacttggttggccttgcccggatggtacgctatatccaagtcgtaatccgccacaagttccatccaccttctttgccttagattcaactccggctgggtgaatatgtactttaggcttttgtggtcagtatagatttgaactttagcaccatacaagtatgatcgccaaatcttcaagaaaaatactaccgcggccatttccaaatcatgcgtagggtagttcttctcatgtttccgcaattgccttgatgcgtatgcgataacactccccttttgcatcagtacgcatcctagtcccactattgatgcgtccgtataaaccgtatagggctcaccttcctccggtaagaccaatactggtgcattagtcaacatggcctttaactccaggaagcttttctcgcactcatccgaccagttgaatgcggtgtcttttccggtcagtcgggtcaagggttgggccatgctcgcaaaactcattacgaaccttcggtaataccctgctagtccgagaaaactcctaatctcggtggcattccttggtcgtggccactccttcatcgaccgtattttctccggatcaaccgatactccttggtccaagataacatgaccaagaaaaccaacgctcctttgccaaaatgagcatttacttaacttcgcaaatagctcatgttcccttagccgttccagcaccgcccttagatgttcttggtgagcttcccaagattttgagtaaacaaggatgtcgtcaatgaagatgataacaaactcgtctaagaaatcccggaataccccattcatcattttcatgaaggctgctggtgcatt

SEQ ID NO: 22379 - DNA, 2654 bp, Arabidopsis thaliana
ttctgacaaacatttgcaactagaaaacgctttggaaccgcttgtatcgcctcaggagatagtcaaccaatttcaatgaagagtcatccagcatgtcccgagccagaatacaccggttgcccaaagcgacctctcgaacgaccaccgagccatgaaaaatgcccgaggcaaaaacttgtgcaaatccaataatgttcaaaagattatttccaggaaaacaagatgttggaactggatttccctccaaaaatccacctgcaaaaatatcaggccaccccaataagcccaccaagcccaccaagtaagaggacctgcacaactgatgagcccatgtacgtaaattggtatttgggcctgacaagcccggtcacctgatgaaaggagataagcgaataacaacctagaaactaatagggagatatttgcggagcggacctgatatctcggaactgacctgccgaatatctaggagaatctccgcggatctcggacagagctaccacgtgcgtagacctatatgaagaagcaagaaagacttggaagacacattcattcagcttaacattcacacttatacttttacacttgtaatctcctttcacattgtaaaacctctgttataatcaatacaaaagtccattcgttcttagcaatataaatctcaaagttcttgttaagatctatccctcctttctcataattctatttacaaatctctagtgtggatttcgaaacccacatttggcgccgtctgtggggacgaaaatagatccttccaacaccgaaactaacacatctattgtgaccaacgatcatggatctgaattcatccgattcaacgagatctggcgtaccagttcagatcccaaacgacaatgtcacggacaggcaccttccaacggatctccctcttggaatcgaggccgatgctatccatgacattgatgtggagaacatctcccaaaactcgaattcttctagatctgaccaaatcctccccccccctcgcaaaccagggacggggagcaaaacgtcacgatatagcctcctaacggagataacccggctaacccttctgagcaggtccctccgagatctgccaatgagctagccgagcttcgcacaatgatcctgaaactgatcaacataagcaaaaatcaagaaatccgcatcgcaacctcgccgcaatagtgggtcagcagaaacgtgactcttctcgcatggcgcaggaggtagagcgtgataccgcatgcaaggaaattcctccccacaaaaatgggatccttgcctagatccccatagatatgacatgaaccgtctccccaacagatcccactccaaggactcgtttagacttcgcctcgatagaggtctcacctcctctcaaccggcaggtcgcctttttacaggcacccgtgcacactctcgtcgaaaacccaataacagggactgagacaggtacaacgcctgctttcccaaggctaccgctcccacctgtgctaccactaggctactcgcccccgaggtacacatggacgagaaaccagacaaccgggagctcaacgcaacaacggacctctaccattaatccctcatccattccccggatacaagaaagtgacatccttaacggtccaaccaatcctcgagcaccaatcgaccttcgtaacgtcgtggatatggaaacattccgcaattacgcagctcaaacaaacgcgaacatggctcaaatgcactcacgaatgcatcttgcagtgagcgatgcttctgacatagatcgagtgagcgaagaaaccaggcgcaccccattcacggataggatctcccattgtcgcatctgagacgtcgggagaatccgttttccggagtacgacggaacgagcgacccaaaggctcatctgagagccttttgtctggctataacacgagcgtacctgacagacgaagaaaacaaaacaggtcactgccgtttcttcgcagagaaactcgtagatcacgccctcgaatggtttgctagtcttgaagggaactctattgataccttcgaccagctcaccgtcgcctttttaaaacagtactcgatacttatcgtaaacaggacgtctaaagccgacctttggggtctcacccaatgtcaaaacgaatctctgcgatcttagatcgaaaaattcaaagcaatcaaatcaaagattgtgaacctaaacgaggaggtagccatacccgcccttcgtaacagcttgtggttttcctcaaggtttcgcgaggaactcaccgttaggcaacctgtctctttagacgatgcccgacacaaacccctccacttcgccaaagccgaagaggagctcgccgttttggccctaagattcaaagaatttaaagcacaaaatacccttcaaaaatgaaaaccaaacccaagggcagcataccctattcgcaataaaagaggcagccaaggacgagagtccagaacttgacctcgaaaaatattgcaagtaccacaaaaagagaggacattccaccgaggaatgtcgcgccgttaaaaaactaatcccagccaggggcaaaactaaacaagatttgaactgcaaagccgaaacccctcctctcgccgaacaggaggaggaacaagctcccaagtgaaagaaacgggaccg

SEQ ID NO: 22380 - DNA, 1252 bp, Arabidopsis thaliana
aactacatgaacactctatttttgtgaaatcattttctgaaatttttcaattttttttttttttggtttttctatgccttagatgaatgcacactcaagattatatacaatgcaacacacacttcctgagccctcccccaaacttaaatcacacagtccactgtgtgaccaaatttggaagagagtactcaggacaaaacacatctcaaagacaaaataaaaacaagagatggtatattacaatggtggagtgaggtgcatacctcagtggaagaaggagcggagttggtcgtcaatagctgcctgtgattgctcctaggccattgaagaatctccctgttgtgtctcagcttccccctgggggtactcgacctctgctccttcgtcgcggccagcaccgctgtgatgatactcgacctctcttcttctgctgcggccagcaccgcggtcgcgtaagctacgggagtggagaagtcgtgactgcatcattcgctatactcgaccacatcgtcattcggtctttatagggtgtggtcgagtgatttcctggtgtgaagacgccagaacaatgtcgagtttgattgctttgtggtcgagtgtattgctgttccttcaaagccagaatctatttccatcaactcttcatatttatctcctgaaaacactaacaagatgcatcaaaaacaataaggaaaatgaaagatatgtacaaagataggcttgggacttcctcccaagtgagcttgttttaggtctctagcttgactcttcatactcattaggcgtttaaaggctcctccaaaggaacagaggttccttctggaataaactgatctatcatgtatttcttgagccgctggccattgactgtgaagtctccattctttccagctagagtgatagcaccataaggtcggactgcagtaacagagaaaggaccagaccatctagacttgagcttgcctggaaaaagcctcaggcgagagttgaacagcaacacttgatcaccaaccttaaaatctcttgagactatcttcttatcatggaaagacttggttcgctccttgtagattttggaactctcataggcttctaagcgaatctcgttgagatcgttcagttggatcaaccgcttctcctcggcggttttaatgtcgaagttcaggagtttaactgcccacatggctttatactcgagttcaacaggcaaatgacaggattttccatagaggaggttgaaaggagtcgtggg

SEQ ID NO: 22381 - DNA, 497 bp, Arabidopsis thaliana columbia
tgccatgacatgaaccttctcgaacgctatcaattgtttgttcacacccaatccttttattccgtttatcggcggctcagcaaatacaaacaccgtgtgtgttccatcgaattcacctgtgtttgatacttcgacgtgaaggggcattttcggaaatgaattgcagttggtgtgagacactttgatggagtgtgatgaagagttgagaatggtattggcagagttgagattggagagtgaaactgatagttgggccaatgggcttttggccaaactatgagtgaaggtagtgtaacttaaaccgaacccaaatggaaatactactggacctttgtagaatctgtatgtccttcctggataattaccggatgctctcatggccattaccgtcattggcactttggccacgtaatcttgtggataccatgtcattggtagtttcctcctatcataagatatataatgttgaatgtactaaaagctaaattaattaaatt

SEQ ID NO: 22382 - DNA, 607 bp, Arabidopsis thaliana columbia
tcgtaggttagaggaacagaataaaatgtttgcatctcaaaagctctctcttgtcttggatatagaccacacccttctcaattcagctaaggttagtttatcttccttctggtttgattacttttcttatattttttctaaagtttttgtttctatcgttttcagtttaatgaggttgaatcccgccacgaggagatattaagaaagaaggaagaacaagatcgtgagaaaccatatagacatctctttcgtttcctgcacatgggaatgtggactaaactaagaccagggatttggaattttttggagaaggtgacttagttaataatattatcttactactgttcaactacgtgtggaagacttaaaatgtaaatattcctgtgaatttcaggctagcaagctgtacgagttacatctttacactatgggaaacaaattgtatgctacagagatggccaagctgcttgatccaaagaggttctatttaatggacgggtcatatcgaaaggagatgatggagatcccttgatggagacgaacgagtactaagagcaaagatttagaaggagttatgggtatggaatcgtctgtggtgacatagatg

SEQ ID NO: 22383 - DNA, 574 bp, Arabidopsis thaliana columbia
tatttcaaaaatacacattgcttctgcaaactcattgtaacaaatgccttacacatactaaaccaaatacatagccacgaatactcagaaacattactaagcaacaaatcagagatcactagaaaactaagcaattcaacacaacgaaaactagatctaaccagagagaaaatggaaaaattacttgcggcctttaacgtcgctacaaatgtaatcaatcagctgaacgatagatcctttctcaaattgtcctgacttgactcgatcattaagctgaaccgcgaccatagcatgttgagcagaaacaccatctgaaatgaggaaacgatacctctcctggcttctctcttgacttcttcctatcattttgatttctaaaacctgtaacaacggcttcaaattcacgtcgccgtcatgtatcgccgtgattgcgttcggagtcaaactcaccggcatgattgtgattttttagatcccggcgcgaaaccctagaaaaattgaaaaaatcgataaaccggaggaggagttaggaaatattctatggacgaatagagcgtgaggaagacgagatttg

SEQ ID NO: 22384 - DNA, 2164 bp, Arabidopsis thaliana
tatactataagctttttccgaagaactctataaccatgagctgttcttctggcattgaatcgtctatcggaagtggttcttcaattctcatccttgacagatggtccgctgcgccattttcaatgcctttcttatctactatctccatgtcaaactcttgcaataaaagtttccatcttaacagtcttggtttagtatccttcttggcatacagatgcctcaaagctgcatggtctgtatagacagttacctttgatccaaccaaatagcttctgaacttttcaaatgcgaatacaacagctagaagctccttctcagttgttgcatatcttccctgagcgtcatccaacattcggctggcgtaatatatgacatgaagcttcttgtttattttctggcctaaaacagctcctactgcgtaatccgatgcatcacacatgatttcaaatggatagtcccaattaggcgctcgaacgaccggagcagataccaaagcgtccttgatggtttgaaaggatttgaggcagtcatcatcgaattcaaattcggtttccttgcacaatagtctggttaacggtcgggctatcttggagaagtctttaatgaatcttctatagaatccagcatgaccaaggaagcttctgatgtccttcaccgtttttggtggctgcagctgcatcattacttcaacttttcctttgtcaacctctatacctttctctgatatcttgtgacccaatactatgccttccttcaccatgaaatgacacttttcccaattgagaacaagattcgtctcctcgcacctggtcaataccctgccaagattcaacaaacatgaggagaaagaggggccatagaccgaaaaatcgtccatgaaaacctccaccatctcctcgattaagtctgaaaatatagaggtcatacacctctgaaatgttgtaggagcattgcataaaccaaatggcattctcttataggcaaaagttccataaggacacgtgaaagtggttttttcttgatcattagggtgaattggtatttgaaagaaaccactgtatccatcaagaaagcaataatatggatgattagctaatcgttcaagcatttggtcaatgaatggtaaaggaaaatgatctttcctagatgcagcattcaacttcctataatctatgcacattctatgaccagttatagttctagtagggatcagttcatctttttcatttttgacaacagtcattccaccctttttagggacgcaatgcactggagaaacccaagtactatcagagatagggtagatgacaccagcatcaagcaagttcaaaatttcttttttcactacttctttcaaattgggaattaacctcctctgtggttcaatgctggaataggattcgttttcaagatggatcatatggttgcataaactaggtgaaattcccttaatgtcggataatgaataaccaattgctctcctatactttctaagctcagataatagcaggttcacttcatcactatttaactcagcattaatgatcacagggtaagtagagtttggaccaaggaatgcgtaccttagaccttttggaagtggtttgagatcaaccttcggtgccttaagttcagaccagtcatctgaagttggaatgatcggctccctagattcgtcggtagacaaggtcgagtggttgctcgagtacgtcctcgagagtgcaggttgaactcgagttgacccttctttgctcattaccattacctctgttactggtccaatcaattcctcaaagggttctgattcttccatcgctttatgggagtctaacagcttctggtatcccaatgtttccaaatgcagaaacccatcttcaccatttttggttaaagcactgttaagatgatcttcttctgccagctcttccagtaactcatcagctaactgatccatttcttcgatccaaaagagttacccttctatggtaggcttcttcatcgcgtctttgacatcaaaggtcatcctaaagtctttgccaaggtttagatcgatcttccctttcttgacatcaatcatagttcctgcagtggctaagaaaggtctccctagaatcaatgggtccttgggctcttcatccatctccaggactacaaagtcagttgg

SEQ ID NO: 22385 - DNA, 515 bp, Arabidopsis thaliana columbia
caccgtcgggatcatctgtctcgtcgtcttccccgtctgggctcttatcttttaagttaactcttcagtttctttttccatttgtcttttttttttcatgtaagagtgattgctttgtacgatctgtctctcctcgtaactctatcaatgaatgtgatttgaataagaattgcttcagcaataagatatcatcatgaggtgttagtgtggaataaatctcctctttcatcattatagctttaatgggtaacgttgtatcatcttacaatgtgtaccacttcttaccgctttctcgtaccaccacaaaacttgtccacattgtgtcaccaattggtttctatgtggttttgtcatctttgcttcaccagcttaccaacgaagctcaacttttctagctttcttcttctgctcttagcttgagtgattcagccatttctatggccaacaatgctgatgtttcctcatcactactattccatacccgtcgataaaagctctatacgtctcttgactcg

SEQ ID NO: 22386 - DNA, 616 bp, Arabidopsis thaliana
aagcaccagaacagtcaaagacttattgaggaaaccgcaaaatttgaggaagcaatggctagtcaagaacacaaccatgacctgatctctaccatcaataacaatcttttcctggcttacaagaaaggggaagagtattggaaatagagaagtagacaattattgcttgctttaggggacaaaaattcgggttacttccatgcaattactaaaggaagaacactcactaataagttctcagttctagagaaagaggatggggcacctatctatctattaagaggcaggaattctgaaggttatctctaagtatttccaaaccctgttcactgcaaaagacggagaccatgttgcgacaataaaagaagccattaaaccatgtatataccctgaaaggaaccaacttctcatcaaaatgccttcagggaggaaataaaaagatcttgtttctctattcatgctcataaggcccatgtccctgatggtttccccaagcttctttcaatctcactgggagactgaggtccaaacattgtgctagagattcagtcgttcttttcatctgccaatctgcacccaacaatcaaccaaacaaatatcaggcttatacctaaaa

SEQ ID NO: 22387 - DNA, 2338 bp, Arabidopsis thaliana
tgccatgtttgtttcgaagagaatttgctcttgaagctatcatccttagctctccaaagcgaacggtcttcctccccaatttgattccttcgaactaactcaagctgattctctatttgggtaagagtatcgactcgatgattttgtcttcaatgcaaggccaacgcttcagcaacagaagcatgtgttgatattcccatatcaataattccacgtgaacccactagatccactagcttccctagcgggcaccatatatcatgtatattatatataacatcctatttgaagtgtcttttaaaatatgtatatctagacacaaaagaggctgaacaaatataaattcttgcaacaatatcgaatttgaatccaaaatttaacttaaaaatatataagctggtcttattttgttagttagttgcgtaggctttcagctttcttgtacttgaccaaatgtaaagtctaattctatgaaagcttataaaaatatatttgcaaaccatagcatgctacataacttacaaaaatctatgatttagctacggttatggccaagatagttagagcatctccattgcatgtttttggagagtgtctttaaataactaaagttacaaaatatcgttaaataaatgtaaatgctcattaaattaaagacattattcttaaaaatgtttttactaagacattgaagactttgtgtctcaaatttaaagacacacaaataataaaatactatttttatttttacataatatattgtaatggtggaaagaccctttattagcaagagtttcactgctccgccatcaacagctccaatatctgaaatgagatcgaatcagagctcaagttcagctgaagagtcaaagaaagagaacgacgtcgctcagcttaacaaaggaaaagggttattgggccactcaccaaacaggcccaatgacaacacaaccaacacaacagcgaagccaacaagtcttcttcctcttctcaacagacaagaccaccacctgtgcaagaaaacaaaaccagagtgaagacagagaagaggagcgtctgtatggagccaatcaacagaaagaacagatttggttgtttggtgacctgcgaagcttgataagatagagacagctgtcagtttacaatcattgaaaccctagtattgtctagctataaaagggaactaatgttgtaacctaaagaccaagtgaaataatacaaagcaaagttcactcaaaacattacctaaagtagccgtcttgctcttactttcatggtatcagagcacagcggtctatgatggatcaatctatccaactctattctgctcatgttcttcacatctcaaagtgtgtcacggttaagctcaatgagcaaaactattctctttggaagacatagtttgagtcttttctgccaggccaaaaccttctaggctttgtcaatgggtcactaaaacctcctcctgcaacaactccattcaacaacattgatggtcttactactgaggtaccaaatccagagtatcatacttggaacagatctgaccaagtagtccgagcttggctgttgggatctctgaatgaagatatcatgcgggaagttgtcaactgtgccacctcctatcaagtctggaatgctttggctcaacactgcaataaggtatcatcatcacgcctttttgagctacagagaaagctacaaaccatagataaacaggataaacccatggaaacttatcttaaggaaataaagagggtctgtgaacagttagcttccataggtagtcctgttagtgaacaaatgaagatttttgctgctcttcacgggttaggtcgagagtataagcccatcaagacatctgtagagggttctatggatactcagccaccaccaacgtttgagagtgtgattccaaggttgtcaggctttgttgacagactaaacagctatggtccagacactgaaacctcaccacacatggctttcagcacttcaagatctgactcttctggttactacaacaacaacaacagagggaaaggcaactcaagatttggcagtggcaaaagcaaggattcattctcaacccgtggtagaggatttcatcagcaaatatctcagaactctaatggagaaagaattgtttgtcagatttgtggcaaacctggtcatcatgctctgaagtgctggcacaggttcaataacaggtaccaggatgaagatctgccagcagcttgcagcattgaggataactgatgtcacagatcaatctggcagtgaatgggttggtgactctggctccactgctcacatcaccaatgctcctcacaagctc

SEQ ID NO: 22388 - DNA, 480 bp, Arabidopsis thaliana columbia
tggttgttaagattttgaaaccacctccttatcttgaaggtcttattgttgcaacttgttctgcaggtaaatgccacatattatgtggaccctgtcaacgtcatcatcatagtacctatattacgttagatttatctttgttttgttctcatggagaaactcaattttgcttaataggaaatatggggaactaccaatcatacttgtcccagcaatctgcgatgaggacaaaagtccttttggtaaccgaagtgtatgtagaaccgtcgggctctcttacgcgtctttctccatggcggtacgttatgttaacgctataaaagtatattggtatgagatgtggagaaaggagaagcaaattgaatttctttttactggtaattgtgcagctagggggtttctacatatggacatacacattccggctgattaaagggtccgcaatgaaagttcaagccatagaagaatctgagaaaatag

SEQ ID NO: 22389 - DNA, 429 bp, Arabidopsis thaliana columbia
tattaattaaccaacatttttcgtttacgcaacaggtgaccaagctaaaagatggagcttgcaatgcgagcctagctttcaatcacgcagtcttagacgggacatccacgtggcattttatgagctcatgggccgagatctgtcgtggagcccaatccatctcgactcaacctttccttgaccgatcgaaggcgcgtgacacgcgatgtaagctcgacctcacttggtcccagggaccccaacgagacctccaacggcgaagatgctgccaatccgacggtggaacgccgcagctagtagaaaagatcttcaggttctcggactttgctgtccacacgatcaagtcaagagctaattcagtaatcccactcggacagttcaaaagcattctcagcattccaatcgctgacatcacacatctggcgccac

SEQ ID NO: 22390 - DNA, 552 bp, Arabidopsis thaliana columbia
taaaaaacagggacttacccaaaaatccaagcaaagtgttcttcgcgttgtgcactttgagagcctcgtatagaccccaaactacattgtgcccaccaggagcctgccttccacagaacacaattccgaccctacaatagaaaacaactagctctaaccaacaacaaaaccacagaacaagaaattccagagatctataaatatgcagatgcatgcacacctcttcactggatgttcagtaatgatctgagcatcagcaactttagcagttgccctgaggaaatgagccaaaggctggcctagagtatgtgggaaggcacgggcaatgatatgagcatcaccagcctttgccacagtggttccatcaccaagttcaacacggacagtagtcccctgtaatgtacattgaatcaataacgaattaaactacgaatcatccaaccaaaaaaaaaactacgattcaatcactgttccagaaaatcactccatcatggtagttcacgttgaaaggcaattctccgaccacactaaactgaaatgttaaatcagacg

SEQ ID NO: 22391 - DNA, 878 bp, Arabidopsis thaliana
gatatcgagtccgcgacatatgttgaaatatcaaggattcttaacaaaagcgatcaatccatttgaatataatttgtgcattagagaattgagttaacgtaaacaaagttcaagcgctggcggcagaacctgatattgcagtaacatcatcatgtgtgcaagtgggggattagtaatcttcatcttgcataatccttgttttatacttcaagctatgacctatatatttattatttatacatccgattcgaatattaagtttgctcccgtgaattagaaggaagagtacataatatgtcacgtgataattattgttcatctttacgtttctcatatggttctcattcaacgactttccaagtcggactatatatgtttttaattattaatcatatatagagacgctcctacaaaacacataaacatataggtgcatgcatataaatgtaaatgtattgttgtcgtctacttcaataacaactccatcaatgaacacatcaatacttgccatactttttctcatacaatgtgttttcactcttggtctccatttccacccacttgatcccttaactccccaagaaatcaacaaaacaagctttatcgtcaagaaatctcatctaggcaacctcaaagatctcacatttcattatctcgacctcgaagaaccaaacaagagccacgtcctccaatggctatcaccaaatccctccaagaaaccaccgcccccacgtcgtcgctctttcgtcgtagttcgtgccgttgctcaatcttacgagctcatcatcgacctaaccacgagcatgattgcatcctcccgcatctacacaggccatggtttcccctcattcacattcatagagctcatccatgcaatc

SEQ ID NO: 22392 - DNA, 288 bp, Arabidopsis thaliana columbia
gaggatcccctgtcttcccacagcctcctgttttaacatcacatatcatctcatcttccatacggatcaccgtaaggatttcctcaaacttcatattcccaaaagcacactgcaaatatatataaccacagaacaacttttaaggagtagtaccagtttctgtaggaaagacaaagggggaaataaatgaaacatacctttaggtttctaattgaatttgcagccataacaattccataagaactttgctcaggataatttggattccttctgcattttgtacatctc

SEQ ID NO: 22393 - DNA, 494 bp, Arabidopsis thaliana columbia
ccttcgattcctgtatcttcttctttcctttctttatctttagtgtcagacttcacagcagctactgcttgctttgcttcgttttcacagaaggtaactggacgctgatactttgcagaaggagaaccatttatagacaagcaattgaatgtgaagagcagtactgtctgtttcttggaagagaagcaagatggaagcttcccagtcagaagattccgagaaacatctaaaattctaagcttggagttgcacaacgatgaatttggaagtgatccactcagcaagttttgtgctaaacttagattctgaagcgaaggaagcgaaacacggaatcttgggattgagccagtgaacttgttggaggaaagatctaagctctgaagcttattcagcttcttgatctgttctggaatctttgatccaaaagagttgttcttcaatgaaatagtaatcaagttacttgcaagtgaaggacaacttcaggaccgagttta

SEQ ID NO: 22394 - DNA, 602 bp, Arabidopsis thaliana columbia
actatatgctagcgtagaatcaaacaaaatatgtaaaacgatatccttaaaacaaaatgtatactaaacaaatattagtttgccaaagtttgacgaaataataaaaacctaaatggttcgccgtgagtaagttcccatcttcttctcgaactttgccaaagtttggtattgaaaaaataataatattaagacacagagagagagagggagaagaggatctctgtgtgtcgtccaaatttcaaagtgatgatgttgtagctgtgtggtagcgattggcttacacgcgtcatactttaattagataattttatttccttattacttaccctctcttttctcacaaagagtcatcaccagctctgatcaaataaaagcgttttctcttcttcttgctttcacagttacccaaaagtgtgattaaatctttcttttttttgctttccttctctaatcgttggtgtgtcgctaaacctagatttcgctggattgtttgagtaatggccgttgatgcggctgaccggcgagaagttatcgtcaaaatcgacggtgaaaacggaaacaacaatggagtctccggagagactgtaggaaagatatggaga

SEQ ID NO: 22395 - DNA, 579 bp, Arabidopsis thaliana columbia
cttccttctatattggttgatgaagcgtctgtaagtttgatcaactctttatagcaattagttctttttcattctgtgcctgctcgtgttactttcctttcggttgcatagtttcagtaactcctacgaaactaatgtttatctattgtctgtttcaggttcaaaagattcaacatttgactcccaacattggaactgtttacaggttcttctcttcagctatccatacttcttttttaatagcgaatttggttttatagcttgcaaattggatttatcatacattttttaccttgttttgggtacttagtctctctcatcaggtgctagtgctactgatggaacctttcccttagtaccctaatgatttcagtgctaactttggtattgccttttatgtagtggtatgggtcctgatttccgagttcttgtgcgaaagagtaggaagcaggctgagcaatatctccgtctgtacaaggtaatctttaatatcttctgtttttttgtcttcttttcctggagtgtctagtagtacatgtatgataaaaactttggattgatgattccagttgatataag

SEQ ID NO: 22396 - DNA, 590 bp, Arabidopsis thaliana columbia
tcgccattttcaatatcacggtcctcctgtcgtcgaaggattgggtcaaaaccatcatcaatccgccgccacgatcccttctatgtcatctgtcgcgagatcgcttcttccaacaaaacgccgattaaagcttgatccttcagcaaaactttacttcccttgtgagtttcttctactcttaatcggatctcatcgaagactttgactgatcaattctataaaatttcgaatttttttttggatcatagtgttgatattgacttaactggtttagctttatctttgggaatcatgaaattggatatatattgaaggtgatgatgatgttgacttgtaatttgacttattgatacgttactataaactgtataaagccattgagcaaatttaggaataaaatgtggagtcttgtcaatttcaagattcactctttattgatgatcaaagattagtgatttagtttatgaactttgtatgtagatgagcctgggaagcaagtcaggagtgccattaagattaagaatacgagcaagtcacatgtagcgtttaaggtttgtaatggattcaaaaacgttttgattatggttgtt

SEQ ID NO: 22397 - DNA, 489 bp, Arabidopsis thaliana columbia
gtcaaatgttaattgcaatcgtctcaactagtcttacatctactttgtagtctaattggttgacacaaaaggaatttacggaattctgtctagaatctttccatttttgcttacaaatatggcacaaccggaaattcccttacttatttatggaaaaacaaaagtgtcatgtgttatatatattgggtccctttttatgtttgtagggctatcactaccaatccacaatggaagattcacaaccgtgtacatcacgtaacctagatcatgccgaaaactccacagcaagcattcctcttaaactcatcttcgaaatactatcgaggctttcgacgacatttatcatcagattccgatccgtgtcgatgctgtgacgctctatcatcgatagtaaagatttcgtcgacgcctttctgaatcctcttttttcaatgaagactctttttttagtccgctttatggaataatacttatgttttaacgtaatga

SEQ ID NO: 22398 - DNA, 475 bp, Arabidopsis thaliana columbia
tgggtccatcatctcaagaaaaaagattccgttgcgacgtggcagcgtttccgccaagacgcgggccatattatctggtctcaaatcacctcctccttgcagcaaaacaaacaatcatggcggagaaactcagtgatggcagcagcatcatctcagtccatcctagaccctccaagggtttctcctcgaagcttctcgatcttctcgagagacttgttgtcaagctcatgcacgatgcttctctccctctccactacctctcaggcaacttcgctcccatccgtgatgaaactcctcccgtcaaggatctccccgtccatggatttcttcccgtgaaattctctcatattctctttgatcctttcccctaagggttatttagtattcttatgatcgtctgttttgtctcgcaggaatgcttgaatggtgaatttgtgagggttggtcaaacccaagtttgatgctgtcgctggat

SEQ ID NO: 22399 - DNA, 470 bp, Arabidopsis thaliana columbia
aaagatataagtcaataccatggggcttatttatgccctcgttgcccgaactatgcagctcattcactatgtgcaacaagaaaagacgtatgggatggggtagaactcgaagggacaccagatgatgatgacgaagatattgtgccgttcaaagtggtgggtgataacttgatcgagcatatcagtcatgaagaacataatctaagactcaacaaggacaatatcaatcgtgacgaatgctcacgttgtgaagcatgcgtccttcctatctattccgatgcgatctacaactgtgaggaatgtcgtatcaatctccatgagaaatgcgctaatcatcccagcaagggacgacatgtattccacacaataccattcacactatggtccagaccacctcgtacattccatagcgcagattttagattctaagatgtctttcgctgctatgcttgtagaacgaagtctactgg

SEQ ID NO: 22400 - DNA, 1695 bp, Arabidopsis thaliana
ccgttaatgaacaataactcaacagtgagtatcggatccataacagcaaaatttgaactccggaaatagccataccgccccgatgtggtgcttagccggagaagagcaagctgtttgctcgagaccaagccaagccggtgaatcaatctcaagacatctgtggatagaaacgaattacaaacagagctaaagcgaactactaatcaaccagatgatttcaacggtcatagacaaccaagactcgaaaggaatttcaaaatcgatgagatcgacaagagattttgggaaagcacctgaaaacggggcgaagaaggccagacgtctcgtgtacccaaaggctggggtcatcggagacagaatctccgctactgcaattgcttcttcgctcttcatcgcctccgtcgtcgtcttccgccgccggggttcccagcggctgagtctggttgatttgcgcttggttcaaagcgatcgcaaacaatgcgccggccgcatatctctgagtcggcgtcaaattcgacgtagcttccaccatcgaaaccgaaacaaacgtttgatttaccgatcagcgaaaaaaagccatggaagagaaaaaatcgttggaaatcagatcaccgtcaaatttcgaaatcccgagaaagatgaatccgtgactatatgagtcatccgttatattttccttccggtccaatagcaggagacatctgtccttcactctgttgactcgtttcacaaacaaagtcaatcccgagaaataaaaaaatctccgttgccgggactcgaacccgggtctctcgggtgagagccgagtatcctgaccagctagactacaacggatttgtgttcgatttcttagctcaaattatatgacacttaacaagatttgaatcaaagaaaagagaacacgaaggacttgttgtacttgattaaactagtctctttcggctttatgtctagttcttgtggtccatctattccggcagaaattatgattcttggattaaaatatccttttgtttaatctttctttgtgagattagtggtataataagtctttgttatacatttttcttataatctatttgtctacattatccatatgtctcatagtgactaatagtactgtaaataaaaaaattttgttataaaattataaattccccttttgctttgcatgaactatgggtgaaccaggaaccttaactaataaccaggaaccttaacatagaatgaaaaacattttgattagtggatttcgatttttagaaagagtaagctttgaatattgaaaatcataataattcataatctaaccatatatgagatgctatgaatatccttttagtgagaaatatgtacgatttggtagtttctgatttaccagccatgagagatgcagagttggtcgtaacatttgtcacaagattggtagctacgaacataatgcagatactgtcatacacgcacatgtatacttacatacacaaaaccatattgcatgtaagatattttctcatagtgttttgatgatatttacgttgcttggtgagacatgatcaatgaatttaatctacatcttgtagatataagcactaggtaaccattttttaataatcaaatacatctttatataatttacttttggggacaacaaaaattcacaccacccaagagtccatatagtggaaccaaaacgat

SEQ ID NO: 22401 - DNA, 847 bp, Arabidopsis thaliana
agcctgaaaggtaacgaagatcaaatggaatcaaaaaccaaaatgagagatcggtaaaaaatcaaaaagtccatgtccgattcggagatctgaggaaaagacttacgtcacggtagaagatatggcgatgaacagcccaattgagagtatccttaagggcacgacggtaaaggattcgaactctctccttctgagccgctcgccgcgcaaagtacgccgccgtcgaaactccgctcatttttgtcttcctgattccgattgatttcgagtctctctacactcttttcatcttttacagtggaaaaccttctgtttccgttggagggaccgagaagaaaatttcaaatgggcctttgattagagcttgaattaagacaaaaatcggcccattaaaaaaagaaggaggtaaaaacaaactccgttgccgggactcgaacccgggtctctcgggtgagagccgagtatcctgaccagctagactacaacggactgttgatacagtcaaagaaataaattatttaacactacgtatctgtcttttcattatacactcacttttcccaaaaaaaattcacttactccaccattcgataataaaaattataagtactcaacaaaaaatctaaacttcaaaattatcaaactttttttttttcttttaaggattactcaacttgatttcgtgattagactaagcgtgaacaataaagagctgatttggttgaatatatatgacacaaattttgcacgaatcaagtttaacacttatcgtggttcaagtttttcatttttatagttttttattgtttttatattatgtatgtttagaattttaatatttctaata

SEQ ID NO: 22402 - DNA, 552 bp, Arabidopsis thaliana
tttactagagactggaatgtagtagagaattttattgtcgcagtcgaaccataatgtgattccttggtaacttcaaatctctttgttattcataatcagaatctgttcacacgaggtaaaagtctcaaactttcttatgttctgcttcgttttaggtctcaaaatttgagtttttgagctgtttttggttaggaagagaaatggctaattcatgggatcagttaggagaaattgcgtcagtggctcagcttacaggcatagacgctctgaaactgattggaatgatagtaaacgctgcgaatacagctcgaatgcacaagaagaattgtcgtcaattcgctcaccatcttaagctcatccgtaatttgctagagcagattaaaaagtctgagatgaatcaacgttcagagattcttgagccgcttcaaggacttgatgatgctctgagaagatcttacattttagtcagaagttgtctagaaaaaacgttactttacttgttggctatgggctgggacattgataacacgtttgaaaaagctcagaatgaga

SEQ ID NO: 22403 - DNA, 594 bp, Arabidopsis thaliana columbia
cccccaattgacgaccacctttttttaaaaatgtgttcttgaattcattctagacatgagcaaacacatattaaaaaaagaatatatggtctatggttttattttactagaactcttttttattttatttttgtttttaacagatcagatttagatggaaaagatctatattcctattttaaacataatattattaaactaacagcgctactaaaactctaaatctcttatattagtagagaatcacaatcatgttttttagtctcgtctttatatttgtagaaaatcacaatcatgttttcacaagaaaaaaatcacaattatgttcatgtggatggaagatattgcttatgtgctttctatttctttctttctaatgacgtaatctattacaaaatttaattcactttaatttattaacattataaaaatagtaatttcatttatgatgatttaagaaaactggtttcaagaaaattcttccatttaggttcgtgagaggaaacgtattgaagaaaagtgacaaaatcgatgacaatatattgttgtggataaatagggaattggacatgtttaggccttctacaactttta

SEQ ID NO: 22404 - DNA, 517 bp, Arabidopsis thaliana columbia
gtaacgtccgccagtgtgctctaaaggtcagagacacttccttgctgtagcacagcaacaaggtcagcttttcgaatggtagaaaggcgatgagaatgatgagagtagtccttccaatcatgaaacgatccaaagcctcttgtacaagcttctctgattcagaatccaatgcactcgtcgcctcatctaatagaagtatcgccgggttcttcaacatcgctcttgctatcgctattctttgcttctgcccaccagacagctgcaatcctctctccccaacctgacattattcacatttaccacatgagtataaacaaacatatgtctatctggattaaaaatccattggaatagtggttgctggttttcaagttaaagtagcaagaaaaaaaacaagcacatgaacactaaaaaaaattcaacatcaagacacatgactaaaactacttgtctgggtctcacatgcgttgttgacaaacccatgttactctgttataaatgcttttccatgaccata

SEQ ID NO: 22405 - DNA, 508 bp, Arabidopsis thaliana columbia
cacatttgccggataatttggtcctttgcatctgcttgttatgattgtgtagttcttgttagcaaaatcttctttgcaggctgtttcaataccaacaaagaaaacagaagatccatacttaaagattaatgtgtctacatatatattctaaacgatattagaatcatcaattaggaaggatgatctttacttgtccttgtctgaagaagagctctgcttgttgctgcgtgaccatcaaattcatcatctgcacattcaaattcattaactttttaacaatggtctctctttttataatgaacatgaacatagtaagaaaaagaaaacaaatcatcaagaaattgaggagagaattacatgaaagggagaaaccagagaggaggaaaatgggaagaagagaaagcagacagtaaggagaaatctccattgtttctctgattcttcctctcttctcttctcttctcttctcttctcttttctttttccattacttccattttttgtgggg

SEQ ID NO: 22406 - DNA, 564 bp, Arabidopsis thaliana columbia
tctcttaacccaataaagaaaattatcaacttagcaatattcattgtctaacttattttcataaaatggcaaagatactgaagttgatttccagatgatgagacactctaaaagagagacaaacattatatcttgtatttctgtaatgatctgactaatctaataatacagtagaatcattacaaacaaagaagaaatggcttgattttgattctctaaaatacaagccgagtactactatgttcttgaagttgaaaagagcatggtaaagaacatctagtactagagattgacgttataagagccttttctgtgtctccatccattcgtctttggaccaatctgatgagatactccaagaaaaccgaatcgaatggcaatgtgattggtccttccgtggggatgccaaactcttcttcggatatcttcaagagctcttggataacagagttgctcagataacttattggaaaagcaaagcggattctatcggatgtgtaaccacaaaacagccttctctgcagcggttgagctgtagtagtacagttgatcttgaaagagatc

SEQ ID NO: 22407 - DNA, 458 bp, Arabidopsis thaliana
ctaaccaaaataattcggaaaccaagtgatttctaacaaaaacaactgtgcacacacgcttgtcgatattcaattttttcacaattcccaaataaaaaaactttaacaaaaaattcataattccaagtcccacgaatgtagcttttgatacaaagtcttaaatattcttttaaacattatatacaaaaacatcttttactcattgattgttcttgctgaaaacctgaaatgcctcctctgtgtcttccttcttcttcctctgctctgtttctacttcttctcctcctcttaactctccaaaccctaacctctatctctctctctcagccacaggctctccgttcaccagaaaagtgtggaaacttctctgtctccttccctttccaactctcttcctcctcctccgcagccgcttttcgactctcctgcgaaaactcctccactctgtttcttcacat

SEQ ID NO: 22408 - DNA, 590 bp, Arabidopsis thaliana
gcaactcatcaggagcacttttcacgtatttcgggattaccaagctgagatcttccgcactaatccgggaacaaagtttgagatcgagactatcccggggccaaccattggaagcttgcaaaggttttatcggcttttcatttgctttaagtcacaaaaagattcttggaaacaaacatgtaggcctattataggaattgatggtgcattcctcaaatgggatataaagggacatctattggctgcgactgggagagatggagataatagaattgtaccaatcgcatgggcagttgtagagatacagaatgatgacaattgggactggtttgtgaggcaactctctgaatctttggatcttcaagatggaagaagtgtagcaatcatctcagacaaacaatcggtgagtacactaactcttttggtttatttgtttcaagaatcaaactcttctcacatgttaggtttattcttatcaatgattttcagggtttaggtaaagcaatccacactgtcatccacaagctgagcatagacaatatgctagacacatcatggacaactggaagaaaaatagccatgacatggag

SEQ ID NO: 22409 - DNA, 2725 bp, Arabidopsis thaliana
  unsure (1)..(2725): unsure at all n locations
atgcttccggtttagaagcagtaatccctgtcgaaacaataataccaagcgtgagaatgaccaccagtcctgctaactcggacctgaacacgcaaatgttacgggacaacatggacttcatcgatgaacgcagagatcaggcaatgatccgagttcaaaattatcaacaagctgtcgcccgctactataactccaatatcaaaatccagagattcgaagtgggagagctcgttttgcgaaaagtgttcagcaacacgagagagctaaacgctggaaaactagaaactaactgggaaggtccctatcgaataaccaaggtggtacgtgacggcgtctataagctcgtaaaaatcatcaacggagtacctgagttacggtcttggaatgccatgcatctcaagaaataccacgaataggtacccaaaaacaatcgaactacgataaggcttgatcccttggcagggtacgtaagcaactccccccaagagcgcagcaccatttcaattgaactacgataaggcttgatcccctaaccaggtacgcacgcagttccccctgcgaacgcaccaccgtcttaactcttccgtttgaaacagtttcttcaacaaggaaaacaaacattacatcttccatcaaagaaggttagctgctcacctaacagttcaaccacccctcgataccaagaaggtcccttccaggtgaccagacaccagatcgtcgtttactttacctcatttgtactcaacaattttgagataagaataaaagaaaattttgatacttaatatcatgttttgcaaaacaatcgtttccactacgatttaaaactcattcgtaatcttacgatacctaaagctcaacacccgaatgttggcggatccactttgtgatctcgcttccaaaaagtcgacagtgaaccttacctataaaaacacatcacttcgacttcatcggagctcacctacgacagccatatctaactccttctttcgccatcaaaacgcaacatacaaaacaaggaagaaagaaaggtttcattcgcgatctggcgataccacaaacccagctcccaaaatctggcagattgatagcagccttcgtgatctggtcgatcaaagccaagttcgattccacctcggctgcttgaccttccggtacggtgaactccttcttggcaatccacttctccttgatcccagctagcaacttcgaatacgcagcagctagatcaaccttagcatcgtgaaccgccttcttcgttccctgcgcgattgaagtaagacccaacactcttttagaaagctcatccttcttctcggtcaggtgatgaatctggttcctcgctgtctgcttatctgcctccaatcccccgatctcaatttccatggccccgatcttctccacataacctttctcgagatccttcgaagtggacagctccattttcaacttctcgatctccgcctgaaatcacagccaggtaagaaccatcacatcatcgataaaatatatacaaacaaatcataatcgaagcatacctggaacgagacctcgcgttcctgaccagccttcccactcgctgtcagctccagaatgagggtcctagagagcaaccagcttgttcgtagcagctatcgtctgccaaaggcaaaacggagattagaactggcataagaatgaaattagaacgagccaattgtcgattattccctagccctccttcgccatcatgtcggcataagccgccgcctcggccatgttcttcacaccgggaacctgccagttcctccctttgatgtggcaaagcagattcgccaattcggcctcgtcctcaacgatcggaagatcacggtcgtgagtgtaagaccaatggaagggcctgcttcccgcagaccctccaccagaattagacgtctacctcacttcttgagaccggtttggaccttcggaagaagacctgcccccacctattgatcctcgacctccaccttgggacctacctgatgaccgcctgtctgcagacattgctgcctcctggttagcagccgcatgttccaccctctcttctctaggaggggcgacctcctgatcaatcatgaccagctcagccatcgggcgcacctccggctgggtctgagctttcttcggagaagatggtgcaccatcagaacgaacagcccgagatggcttagagacctgagcgacctgattgttatctgcctgacctgctgcagcagaggtcctggtattgatctcaggaagcgaaggatgagaagccgagacagatgtgctggagacagctagactgtttcgagcagcggccgaaaatcaccagcacgagtaggagccccggcgttgggtcgttgaacacgaagacttggtcgcctcattcttcttctggaaatgagcgggaggtctgaagtagagctggaatcgggaggaactggacaaataaagcacgacatttgttatttagcagctcgatcgcgcagctagcacaatgactcgtgcataaaaacaaaaaaaatgatgaaactcgtacctataggcagatctgcctcggggttcggttcaacctgcgcgacctcttcgatcggaccntgtgcgctgccggaagggcaattgctggaactactagagctacggggagagcagctactatgcgatccttgctgaatgtggcccagtcggtctgaccacgtcggagaagggttaacagctcgag

SEQ ID NO: 22410 - DNA, 2605 bp, Arabidopsis thaliana
taaagtttctgcaatcacaaaatctaacttattccccctcttaaatgaacggagttggagacatggttgggtatattgtggttgtgttggtatttaatggaaaggacgtaactgttgctgtttattgtcaaatcaacgttataattaccctatatgacggttaccagactagtacaaaaaatttgaatcaagtgtagttggaaccgcattaataactgtagccgttccagatttcctctatttaagtctcctcccttccttaattttatccagaatcctcattctaaacctatttcttgtgccggcagttatatcattcacaaaaaaaaattagtctttcgattcgcttgttcttgctatccgtgagatggaggggtttcatatggtctcagaattgtgtcctctgatcactgggtggcgaatttatgtctttgtcgtgagagtcttcaagaaggttatatcgcccaacgtcttcgaactcggccttatcttggcagattacgcggtaatttccgtcaaaacattatgtgtatttctcgttcattcgcttaacttgtatattaaactgtctactatcatgttctgtagggatacaattcccgtattgaggccactgtcgatcgttgccttgctccgttttacgaagaccgattcgttgaaaataagtggaagacgatcacctctttcttggtccgtaaggcaactgactcagtcagagaaacaaagcatgaatacggcatacggaccgtcgtcgttcaggccccaccgagatcaccaccagttccagattccgatttcactcccttcgactacattttggagaaatctgcttacaagaacgttttagtcggtgaggaggaataactccgatgcttcatttattacatttttgaaattttttgattattatctttgtatctccatcatctagatgtcgttggagcgttggttgatgttggcggattgactacagactattacggtctcaaaatgagtttcaagataaaagatagattgtaagtgttcttttcatttgttttatttacaatgtcactctaaacgctaactgtccttatttctaacgtagcaatgaagtcttggagtgcgacgccgcaatcaacaggcggagtagttggatggttactttcagagtttgggtaagggaaattttgttgtcgcactcagcttttggcgtttaaccgaattgtctaacccgaagcttgagagccatggtgctatttcaaaggtggttgccaatccggacagaccagaagttgcggatatcgcgatggtggttttttagctagagggaatgaaccattattctccgttttaatataatataagactacatttcaattaagttttctttcccagttgttgttgttgttgtttccataagaaccaaactacattccagtcgttgttgtttcttgtttccgtttaaatgttaatctaatttgttgttttatgtacgtgccttgttttattgttcaaatcctctcgcaatgtacgtatagtttctggtgtacgctatcgtgtacgtatataagttttggtgccttcaacatcaaaaactattagatttatacttatgttgtgtacgcaattttccaatgtacgataaaccaagtttaatgtactatatagtgtacgtacacgaagacatctagtaaaacttaaaggggaaattcataagataaataaacttgaacatggaacagagttggaacaattcaaaaaacataaatttttcaaagaacatggaacacatgtgttgcaaaatatgtgtgcatccctcataccaaaagacttgagagtagagccgagtagagtagcttagaccttagcagctttgcttctagtagaatatagcaatctccctggcgtaccagtagaaaaaacaaaccctgcagccatgatggaacgtgcattgccctacgcaactcggcgggtggacaaacctccaagacctttcccagcggcaaacattttcagtgtgaagctggctgatgtgatacatcaccatctctgcaaccgcgtggccagcttcaagggtgggtgtcatttcccagaacttttcgctgatctggaggaaatccaagtgattaccggtacacgtaaagaacaaaccggttgcgaacgaagcaaagggatcagataaagcgaccgttgtcatgactgaaaggccctgagctaatgtcacgaagttgctcgcttggcgaacaccttcaaggtaaaccgccgggatggatccacgttctacaagcagctcgaagtatggccggaagggagaccccggttggagtaacgacgaccacgtcatgaattcatcgattgcaagggtgttgatgtcacaactgtagactaagttccttagcgtctctatgggagtctggctgacggggaggtagttgacaagtatgcttatggggtttggcaattggattcctaggtacaactcggttggaggggttagcggaggtaggaaaggcattgtttttcaaacgaggaggtttagacggattcgtgtattcaactaagtgtgtttgtcatgagttttaaagaggagaataaccatcaatgtaagtgggtgggtgacgtg

SEQ ID NO: 22411 - DNA, 528 bp, Arabidopsis thaliana
caaccatatggttagtgaattatcctacagtgtaactcctagcaatcttctagaatagtcgatgtaactccatgtcatgactattccttttccagttgtccataatgtgcctagcacattacttatgttcagcttgcgggataacagtatgaatagcttttaccaaaccctgaaaatgcatgatacaaataagaatgtcaaacaactaaaacatcaaaacaaacatccatataagtattaaaccaagagattctcaccaattgcttgtctgatatgacagctacattactcccatctcctaaccctaaagaagaagagagcatcttaagaaaccagtcccagttatcatcattctcaatttcaattacagcccatgctatgggaactatcctattatctccatctcttcctgtagtagctcgtagatgtccttttacatcccatttaaggaatgcactatctatccttattataggcctacatgtgttcttccaagagtctctgtgcacactggcggacgttactaga

SEQ ID NO: 22412 - DNA, 3399 bp, Arabidopsis thaliana
cttccgggattgtcttgactcttggatgtgaagatcgtcacatctgctccacacgcacatttcaccggaaaaccacagctccgtcaacaccagatgacattgacactgagcttgaactcatcggagtagttagagaagggatttcgaatttttgcaattcggaactggaattcgaatttttcgatttagggatttcaatcgtttttgctttttcgaattttgaattatgaattatacataaagcggcctctattttttgaaatttattggattttgttttgtaatttagaagcccattaaagatggcaaaaggcccaaaacgaatacttattttagggatgctaaaagcccatagtaaacgaaaggcccaagcccagcccatttacttaatcgttcggcgtcaaagttcagatgggacagccgaagagtcacgtctattcaatttactcgtctgcttttaatttacacgaaaccagagaattcaagaaattgaactgttccccggtgaactacatggatcatcgccggagcattcagtgagtgagaatgtcggcgccttcctctcctgcgtctctgactccaacatcaccggattgttcttctccaccaccacctgagtggttagttgacatcggtatgatccgcctagagttgggggttccgcttcaccgtgtaatcccccctggagcagtggagccaacagtaccatggatgaggtctcctttaccaggatatatggggccggattttgttccagccccaagagatttcgtcccaagtgaagttatttggcccgaaaagttttttggtcaaacgaatctatttccggagatgcatgaagcatgtcaaatgttcattcaaaaggtaaatgtaagaatagtgtttcgttgttgccaatgtggtttggtttagggtttaatcaaatttcaggtttagggtttagttgtgttgattgttcgttatattaggtgaatcatatagtggtggtatagttgtattgatggatatttagcgagaaattgacatttatattgttggacaggtggataatcaacaccaagcttatcgaaggcgtcaccgccaactactcattaagttgcaagacctggagagaggtatgaggcggttggaggctcatccgaaagactgggtgagatacggtttcgacaaagttgctgacattccactgccactaaggagatggtgtgttgagcatgatggatcgtcaccgaattatgcgtgtttcgcggagccaattcccattaaggaggacgatgaaccagatgatggaagttactacaggagagtggatgagcctccacgcgagtatcctcctgactctctctttcaataaacattatgtctttgttttgcttaagtttgtaaaataaatctaaatctaaattgtggttttaaatctttattttgctaactatctgtgttttgaatacaatatatgaatctaaatgtttgaatataattatctgtgttttgaatgtaaattttgctaacaattatataatcagtcgaacggaggtactttattggtcgaaccatttggacaacttagtcgagccatttggactattagtcgaaccggatgaactatttgaactaatcagtcgaactggatgaactatataggtcgaaccgtttgaactaaccagtcgaacacatttgaaccatttgaactaatcagtcgaaccatttgaactaatcagtcgaaacgtctcgcacgcattcaaatcgccaacaatccttaacagaaactcttcaatgtttccatcattctttgcaccagcttttactaccttgaccaagaagtacaacagcactaacttcaacctatctgaaccatgcttcatcttcgagcacttagcaagaacatctacaacctttatcccagattcttttttaaatatcctcttcacaaagttaatattccccattgtattcatttcttttgggtaactgtggcaatcaaacccacttaacaacgcatgctctttaatggaatacctaataggtactccatttaccacaaaccaagcctcctcgagcaaactgtcttcactgtgcgcacgataagcacccacatgccttgcgtctggtggttaggctcctgaggcatgtggaatatatgctggaactgatcgtgtcttttgaaccatacagcttcttctttaaacttcctctctatcagttcaattgtctgcgtgacctggcacctactgcttatcttgcacactttgccgtattctgaaaaaggaaaatgcatggtctgttgcggcagtggctgagaatctaaatcatcatcctccaaaccatcattgccagcctcatcttcctctgtctctttaacagaaacctcatcatcctcggcctcataagtatcctgcaaattcaataaacattaaccaattgaagaattcatatgtaccaaactaacaattcaaatgtaccaattgaactagttccatcaaattacttaaatcaaacatgtgtcacagatgaactagttgaacatttctaactaatacgagaactaatactcaaacaaaacaaatgtgtgtcatagagattcaattgtatatacctgacgattaacgttttctaccccttcttttggaattgtattcaccatttcctcctcctccaactcctccccattcccgtctttcgcttcttcgaattgttgaatgacagcgtcaattagaggtttcaaagttgtccctgtctgatcctcttcaatttcggcggttcctttaggagaagcctcatcaccaacacgcggttcctccatagccttttcaatttcagcggttcctttaggagaagcctcatcaccatcacgcggttcctccatagccttttcaatttcagcgctttcttttgtagtatcattcgccgcaacatctcgtgctgctggttctgtcggacctgctggtttggtcggaaccaagtcggcggcatctccgtcgttctcaatttctgaagtaacttgttctgatgtcgaaacttcaccggacgacgacttctccgtcgaatcatatacagggccagcaataccgtctctaacacgagccatcaaactattagacgaatcaagaattcgtcggaaaatcgcgaaaggcgagaaattatgaatttgattttggaaaatttgaattgaataaatggcagaaacggtttgattttaaaaattagggatttcgcttaagtttggaatgggttttgggtcgttgggcatggatcttaattggatcggatactttgttgggtcgtctgggtttatggtcttttgccaattatttgaattttctctcatttatttttaattcgataaaaaatgggaattagaagagtggcattcctggttactttttcgcagatagtggc

SEQ ID NO: 22413 - DNA, 841 bp, Arabidopsis thaliana
ttccagttttccatgatgtgccttgcaattgtctatgctcagcttgtggaatgaccgaatgaattgctttcactaaaccctgaaatagatgatagaaagaagatataattaaacaaggcaatcgaaagctgaaactaactaaattaagttagtaagacttacactttgtttgtccgaaaataattgtacggtttcttccatcttgaagatccaaagttcttgatagcatccttacaaaccaatcccagttgtcatcattctcaatctctacaactgcccaagctattggtactattctattatctccatctcttccagtagcagccaataaatgtccctttatgtcccatttaaggaatgcaccatctattcctataataggcctacatgtttgcttccaagactctttttgtgacttaaaacagatgaaaagacgaagaaacctttgtaagcttccaatggttggtccgaggatagtctcaatctcaaaagttgtcccaggattgcttcgaaagattttggcttgataatcccaaatccgtgcaaagtgttcttgatgagtagcttgtctttctctcataaccattgtcttcgccttcgaacattgatcttctgtcacagtgagtttatactctctcttgatctcatccaccatctcttgtttggttattttcggattctttctcaacctttccctgaataaccaagctattgttctttgcttcagcatctttgagtaacccgatctaacacacgaatgccatctttgtataccttaacttgcatcttctgtttcgtcttatcataggaacagtagcatctccattgacaattgacatca

SEQ ID NO: 22414 - DNA, 3257 bp, Arabidopsis thaliana
cgtaacgttataatattctaccgcaaaacagaaaatttgattatttgagggttagtatccgaataatttcgaacacgttcgaattattgtgaatattaactgtcggcttgtgttcctgtgcatgtgacccaatcattactggcggttccccataaagatgctgtttgttatgtcgataatgatataataaagaattttgataaacccaacctaaagcaacacgctaagtaatcacatattgtatcccgacataactcagccacaactcactgaaaacccagccgcaatgcttttataactcaaccacttctaaatttattcagccaatacaagctgccgtcgtctgattagtgctttttgtagcagacacgactatatagaatcagtgctttagtaccatactaattgcagccaagatgatggctcaagggtctcttttccacggtgactctagtgtcgatgaggtatttatcttcacatctgaatagtacaaatcgttacccatctaacgtggagtatatcgtgtttgtgttaatgtaggagctcgatcgtatggaaataaggatgcgaacgaggtacgacgaaaacaggaggcgcgataagggcgttccgatcgagtgtgattgcaatgctaaggttgtcgttgccacttctcgtgatcctgttacaaccggaaaactttttttcagttgtccgtatgaaatatcagatgtaaacatcttttgttgagttatggttctttattttatttcttttattttgtatccctatgaatcaaacgtttggtcctctaacgacgtttgggttcttgactattcagttgtcgtaaaccggtgtatgtatagtcctacagtgacgtttggtttctttgatgggatggaagtttgggtttgacaagtcaaccaccacgttagaataactcagccatcacacgatttgtgtgatgacaagtcagccaccgcattagaataactcagctaaacatcgaattaaacaacgataactcagctgtgacggtatcataactcagtcgtagcacgatttgagcgataacaagtcagcccttacgttagcatagctcagccgtaaaacgtatcgagcgatgataagtcagccattacattggtttttgttataattaacataataatagattcatacagacataattctggttatcaatcctaaagtgtaaatatttagtacaatcacatgctaaaattcccaaaagatacagacatgttcgaaaaagcaaatcactgctcaaaaaactgaaggggcattcttacaggtagttcatcgaagatctctgctgccatcttaacccgtagaccctggatatttgaattagtaatgccatcaaaacaaacaccaagcaataaacagtcaagaatctttaacgtgtaaacgccgcagtccccggtgataatattttgctggacctttgtcatgtgcctccgccggaatgaaaattggtcgtattgcgggatacaaacttcgggaggaagaatttcactcatcatctgtggaatcatcctcgtgaacggcctacaagcttccaggatttttccatcgctaatcggagtatgctctccgacgatgcaatcatagcaatcgatgtgagacctaggcaagttcacgtgaagggtcacccaatgattacctccggtttggtggacaagaaacaagtgatccacatctgttattcacttcttatttgttgggtcttctccagccgtaccgttcatccaaccttcatacggggtatctctgaaagaaaccctcttcggtttcatcttccactgtttgtaatcattaacccacattgtcgtgaaccacgggtctagaatcatgacgcgttcgctgtggtatggggtgggatctcgcaggagcctcatggtgaggactttcacatacgcagcaatgtgctggacaaaaataaaaccaagacaaaacacaacattaactcagccgtaaccaagtaaaactcagccttaacacctaaataaatctgtcattagctaaattaactcagacagaacgacacgataactcagccacaaccttagaaaaactcggacagaatataacaataacttacattgtaaatcagccattatctactttaactcagacagaacgacacgataactcagccataacattagccaaactcagacagaatataacaataacttacatcatcacccagccatccatgtttctcgtctggccagtcctttctttcggccttgataacagagtagaacagcacctcgtccatcccattttgcaaatattgtttgctaacaaatagtaaagaaagttaatataaacaaatagtgtaagcatgtcgtatttatcaacttagtaatgtataaagggccataccattcgggacttgtcaaataagccttaagcttctgcagtttggccggatcaaccggtgccagaggatcatagattgctcgtgaaggcagacaaccctttctcatgcagctcagcccgttgtctccaataactggagaagtgtgagtgggcatagcttcggggttaatcaatgacctcccatccggggccagcttaacagttttgagccgaatttcttttacactctttagcctctcggtttcctcctcatcttcatcagactcaggaagcatttcattatactcggatataaccttatccgtgacatcaactacatccgaatcttcctcagctttttccttagcttcctcagctttttccttagtttcctcagatggttttggtttctttattctaatctttggcgcagtaggaggcacctttttaggctgttgcaaaggctttcttcctcttcctcttctcgctggcggtttctggattagctcatttaatgttttctcctttttctgctttggcacatttggggctggtggcttcctagagcgtaaacggcgattgagaggagaaacagtctcaacgaaatcaaaatcagacacaatggaggccttatcaaattctgcttcaagcttcctacttaccccaacatcagcatgtttcgactgcataaacgtaacgaaaactcaggcgttaaacaacgaaaactcatacctatgtataaatataactcagccataactaactaaactcaggcgtatcagattcatatacctcagtcgtaactaactcaactcagccgtatcatattcatataactcagccatgactaattaaatttttaactcagtcgtataatattcatataactc

SEQ ID NO: 22415 - DNA, 2178 bp, Arabidopsis thaliana
tgactttgagtttttggttattcattcactaatctcttctttatttcttttcagtccaccgaaagggattccagaggcaatccttatggacttggcagtctcgaagacacattaggctgtgcaactacaatctgcctggacaatcatcatcgtccttcctagatttagaagaacggctgaaggaagcgcaacgcaagattgaggagcaggcagcctacaatgagaagcgtgattctgagattgctgcgcgtgaagctgagactgcccgaatcacggctgagcaaaaggacaaactcgaacacttgtccttagtggagaagtatctccgacaaacagatccgcaattccttgacttcatggcctctaaatcttcgacaaccacagagtctctaccagctactccacagaatgatcaataggtttagatttcagtcccttttcacttgaactttgaacaataatgtttgtgtgtgtgtttagtactttgaaccttaagtgtaagttgtgttttatgtatttgataggattttcaataaaaatgtgttttagttatactttatagcatttagaacaacaaacaaaccgaattctcataattaataaacaaccaacaaagaaatcaagatatgaccaaattcttatttcgacacaaaatgtcgtcgccaaatagtcgtccaatagtcgctatatagtcgtaccatagtcgtaccatagtcaccaatattaacgactatcgtctgacaatataagagagtcgttaggtagtcgtaaagacgtcgtacattagtcgtatattatttagtgactaagatacgacaaccagaatagtgcctacagtttaatacaattgatcgtaatctagtcgcaaagtagtcgtcaatcgaagtacgactagtttacgactacacgaataatcccccataaacaggtaaattaatcgtacataagtcgccaaatatgacgaccaatcgacgactattccgtgccgactgtttcgtagtcttgttagtcgtctattagtcgtattatttctgtttacgactatgaaacgactagtgttgtagtcagtaaacgcctgttttcttgtagtgccacaacatcagcacaaactcctgcatacgtgtatacatgttctccacacgtatgctaccacacacacgtacatgcacacccacatcacacgtacgtacacaactgtgaacacccaagctatagccacaaaggcttataaccggaacatcactttaatgcatcgtcatgaattactcggcatacgctccgagtcttgtgccatcatgtaagtgaccactcaggatcaagacttactgacacaatcacaacacaaaaagggaggcagcatcttactctaagcatgatggtatcgggtaaaccctgaataccacttagacacaataacctcatgcagtactatatataagtagtttaccatgccccaaaacaagtatagacaatcaagcaccaaatcacgtaatatatatgcataatatatcaaggatttactcacaacctcatagcatatctcatataagtataaccatctaacaaggtaagtaagccctcgaatcatatctcaattcatcaagtaaacttagttaagtacatattcctttaacctagttatgcaccagtccgttcattctttagtgataatattatcaagttcgtcaaatgcccatattcactttaagattcaagttctaacttaaaccgaattccgattagttaggtctaagtgagtaagcatgcatataatctaaagactagctctagaaaacatgcaaacaaacacacaattcgaccacaactcacggattcgatagctcggaaagttttttgggtttcgggcataacttctcgagcacggtcgacgattccttactcatggtcaagttttctcgaccacatgcgatgattctcaagtctcggacagagtttcctcgaccaagggcaaattttactaaattcgggaaagcttttctcggtttcggacgagtcaacgatcggacagccttacagtctctctctcgcctttagaaatgaatttgggcggagaaagctctatttagaacgctgcccaaggtcggccagactgcaccgcccgctgccacatgtccggaaactgccgcacccacaggcgacaggtgtcggtgtagagtc

SEQ ID NO: 22416 - DNA, 469 bp, Arabidopsis thaliana
gactctagactgtctctatataaccaagcaattgtgccttgcttcaacatcttggagtaagcggacctcacacaaacatgttcattatcatatatcttcacttgcatcttatgtttcttcctatcatacgagcagtagcatctccatggacatttgacatcagtagaagagcactttgcaccaattctcaagcattgtgacctgtatagtttgatgtcatatctggttttgagagagtaccttagcacagctatcttgaattcttcagggccattgaaagttttccccagccgcagcggctcttcaggcaaatcagattcggcttctctcgcagcattgtcttcaggacttccttcatcatcactatgtgatacaggatctggaatcttctcatcatcccatatttcatctccactatctgcatcactatcacttctattgtcatcttctctcgcagcctctccaaatt

SEQ ID NO: 22417 - DNA, 2883 bp, Arabidopsis thaliana
gaatagggatttgaaaaaatccgctataaccatccaaaaagcaatagtaaggatggtttgctaatctttctagcatttgatcaatgaagggcaatgggaagtggtcttttctagaggcagcatttaactttctataatcaatacacatcctatgtccagttatagccccagtggatatcagttcatctttagaatttttaacaaccgtcatacctccctttttaggaacgcagtgaactggagatacccaagtgctatcagatatagggtagataaccccagcatctaatagtttaagtatctcctttttcacaacctctttcaagtttggatttaatctcctttgaggttcaatgctagagtaggattcattttcaagatggattctatgggtgcacaaggtgggtgaaatccccttaatatcatctaacgaatatcctatagctttcctatacttcttgagctcagttatcagcaggtttactgatcagcagttagctcatcattcactatgacaggataagtagagtttaatccaagaaaaacgtaccttagcccttttggtagcggtttcaaatctattttgggtgccttgagttcagaccagtcatcggatactaagttggcttcaggggaggggttgtggtcgagtagttcggtcgagcacactgaatggactgttggtcgagtgatgtggtcgagtacatattcccccttgctctttcacccaaatcttcatattctcctggattctcaactgctttgtgttcatctaaaagcttctggtaccccaaagtctccaaatgtaaatctccttctttgctatcctttgttagagcactctatagatgatctgtttctcctagctcttctagcatttcgtcagctaacatatccatctcttcaatccagaaaacatttcctactattgtaggcttcttcatggtgttggtgatatcgaaggtcatcttgagatctctcccgaggttaagatcaatatttcccttcttaacatcaatgatagctccagctgtagctaaaaatggtcttcccagtatcaaagggtctttgggttcttcatccatttctaaaatcacaaagtctgtaggtacttcgaccacgcctatcatgactggtaagtcttccagcagaccatgggagattctaacagatctgtcagctaggatcaaggatatattgcagggcttgtacttgttgaagcccagtttcttagccacagggagaggcatgagactcacagatgcacctagatcacagaggcacttgctgaaggctaaagggccaagagcgcaaggtaaggtgaaggaaccaggatctcctagcttttttggaatgatcttctgctgaatgatcgcactgcattcgtgacttagcaccaccattccttggacttctttgatcctctctgtaatcatgtctttcacatatttgttagagtctggtataagtgcaagacagtcgacaagaggcatcgtgacttcaagatttttcaattgtttctccaggagagctttgtacttttgtatcatgaccttcttgaatcgcccaggaaatgggagtgggggcttgtaaggtgggggaacgaagacgttgtctttggttttggcggcaactggtttttcaacaagaggaaatgctgcaggagctagtgatcgagtaggttggtcgagtataggctcttctattgctttttcagcggaatctccattctgacagaaatcctccccatcttgatctacactgtcctcagtgttctggttcggactctcttttgtgggtaattctttaccgcttctaagtgtgatagcatgagcgtactcctttggatttggcattgattttccggaaggtcctgtaaatttgggtgctgcggtcgacccagtttggccttctatgtatctgatcttagatgtcagtgcttcaaccttgatattgatatcattgtaactacagtcaaccttgttgtgaatttctgccatcttttgcacaaatccattgctcctgttgcttgcccttggagaatctgctgtaacatgttcttcaagtctgaatctggagttgttgaagctggttgttgttgctgctgtgtgaacccaggtggtggaagttgctgctgatagttgccctgatactgctgcttaggaacatacccttgaccttggttgtaaggaacaaagggcttgggttgattctgctgctgtgaagggtagacttggtcctgcgggtttacaacgtttgtacctctttaagacagattgggatggttctgcttgaagttgttgaaacctttgttgtaacctccttggttctacacatagctgacctcttctgactgcagagtctccccatcctaaacttggaacgtctcatcatcacccagaaaatgaatgtgctgccgttgcacaaggagtagcttgtccagtttgtcatccatagctttcatttccctgcggtgcttctcattagaattagagctgtggcggatgcttctgtcataatcttcattatagttgccatccgacggaaccaagttctctaccagctcccatccttctttaacgtttttgttgaggaagttcccgttagaagcggtatcaagaagcatcctgatcttgggaaggacacctttgtagagagtgctgagaagtgaagctttggaaaaaccatgatgatgacattgcgtctgataacctttgaagcgctcccatgcttcacagaaagtctcattatttgtttgtgtgaaaccggagtttgagaaaaacttagccaagaaggctttcttgcagtattccaggaggtgatggagcattaaggaagcgacttttcccactgaataggctttgtctccatgagagaatggaa

SEQ ID NO: 22418 - DNA, 2165 bp, Arabidopsis thaliana
gccagtgtgctctaaaggctgatcaagcaaggtttggtgacaggtaaataataattagagaatattacacgtagaggcactattttgaaactttggccacaaataggcactttaaaagcattagtcactttaatcaaacggaattacccctttaccctgaaatcgttggttaaacaaaacctaacaaatatagccggttttctttaaactggttccggttgaaccacgtcttatcaaccgtctgggttaactccatattccaaccacgatcgtaaaaaaacgcttacccagtaaaaaacctaatttactgtttctccacatcgcgactccagcgaatccggcgactgctccgaatccggcgactcctccgtcgctgtccatcaatctgccactcaggcaactctatactctttgaataaaaaccaaatagtcatttcccccaaatctctgcaataatcgaattcgatttcgatttattgttctcgtaagccagatttcattagcattccagttgattctcactgatcggaatactcaatggaaggtacaaatcgtttccaatcatcttattttggtccaattaactgagaagaagaaatcctcttctcgctgaatgtttctacaatttttttttgaatcgaaaaaggtttcccaattgtttgtagctaagcacagacgtttgtggttttagtagtttgtacaaatactcgttaatctaatcgttatctcttgaactggtttcttgccaatgaacaaggtcgacatctcaggaaccatcttctcagtgggattcaaactttccaaatagactcttcgccaccgatcattatccgaggggaaggctgaacgtatactctagaccagatattctatcctttatcaagaaggtttttgatgggacagaggaattagattttatacttcagtcttgctttggtcctttattccatttgccagttagtagggttgcgacttcgggtaaggtcattcatgccttgttatgtagacagttgcttactaagaaaaagtatgagttttggacagtttttggtggacacccaatgagattttcactactagaatttgcttccgtgactggcttgccttgtggggagtttcctgacgagtatgaccctgaaaattctccggtttatgatgatggcaagaagagctactggaatgagttaattggtccaaacaatacggttacattaggggatatatctgccatgctaaccaagaaacccagtaaactgtcttctgaccacaaactgaagctcgctttcctactcattgtagatggtgtcctcatagcatctaaccaaaccggtaggcctacatttaaatatgtagagatgttggcagatttagagaaattcctttcgtttccttggggtagagagtcgtttatgaagacggttgaagcgatgacacccgagaaacggattctcgctaagagcacccggtaaaagacagctcacaaacgatcctattcagaatttggtgaagcaattgcagcaggatcacattccgtcttaaaggtttcccgcatgccctgcagctcttagcttttcgaaacatacctggaatggtggatttgctgaagtttgatgacacctccttgacaatccttcattggaagaatttaactcatccaacacaactaattactcttcctcagattcactctttagaaagcaaccttaaggtttttttctaacccaaaagtttttatatggtctctataatattctctttctatatatccagtcttctttactaataataacattctatttttcaacagagacctgtggatccgcttataggtgaagatattaatgttgaccaaagttgggcagagtgggatgacgaggtgaaagacaggaaagtttcttacatgaatggtttgatactgacagctcatcaattcaaaaaaagtgattggccaggaggtgatgctacattgccatcaattaaaattccaaaggagaagtcttctgttgttcacaaaaagcatattgtggatcgtaagaagagactacgggtgaagtctgacctcccaaatccaagcatagttattcaactcgttttaatcaagttgtaaggctatctgatgatgagaagtctaggttgatcgttgatctacaaaacaaggtggaaga

SEQ ID NO: 22419 - DNA, 594 bp, Arabidopsis thaliana columbia
taaaagatattacaagaaactcttttaacaagaaaaatctgtagaaaaacaagattttcatctttaaaattaatcaccactgttcagtgttcatcatatctgtcttaaacaagaaaaagctggaaactttgtttacctccatgacaatgcctctaacattctcagaatgagtaggaacaactttaccaactctcaacctaaaatcaccaagctgatactgaaacccatcaaagtaaagagccactttagatttataagactgaagcttctccataatcaactgaatcgaagaatcagcttccaagacaatcctctgcgtcctgataatgaaatagtacttattcggctgatccgcaagtgaaatccctagaaaatcacgaggaaactccaattgattcgcttggtcttttaacatgggtttgtaatagttgagtgttgctttccatcttccttctttcacaccattgatgctctctacacattgtgttgcttcgtttaggatttggctgcttactgttgatccttggtttggttgcaatgtaaaccctagaaaaaacaaaccccaaatcaagaatcggagagtatcagacagaa

SEQ ID NO: 22420 - DNA, 733 bp, Arabidopsis thaliana
aaataattcagataatttcattttaaaagaaaatgcaacgaatacaaattcttctaatagtagtttctgtattgaaatttgaaggtacctgtgggagtttatcaatgaatttagccgcattagcgagctcaatcgcagttcgaatctcttgatcagtcgcgtcttctttcccataagcaatgttctcctttatcgtggtcgcaaacaagacaggttcttggctaaccaaaccgattttgcttcttatccatttgagctgaagtttcttcaaatcaatgttgtctatcaatacttgtcctgactccggatcatagaacctttcgattagactgataaccgtcgattttccgcttccgctctgtcccaccaaagccaccgtcttgccatttggtacaaagagtgagaatccagcaaagatttgaacatcaggcctagccggatacctaaagtaaacatctttaagctcaatgtctcctctaatatcctcaagaacagaaccgctcatatcgtaagcatcaatctttggactcctcttgatcgtttcgaacattttgaaagcggcagctcttccagcagcgaaagcattcaaacttggcgatgtttgccctaacgacctgacaagacaatgtatcttgatcaacacttatgatcgtaagcgatgagtcaatttgagggattaggatttttaactcacattctccggtcaagactgcaaaaatcacattgatgactt

SEQ ID NO: 22421 - DNA, 1586 bp, Arabidopsis thaliana
tgcatgataaaaataagaatgtcagacaactaaaacatcaaaataaatataagtatttatccaagagagactcaccgattgcttgtctgatataacagctacattacttccatctcctaaccccaaagatggagagagcatcttaagaaaccagtcctagttatcgtcattctcaacctcaactattgcccatgctatgagaactatcctattatctccatctcttcctatagcacctagtagatgcccttttacatcccatttaaggaatgcaccatctatccctattataggcctacatgtgttgtcctatgagtctttttgtgatttaaagagtcgaagaaacctcggtaagctgcctaaggttgttcctggtgttgtcccaatctcaaattttgtctcaggatttgatcgaaagaactcagcttgatagtctaaaatccgagcaaaatgatcatcgtgagtagctttcctttccctcaaaatgtttgtcttggcctccgagcattgatcttctgtgactgcgagattatactccctctgaatctcactaaccatctcttgctttgttatttttggattcttcctcaacctctccctataaaaccatgcaattgtcccttgcttcaacatcttgcggtaatcagacctcaaacaaacatgcttgtcatcgtatatctatatctgtatcttatgcttcttcttgtcatacgagctgtagcatctccatggacacttcaagtcagtagaagagcactttgcaccaattctcagactttgtgatttatacagcttgatatcatatctagttttcagagaataccttaagacaactatcttaaattcttctggaccattaaaggttttcccaaacctcagaagctcttcaggatcatcggcttcaggagtagcaacaccttcttctttaggacctagttcatcatcactataacacataggctcaggaatcctctcatcgtcccagattttatctccactgtcagcatcagtgtcgcttgcatcgccatattctcttgcaccaataccaaaccctgcttcaaaatcatcgcaatgttcctcctctagacctccatccatatcgtcttcaccaacactgccacccacattgtcttcaccaacaatcccacccacattgtcatcaccaacattcccacccacattgtcttcaccacatgttccacccatattgtcttcatctatagtaacacccacattgtcttcatcaacgattccacggccattgtcttcaacataaggttcacagtaacgttcaggaacagcttcaatccccacttcacccacattgtcttcttcctcgcagtcttcatcgccgataacctcacaatcatctccactcacacaatcgcgatcttcttcttcttcttcgtcacgactcttccttttttttcttcttctctttttgttcatgttgtttctgttgaggaactgggttttcctcttgtagaatcgacaccgcctcaatcactgtttcttctggagttcgattagtcactgtttcttcacgggtttcatttatctccatttcttcttggttttgattagtc
